United States Patent Application Publication US 2004/0216190 A1 - sequence listing, part 2

SEQ ID NO: 1726 - DNA, 1893 bp, Zea mays
  Clone ID: ZEAMA-23APR03-CLUSTER11782_2
agttcaccgtccctccctgtccttgccatggccatccccaccgcccccgccctcctcttcccctccgttctccctaactcattcccccgccggacaccctggcgacacctcgtccggcggcaaccgcgtcacctccgcgcgggccgcccgcgcctgcaggcgccggcgccggctcctcccccggtggcggaggtcgcggcggagcgggacgacacgcctccgctcaggctgctcgagccgccgcaggaggacgaccccttcccgcccgagatggagcccgcggaccctgatttctaccggataggatatgcgcggatgatgcgcgcctatgggatcgagttcctcgaaggccccgacgggatgggcgtctacgcttcccgggacgtggagccacttcgcagagctagagtgattatggagattccgttggagctgatgctgactataactcaaaagaaaccttggatgtttttccctgacattattccactaggccatcctatatttgatgttatcgagtcaacagatccagagacagattgggatctaagattagcatgtcttcttctatatgcatttgatatagaagacaacttttggcagttatattctgattttttgccaagtgttgatgaatgcactagtttgctgctggcaccaaaggaagatctaatggaactagaagatgaagatcttgcttcacaaatgttaaaacaccaggaacgagcaattgacttttggcaaaagcattgggacaaaccaattcctctaaagctgaaacgccttgcacgtgaccatgagagatttctctgggcactgagtatagtacagtctcgttctgtcaacttgaagttgagaatgggagccttcatccaagatgcaaatgtgctagctccttatgctgatatgttgaaccactcacccaatgctaattgcttcctgcattggcgttttaaagaccgtatgcttgaagttatgattaaggctggacaagctatcaagaaaggagacgagatgacgatagattatatgagtggcgtcaacagcaaatttatggaaagatatgggttctcatcaccaacgaatccttgggagctcataaatttctcgagtcctgcaacaattcacatggattccttcttatcggtcttcaatatcgctggcttgcatgatgagctgtaccacaattctgcattgacctcagtagtagaaaccgactttgtggacggagcagtcgtagcagcagccagagcattgccgacatggtcagatggtgatgttcctgcaattcctagtgtggagagaaaatctgctcaggcactgcaagaggagtgccgccaaatgttggattcattcccaactaccatcgaacaagaccagcagatcctagattccgatgcgcatatcagcaaaacccgagaaattgcgatcaagtatcgtctgcaccggaagatgctcctacagaaaatcatggacgcactggacatatatcaggatagaattctgttctagctgtagaggcggcgctacctgtgctcatttagagcacagaacgagtgcccagttctactgctagtaaacctggggccattgtagaaaggggattttgtagggcagcctttcagttcatagcgtctgtaggttaacagcagaggatcccagaaggaaatcaacattaggataggctggttgccaggaaatatagctgctgtaagttcaagtcagcaagctgccatgtaacttgtttgcacagggcggcaatctgtcatagccacctgcatatctctcaggctcagcttcacaacaacttgcactgctgaaagaaatggcctgtgggctgtgtcctgtcacctgtgtgtgtgaaatactatccatatgattggttggccgcaa

SEQ ID NO: 1727 - DNA, 970 bp, Zea mays
  Clone ID: ZEAMA-23APR03-CLUSTER11783_3
acgagcccttctcgtcctcagatctagcgcctccttcaccctgctgctggccggcgagctcctcagcgtgcttgtgatgataatgccacaacatcttctacaagcaagatcaggaagaagacaaaaaaacgttatagtgaagaggaggacgacgacgatgaggacgatgaggatgatgatgaacttgacggacaagaaggggatgccagcggcaagtcaaagcaaagcaggagtgagaagaagagccgcaaagccatgctgaagcttggcatgaagcccatcactggtgtcagccgtgtcactgtgaagaaaagcaagaatatactgtttgtcatctcgaagccagatgtgttcaagagcccgaactcagacacatacgtcatattcggcgaggccaagatcgaggacctcagctcccagctgcagacccaggccgcagaacagttcaaggcccctgacttgagccagatcacgagtccagagacttctggcccgggccaggaagacaatgacgaggaggtcgacgaaactggtgttgaggccaaggacatcgagctggtgatgacccaggcatctgtttcgaggcccaaggctgtcagggccctcaaggcttctaatggggacattgtcactgccattatggatctgacaacttaaaaccatttttttttctctctccctttggagtgccatgctatgcagcttgagtgttatctgtggaccatatggttagagatgttagcatgatggcttcttctgtcaaggtcattcaaacacggtttcatctttgctggctgtggttctggtgtttcagtaatgtcattcaatggctctgcaatgcccactgttcctttacatttttcattacctctatctgatatgttaactgtcagctcctcgtgtttactgtcaaaaaaaaaaaaataataaaaatgataaaaaattaaagaaagacaaaggatggaaaata

SEQ ID NO: 1728 - DNA, 1545 bp, Zea mays
  Clone ID: ZEAMA-23APR03-CLUSTER117973_1
aagataacaatcaacaaacaacaagcccgcgcgagactgttctttctccatttcccaatggccgccgccgccgccgtcttctttccctccaccccgaatcctcggcaccgcctcgccgccgccgcccgccgccctccacccagcttcaccggcgccaccgacgccgtgccgctaccggaggacgaggactccagcgacgacgatgccgacgacgacggcgcgccacgcaggagcgggcgcagggaccggcgccgcgcggtgcgcgtcgcgtgggagaagctagtccggtggtcccgctcctggcgccgccgcaaccgcagcgacgtcctcgagaccacgcgcaaggtggtggttctcgggggcgggtcgttcgggacggccatggccgctcacgtggcggccaagaaggccgatctcgaggtggccatgccctcagggacgaccacatctgccggtccatcaacaacgcacatgtcaattgcaagtacttatcagaacacagattgccagaaaatatcgtcgcaacaactagtgctgctgatgctttagcaggagctgatttctgcttccatgctgttccggttcagttcatcctttcttgaaagtatttcaacacatgttgatccaaagttgccattcatatcacttagcaaagggctgaactcaatacccttcggacaatgtctacaatcatcccacgagcattgggaaatcgccgccaaccgtttgttgttctgtcaggaccatcatttgctgtagagttaatgaacaaattgcctacagcaatggtggtggcatccaaagacaacaagttggcaagttctgttcaacaactgttagcatccccaaatttgaggataagcacatcaagctgcaggtatagtggaaggcatgagtctcgggaacaactgtatggctgcccttgttgcccaaggctgttcagagatacggtggttggcgacgaagatgggagcaaagccaaccactctttctggcttgtctgggtccggtgacatcatgctcacatgcttcgtcaacctttcgcggaatagaacagtgggactacgcctcggttctggtgaaaagcttgacagaatcatgggttctatgaatcaggttgctgaaggcgtatcaactgctggggctgtcattgcgttggcgcagaagtacaaggtcaaaatgccggtattgacagcggtggcacggataattgataatgagttaactccaactaaggcggttttggagttaatgaatcttccccaggttgaggaagtctgacgaggctagcaattgagttctgcatttttccacttggctccgagtgtagcttgggcccatggccgaccgtatgaaaaatctgccaaagaccgttacttttttttgggtagcattacattattaatgaaaaaatgatatccagtaacggtggtatttagcatttcctaaatttcgaaacacattttcctgtccttgtacaccggcaaaaacttcacgttgacgtttcttttgaaagaggaaactgttctcaaaatctagcatttc

SEQ ID NO: 1729 - DNA, 1226 bp, Zea mays
  unsure (1)..(1226): unsure at all n locations
  Clone ID: ZEAMA-23APR03-CLUSTER117_8
gaatatccactattctctaggaagcaagggaatcacatcgccatggcagccaagatgtttgcattgtttgcgctcctagctctttgtgcaaccgccactagtgctacccatatcccagggcacttgtcaccactactgatgccattggctaccatgaacccatggatgcagtcactgcatgaagcaacagggggttgccaacttgctagcgtggccgaccctgatgctgcagcaactgttggcctcaccgcttcarccgtgccagatgccaatgatgatgccaaggtatgatgccaccgatgacaatgatgccgatgccgaatatgatgccatcgatgatggtgccgnactatgatgtcaccaataacgattagctagwatgatgccaccgatgatgatgcccaaacatggtttcaccaatgattgatggcccgagtatgatggcccttcgacgatgaccgcccgaagtatgatgccacccgataatgatggccaagtatgatacccacccgatgatgatgccgagcatggtgtcatcaatgataatgccaaacatgatgacagtgccacaatgttactctgattccatctcgcacattatacaacaacaacaatttccattcatgttcagccccacagccgtggcgatctcacccatgtttttacagcagycctttgttggtgctgcattctagatataagcatttgtgttgtmcccaataatgaagtcggcatgccatygcatgcgactcattgtttaggaataaaacaagctaataaagactgtggtcccactggaatgggaggcaccggtggggaagccgggtcttatggacccggtggagaccaagccaagcaactccggaaggaaccgatgcttcatcgaactggctcgggcagctcctcatcgtccgaggatgatgggcaaggcgggaggaggaagaagggaggaataaaggagaagctgatggagaagatccccgggatgggcggcaagaataccgatcatcagcagcacaccaccggggctggtgctgcctatggagaccaataccaatctgggcagcaacaggagaaaggaatgatggacaagatcaaggagaagctccctggctcccactagttcgctccaaccgagccgttaccgactatatcgcatcatcttttatgtgtgtttgtgtcctgtgaccggactctccggtccggtgaaggagagggtagccact

SEQ ID NO: 1730 - DNA, 1740 bp, Zea mays
  Clone ID: ZEAMA-23APR03-CLUSTER118431_1
ttttttttttttttttcagctgaaaatgaacatattcacttgcatatcatgaattgtacattaaagctacaggctatcgcgtcaactcatagctcacaaaccacagtaggcactaatgccagagaccacagttggcactaatggtacaaatactacacatgactgagtctagtttcaagctcttaacacagctgcgcaagagactataacaatcaccttcttactcgcgcagaacatcgttactggcaaaccatgaactgcttgtagatgaaagagccacaacatcatcgcaagaagggacagagcctgcggtcaggcagtaaaagagatacatgatcctgatcacatcttcatgggctcatggcatattgagccgagaccgcagcctgcttgcgatgcagtcagggcttcgttcaacgtacttcctcttcgttgacgctggcttagacgacggagtcacacacccagcatccttgttggcttgatcatcctggcagtcagatgtcaccacggacccacttctgctatcgttgtcgccatcagaactcttcctcactcggcggcgagttgctttgttctgcttagctttgctggtcgtttctccatcctctgggctctcattggcatggtcagaaatgcacgaggtttcagatttagcaaacggcagcttgttattgtcgactgagcttgaattgactgatgatgctcgatgtgttgcaattagaaagtgtgccacagatttgtacccaagtccgatcgccttcctatacgcagacccagtagggaaccatcctttcttagttctgcatagactgcaattacagatgccacggcaaactggacatatccagttaggattcttcttaacctctaacacattttcaccatacctcatgtacaaacagtctccacagaactgtccttggacaatctggcatttacagcagcttgtatgatgaccaagagtcttctgacggcactgatgacaggtttgacccctcacttgatcataaatgcgttttccatctttgccataaccatcaacaaagagagtccaaggagtgttgcatgtacccaaaagcttgtcatgctcttcagtgtatatttcttccttggctcccacctccattaacacagttttgccaccttcagagcgtttctctttctttggctcaatttcacaataggtaactggttccacgtccttcaacctgagcgatctccgcgagggcgccggcgacgcgggcttcaccctggccccgccagcggaccccggctccacgggcttccggcgccaccgcccgctgccggtaccccgacccgaggcggcggcgcagtggctgagggtgtgcgcgaggtcgaggatgccgagcttctgcatccgctccatgttctcccggatcctcgcgtccctctcgcgctcgtagtccccaatcacctccgcttggtcagccgggctgcctggggcctcggctggggcggggttcttcggcggccggccccgccgtctcggggcaggcgtgggcgacaggtccgcgggggtggaaacggcggtggccatgactctccggagcggcagggggcgaggaacgtggattgggacttgggagtgggctttcttctccggtgcgggcgtgcggcggggtttattataggcaagggtgccgcactcagcaataggaaggagacggagtggtggaggggaacgagcgaagccgcaagcacaacggtccaacggtc

SEQ ID NO: 1731 - DNA, 1897 bp, Zea mays
  Clone ID: ZEAMA-23APR03-CLUSTER1186_2
gcacgagaccattacctagaacatcctaatcgaaaaacttgcgcatcggatcgcatcagctgctgcttttgtccaccaagcaacgattccctttccttccgccgcccaaatgccagtggccaccttcctcctcgtcgcgcttctctcgtgcggcgcacgagccatccggacgcacggcggctatgtctccgcggtcggggaccccggcatgcggcgcgacggcctccgcgtggcatgggaggcgtggaacttctgcaacgaggtcggccaggaggcccccggcatgggcagcccccgcggtgccgattgcttcgatcttctcggtccgtccattccatctctttctctcctctttcgccggggtggttgagtgggttgccaccaagattaggtttttgaggaagcgtggatctctgttccgttccgcagagacgagctccgacgaggagggggcggccggtgtactcggtggcgcacctggtgagcgacgccgacaaccgcctgggcgcgggcgacccgttcccggggtccccgccgggcgcggcccgcgtcacggacgccgacctctacgcgccggccaaggagctgtacctcggcgaccgctgccaggtggccgacaccccggcgccgtggcagttctggatggtcatgctcaagaacggcaacctcgacacaaccgccgccgcctgcccggagaacggccgccccgcgcgcccgttcccgcagacgtcccgcttcccgtgccccgccggcgccgggtgcatgaaccagccgctgctgttccacaaccgcaccgcgctggacgacgccggccgccggctccgcggcggcctgttcgggacctacgacctcgacgccgccgcgggtctcggcgctggcgacgtctccttctactccgggacgtgggagaaggaggtggcggcgagcggtcgcggcggcgggtgggcattccaccacaagctgcgcacgtccaccaagtacccgtggctgatgctgtacctacggtccgacgccacgaggggcttctccggcggttaccactacgacagcagaggcatgaccaagacagtgccggagtctccggacttcaaggtgcggctgaccctggacgtgaagcagggcggcgggcgcaacagccagttctacctgatggacatggtcagctgctggaagaacgacgggcgcgcctgcgacggcgacacggcgacggacgtgacgcggtacagcgagatgatcatcaacccggccacgccggcgtggtgctcgccgtcgcggatcgaccagtgcccgccatggcacaccttccggaacggcagccgcgtgcaccgccgcgacggagcccgcttcccctacggcgcctaccacgtgtactgctcccccgggaacgcggcgcgcgcggagcagcccaccacctactgcgacgcctacagcaacccgcaggcgcaggagatcctgcagctgctgccgcaccccgtgtggggagagttcggctacccgacggccaggggacaggggtgggtcggcgaccccagggcgtgggacctcgacgtcggcgccatgtcccaggcgctctacttctaccaggaccccggcacgccgccggccaggaggcggtggacgtcgctcgacgtcggcacggagatatacgtcagcgacagggccgaggaggcggagtggacgctcagtggcttcgacatccttgtgccggacaagtgtatcaagtcacagcaacgggccagcaacagctgctggtagacagacactttaatgtcactgtacgttacgctgagtagcatagcaggccaaagtgttcttcgtactagaagaggtggtgtaggatgactatattactcatgttagtactaactaactataaaaaataaaatgatgattaatc

SEQ ID NO: 1732 - DNA, 1227 bp, Zea mays
  Clone ID: ZEAMA-23APR03-CLUSTER11886_2
aattttatgaccgtcgaaaaccaaaatttagataggccacccaaatccaggtgcaaatcccaacctccctccctcccaggccccctccccacctccacctccaggcaccactggtcccacctcctcacctgcgaggatgctgctcgtgagtcaggcagcgaacggctccctctccgcgcggcggctgccgtcgaagccgccggggccgtccaccaccaacccctacccgctcttcgccaaccctcgcctcctgcgccgccgcctggcgctctccggcgctggcgccgaccaagccccgcgccgcgccgcgccgaccccagccgccgcgggcgagggcccctccgcctcctccaccgaggacccggtccttgtccgcgtcgccgacgacggcgtgccgctcgagggcgtcatccagattgagaagcccggggatgcggccgccgagtccaagctcgtctcctacgcgaagctgggtcttctggccggcggggacgtgttctgccttctgctgttctctgcgattggaaggttcagccatggcctgcccgtcctcgacgccgagacgttcaagacggccgaccccttcattgctgggtggctgctgagcgcctaccttcttggcggatttggcgatgatgccaaagggcgcaatggcgtcggaagcgcggttatcaccgcagctaaatcatgggctgttgggataccgttgggacttgctatccgagcagtgacgtctggtcatcttccaccaactccttttatcttggtaaccatgggaagtacaggggtcttgttaactgcatggcgtgctttggtatcacaactgttttccaaccagcaaaagcagcaggatgatgtctaccggcgtggaagtccttttgagctttttgagctactcacatcgctggtgcggaggtggtgacatctgaaggctgaagcctatagaaggtaagaagggcattgttccgctctggtatccgcaatcatcaggttcagccatctgtgtctattgtgtaagtacaattttgaaggtgaagaagagcaggctaaaacctagtttggagcatttgccgaacccaaaaaaaatgtttggcaataacacgcccgcgatgttggtttagtatattatattatattcataagatgtactcatattcctgatcttccacttgtaaaattgtatccagcttaacaaatcctaatcgataagaccgttgcctcttgttc

SEQ ID NO: 1733 - DNA, 1612 bp, Zea mays
  Clone ID: ZEAMA-23APR03-CLUSTER118930_1
aaatactatagcgacaaccaattttggtacggagggagtacaatgcaaccgatgaaaagggaccagtcttttttttttttttttgcatgcgttgaccaagagctagcttgaatgtaataatgaagggcagagctaattaaaacaaatccaggtttgttttcgcttgtggaattgtgcgctgaactgattaattttattctgtcagattaataagcagctatctagttagctagaggcatggaggagcagcagcaggcagcttccttgactggaggaaggtcttgttcttgccgtccgcggatgcgaggtaggcgaggaaggtagcgaagtcggtgtccatgtaccgccgcgggttgccggcctcgtcgtccaccagctccggcgccggcccgatcactcgctccgccggcaggctgtggaacgacgccaccgagatgcgcggccgcgtggagttcacgtgcacccggtgcagcgcgctcttgtaccgcccgttgctgtagatctctaggtggtcgccgacgttgacgacgaacgatcccgggatggggtcgatggtgagccagcggccgtcgtgcatgacctggaggccctcgacgtggtcctgcaggacgaacgtgaagaggccgtagtccgagtgcgagggcatccccagcgtgagctcaggctgcgggcaagccgggtagcagttcaccgtcatcatgtgcgacgacgacgctgccagctccccgagcacgccgccggccgtggggatgcccagggcctccagcgccgcctccatgacctccatgaacagccggtggctcgccgtggcgtacctggtggccacgtccctgaggtccgccggctgctggggccagtacgggagcaccgcctgcagcggctggcagacgagcttgaggaagtcgcgccagcagagcacgtcgtccttggcctggttgaagctggtgccgtagcgcaccggcgcccgcacgtccgccgacatgtgccgcgctcgctcggccagcggcagctcgaagaagcgctgcgccacgtccagcatcccgccgctcacgtcgctcccgaacccgtggtttaccacctgaaagaagccgtactcccggcacgcggcgtcgagcgtggccagcacggcggcgcgctggcaggggtcgcggaggccggcgaggttgacgacagggagcttgaccctgccgctgcccgccacggacgacgagacggcaaggacgccggggcggtcggacgcgggcaggacgtacctgtcgggcagcctggtaatgccgctgtccgacaggtgcctcacgcctttcatcagcgcgccgtagtcgtaggacgactcctgctgctcatggccgtcctcgtctttcttggcagctgctgctgctgcttgctgcagctgggcgttggccacgtcgacgatcgccattggcgccgcaaccaagctcatatagctagcttggctaatatataggtgacgcgtatgtatatattgcagtagctgtcactatatatacacacttcacacttggtggtgagtgtatatagtagcctagaaagctacatatatatgtagctagtgttggaatcgtgagctgtggagatgtgcaattcgtgtggt

SEQ ID NO: 1734 - DNA, 1749 bp, Zea mays
  Clone ID: ZEAMA-23APR03-CLUSTER11944_1
acaaggcggtcacttttgttccgttttggttcgtctttttcatgcggcggcgaccgccacagcgcaggcgagcgcggacgcgagggggcatggggggcccgccggcgggcacttagtggggcatgggctaggaggagtggtgccgcggcggggtcgggactcgggagaggaggggccatggcggacgaggcggcgccgaggctgctgccggtggcggcagacagggacaaggacgaccgccgccgctgggcggcccgctgcggcttcgccgtcctcggcatcatgagtaccctcctcgtctacggcgtcctccaggagaagatcatgagggtcccgtatggagtggagaaggagttcttcagatactcgcttttccttgttttctgtaaccgcatcaccacatccatggtgtctgcaatggtgttactggcaagtaagaaatccttggaccctgtggctccgctacacaaatatggtgttgtctccatatcaaatatactgaccactacctgccagtatgaggccctcaagtatgtaagcttccctgtccaaacgcttgccaaatgcgccaagatgatacctgtcatgatctggggcacaataataatgagaaagaagtatgttgcaaaagattacttctttgctgtcgttgtgactatgggttgcgcattgttcattctatatccggcatcgatggatgtgagtccgtttaataaaggcagagaaagcactatttggggtgtttcactcatgctcggttatcttggttttgatgggttcacaagcacattccaagataaactcttcaaagggtatgacatggaaatacacaaccaaatattctacacaacagtctgctcttgtcttcttagtttaagcgggctgattctccagaatcatctgattccagctgtggattttatgttccgtcacccagattgcttctccgatgttgtaatcctgtccagcgttgcaacagcgagtcagttcttcatatcctacaccattcggacatttggcgctctcacatttgctaccataatgacaactagacagcttgtgagcatattgctgtcctgcatctggtttgtacatcctctcagctggatgcagtgggttggcgcggccattgtgttcgtagccctatacacaaagagcttcctgaggagtaaaccgcagaagctagcggggtcaagcccgccacgtggttccagtccgaaccctgttagcaatagttgacaattggtgacataataacataggaaacaatggacttgttgcggtgtaacgggacgaagtctccgtgtctgagatcaatggcaccatggctgcatatgcaaggcgaggtaactggacagataggttccagatgttgctgtgttactgctccctgacattttttcaaggtcatgaaggtggccattttttcaagctagtcgaccctagtgttagtttagtgtccagagacccaattttgtagcccagtgagctgtgttaccaattttgtagccccaaaaaaaaataaaaaatgtgtgtgtgtgtatttgtcgagcgttggcgactgagagttgaagaagtcacagcagaccatctgcaaaaactcaccagataactagaactgcgatgcgtaacaaattgcaaaacacaggagattgtcagctaacagctgtggtccgatgtaaagatcagcagataacaactgaaggcctgtttaccatggtttttgagtataccgtagtattttatacc

SEQ ID NO: 1735 - DNA, 1460 bp, Zea mays
  Clone ID: ZEAMA-23APR03-CLUSTER11944_2
gcgctgcggattctggtgatcagctttctcgcgaatttcgcattccgtatcaagcgcctcgatacattctggttccttctccacactgcgtgtgctgacgactcgagtctacttactacatcgtgttctcgtgtcgatgatgctgtacaggagaagatcatgagggttccgtacggagcggacaaggagttcttcagatactcgctattccttgttttctgcaaccgtatcaccacatccatggtgtctgcaatggtgttactggcaagtaagaaatccttggaccctgtggctcctctacacaaatatggcgttgtctccatatcaaacatattgaccacaacctgccagtatgaggttggactggtctctgcccttttggttcttttgccattgtgttgtttcgtgttactatgtaaagtacctttttccaggccctcaagtatgtcagcttccctgtccaaacactcgccaaatgtgccaagatgatacctgtcatgatctggggcacaataataatgagaaagaagtatggtggaaaagattacttctttgctgtcatcgtgactctgggctgcgcattgttcattctatatccggcaatgatggatgtgagcccatttaatagaggcagagaaagcactatttggggtgtttcactcatgtttggttatcttggttttgatgggttcacaagcacgttccaagataaactcttcaaagggtatgacatggaaatacacaaccaaatattctacacgacagtgtgctcttgtcttcttagtttaagtgggctgattctccagaatcatctgattccagctgtggattttatgtttcatcacccagattgcttctctgatgttctaatcctgtccagcgttgcaacagctagtcagttctttatatcctacaccatccgaacatttggggctctcacatttgctaccataatgacaactagacagctggtaagtatattgctgtcctgcatctggtttgcacatcctctcagctggatgcagtgggttggcgcagccattgttttcggagctatatacgcaaagagcttcttgaggactaaaccgcagaagacagcggtggcaagcccgtcgcatggctctagcccgaaccctgctaacagtagttgacgattgatgacatgataacattaggaaacaatggacttgttgcggtaccgggacgaagtctctgtgtttgagatcagtggcgccatagcgccatggtgaggtaactggacaaatgggtcccagatgtagctgtgtaaactgctcctgacctggaggtgatggaggtggtctccctttttagtggaaaaaaaccaaggtagtcctgatgttagtttagtatccagagaccaatttttcagccatcccaggctgtgctatgttttttttttctcgaactcgcaagagaattaagtgtcaaaataataagag

SEQ ID NO: 1736 - DNA, 1601 bp, Zea mays
  Clone ID: ZEAMA-23APR03-CLUSTER11995_1
attacgcgcctcgtgtcatcatcgtgggtactgggggggtctgttcttgtctgcggttctctgttcgagtccaaggctccaagcaagcaaagaaccgaaccaccgggagcaagaaattttcccagagtaagcaagtcccaggactcaaccaagaagagccctttgcatgcagatggagggaagggagggtattgcagttggccgcgaatccggccacggcagcctgttcagaacagcagacatggccatggcggaggcgcaagaagcagcagcgaaaggctaccagtcctctccatccttgctgtcggcgtccaccccgctgtcgccgccagcggctgcggctgggcacgccggggaggcgccggcgactccgcttgcctggagcttgggccgcgagacgccgagtcggggccgtgctgctgcacaacggcacgcaaacggccgggcagagcgagcacgccagcctgagctccgggcgccgccggggccggccgcgcggttccgggaggcgccagatcctagccactctaggggaatggtacgcgctgtcagccggcgggagcttcacgcctcatgtcatcatcgtgggtactggggaggatgtggcggcgcgcatcatgtcgttttctcagaagggtccacgctcggtctgcatcctctctgccaacgggtcaatctctaatgtaacactgaggcagccggatgcatctgggagcaccttcacctacgagggccgtttcgagatcctgcagctgatgggctccttcacaatggccgaggaaggccggaggagaaccggcgggctgagcgtctctcttgctggccctgacggccgcgtagtcggcggcgtagtggctgggatgctgcgtgctgcaagtcctatacaggtgatcgtcggaagcttcctgcccaacagcctgaagcagcaccagaggaggaggatgagcatgcagcagccttcccccgttccggcgttaccagcacccgtggcacccccgccgccggtgcttaccgcggccaccccgatctcgcaggcaggtcccgggaacgggttccacgcaccgccgccgccgcactccgcagcacctccccagccccacgccaacgccatgaacctgaacgcgacgacgacgggcttcaccatggtcggctggcctgcaagctcgccgcagcccatggcgtacagggcttcacctgacatcaacgtcagcttgactccccaggagtaggatcgctgggctcgtcttcttcctttttctttcttttttttttctttccctgggctgacacgttttgggtgggagagaggaaacagagcgtggctgatgctctgaatgagattatggactaatctggtgttaattttagggtagggcgtgccaacttgtttgggttgctgctttcggccgtcatggctgtggatgttgatttagttctagttctagtcagtcagtcctattcagtttctgtctttctgcgctgcagctatttagcatgtcctgttattggtgaatcttttctgatgatagagggaggaatcatcttctgatgacagaggaatcagttctgttatttgtgaaaaaaaaaaaaaaaactcgaga

SEQ ID NO: 1737 - DNA, 804 bp, Zea mays
  Clone ID: ZEAMA-23APR03-CLUSTER119_1149
aatcacaattcacagcgctcaagttctcgcgcccacagccaaatttttctccactcaatcgcggcataagctgcactgcagccatggacgccagcggagccggtagcaaggcgaagaagggggcggctgggcgcaaggctggcggccccaggaagaagtcggtgtcgcggtccgtcaaggccgggctgcagttccccgtcggccggatcgggcgctacctcaagaaggggcggtacgcgcagcgcgtgggcaccggcgcccccgtctatctcgccgccgtgcttgagtacctcgccgccgaggtgctggagctggccgggaacgcggcgaaggacaacargaagacgcgcatcgtcccgcgacacttgstcctggcgattcgtaacgacgttgagytcggcaagctgctktstggsgksaccatcgcgcacggcggtgtcctccccaacatcaacccggttctcctgcccaagaaggtggcggagaaggcgtccagcggcggcagcaaggagagcaagtcccctaagaaggccgccaagtccccaaagaaggcagccaagtccccgaagaaggcttagaaattagtcacttcactagcgctctgctgtagcatgttcgtgtttagatctgtggaacttatgtgttccagcctaatttcctctttgccttgtggctcctgatatgttcactggcatgtttgccgtgttgtgttccttgttctgattttgcaattcatcatcttgttgaattaacttactatcgggaaatgaagcataataacgatgaaaaatgattgttctgaaa

SEQ ID NO: 1738 - DNA, 602 bp, Zea mays
  unsure (1)..(602): unsure at all n locations
  Clone ID: ZEAMA-23APR03-CLUSTER119_1174
ccaaagctccactcaaattgcagcatagaacaatatactgaaaaatgcagcaacctgcactgaagactactctaacttctcccaaaacaacaggtcgaatcaatcatagactagacgggaagagaaatagagaggagagagcttcctgtcaaatccaggatgacgccaaccaatccnttgaccacctccgaattagacgatcttaccaacccatgaaaacgagtgtgagccctagacacgcgcatcgccgcttggcacgctcaatacccgatcgttagcacatcgcatggggctggagattcacacgcatattcctgatcagagtgccggtgatgtcgcggtggtaggtggcgctggtgatgccccacagggtgccgctgtgccaaggtcgttactggccctctcgctgacatggggtatggtggccggtggatgccgacggtgggccggtacaaccgtgtggggcgtggtggtctgggtcatggtcgtcgcttgccagccgcccaaccaaaaggagttaagccgtcgaggggacaagggattcaggggaagggagtgactcgagtggagtagtggactagggttagacacttcatggtgca

SEQ ID NO: 1739 - DNA, 1115 bp, Zea mays
  Clone ID: ZEAMA-23APR03-CLUSTER119_1205
caagttcaattatcatgtgaggagtccagactgctcataaccgtgtgcacgactgatatatcagttttacactctgcagaggtggcacatctttacccatgagtcgcgattcccttctagtccgggttagctagacccgtattcacttccgaggcgaatggccagggtctcactacgaggcttctccctagagtcctcattacgcaaatgctggaaatggtcatctgcataaggtacacctaccgtaaccaacttatagtccagactacagggtaaagctttgggaactatacccgtatccaatctgcctgagccgaaactataagcgcttgccagatgcccccgttccggtcgaccacgaccagcacccaacataagaattccctagttatttagccaagaccagagccatgatagttctcatggtagcactgttttcctgggtggtcactccatattccaattaatatgcaataatcttgtttaaccatcgggttaacaacaataatgtaaacttaccattttggaacattaatatcataagcgggagtgactgcataaatttaaagttgtagcaatagcatagctactaaggtaaagtataattcccaggtttgatcaaggaataaggttggaaaggttatctgaataggtaacccgtcaaattatgcatatatatccaaaagaataaactttattaaatgtattatttgggatcaaacagagtatgcagagggagaagtccacttgccttgcttattgaaaatttgaggttcttccacggaatagcacttgattctcaactattagatcaatcacttgacgctggcgtcacaggcacatgaaagaagagcttcggacgcagggggcgttgacgagggcgcagaccagctagcttcactggcgaacgaagcgtcgtcgataacatgatgaagagcagcaaacgacgacaaggtatggcgatagcataggatgaactaggcacacgggcggatcttccttacgacgatgatgacgagtgcaggcgatggtactcgtcgcggcagcagcaacaagcgtgcgaagcagacataggcgagtagtagcagagtagcagggcgcgggacgggcagagc

SEQ ID NO: 1740 - DNA, 1144 bp, Zea mays
  unsure (1)..(1144): unsure at all n locations
  Clone ID: ZEAMA-23APR03-CLUSTER119_1221
gaaactgaagccaatttttattcttgcaacataacttgganaaatgtgtaataataattgtcgcagtaaaatatgttatgatactttcaagtcaaatagagcttccctcccggcaaggtgataagccgataaccatacaacatagtgtaccgtgagaggacaagagatatgacacacaccctgacacactcaaactgggtcttagaaacatcacttgcatgctggtaaattcaggtcacaccaaaagcttcagacaatgttcaacatagggcaagaaggctggcagcagcatcacttgcgcctcttggcccttctgctctccagcctctgttgcgcctgctcaagctcttcttccgtgggctccgagctgctcgccttggagtcacacttggacatgatattcgagaggatggagttgaactgttttttccgctcanccttcgctctcctctctagcggatttgttggtggctccatccctgagatcttcttagcccatttctcatacaccttagttgactttagctcaccttcaccaatcgcctcatcaattatatccttgaagcggtgagaatcaagctttggttttgagcaaatcattgtgcagaaaagcctgttcatgttgcccytatgttttgtgtagagttccttcaagtccgttttctcagaatttgaccctctatatttagcttcaaattcttcaatgtcagcctccgtgactttcttgtgcattgttctgaagtactcctgaagattgtttgcagcttctcccaccagtgcatcatcagtgatgccagtatcatcatataaagctcttttctatgcatctccaagaatggatataaccttctgcagctgctgaaacttctctttggcttcctcatccctaggattcttatctgggtggagacgtagagccaatttgtgatacaccttctttatttcttgttgagaagcaatcttctcaactcccagaatcttcaaatcctccccgaaaaataaacaagaaattaaattactcacctgtgatatggaaacagaacctgaaagcgatccatgacacacatttagaacagttaagacttttgtctcatccatggttatttacatgacctgtttgcaaatcccacgtgtctgcggacgc

SEQ ID NO: 1741 - DNA, 619 bp, Zea mays
  Clone ID: ZEAMA-23APR03-CLUSTER119_1351
gcagatattgacatgtcaaaattattaaacatggcatggtatcacatttaatctttttgttcaacatcaccaaaaagcagattgtaatatgaattacaactgtgccgactaaatcaccgtggggcatgggggttcaccagatgtcgactctgccgcggccaaagtaccggtacacgaactgggggatgcacgaaggttgacggtgctgatgcacaccagcagtcaataggccacctcgagcacctcgtcttcgcagcgctgctggaggaggccgaaagcgagtatggcttccgtcacctggatctcttccaaccaaaggagacggtgggcgcaaggctgtcctcgacgtcgcgacggaaatgacctccggcgagaaatccccagtaacctcgtgcttttccgaccaccgcaaaccacactcgtggacaacgaacctcgacgacacaccctagcccctttaatttcaccgagtagcacgcagtcgtgagcccgaggcggagccgccaagttcctggcagaaggacatcctttctctctctctggaaatcgacgactgaggaacggcgaaggaatgggatagaaggccatggcgcacgaattttatggcccaggggacgac

SEQ ID NO: 1742 - DNA, 999 bp, Zea mays
  Clone ID: ZEAMA-23APR03-CLUSTER119_1371
aatatagtatagataaataccattcaatatctcataaataagcattgtcaaataactcatacaaaagtgtaatctaaattcaaactaaagtactaattgaaaattttggtcatcaactgtttgcgttaacgttgacctaaataagtatatatgaactcaagtcttcacacatgtgcggccaccaaagttctattccatcttttcattctaactttgttggaggcagttgtgctgacaattggtgagacaatcattttttgccacatttgagcaaaaacttgcatttaggtcaaatagatttgacgaaccaagaaatagtatctgaaaaagcattcgacactctcccatcctggtaaattaggtaaaggatttgttagagcccatcctttcttcttataagcttccctgacttcttctcaagaattacaacattgacttgcaattaagaattgatgttcttcaacgaaacattcagactcaaaaggcttacttgagataaacaagcaccagaggttctcagatccaagtaagcgtcacttggttatatgcatctctgaagattaagcattaactttgtctatgtgataaacaaaaacatagaaacaagataatccgctcaagttgagaggggctcactcttatatctgtctgtaccaaaaagttcaagatgttgcatatcctaataggtaataactattataaagatgatggttgttatcagttcctgataccacagtagctaacaaaaagtcacttagtaaactacagagagcctagcaatcaagaaacaaggtagggaaattagtgattactaaaacaataacgtgggaatcaaattaacatcaattaataggtactatctcctccagcactctgtatgtatcatggagtaaatcaatgttgtgatggcatatgcacacatttcaggttgaatgcacctaataaataagaaacactatgagaaaataaacacctaataaataagcaacactatgagaa

SEQ ID NO: 1743 - DNA, 801 bp, Zea mays
  Clone ID: ZEAMA-23APR03-CLUSTER119_1509
gacaacatatataataacagtgtatagagacaaatgtcacaataacatcagagtacttattacattgcggaagtcttacaaaataaaagataaatataaaacgaactaaggatcatcctttggcgccataaagtcaactgagaaacgccacctagatcagatcaaactcctcgttgtgtggctcctcctgaaccaactgttcttctcctcaaatcgtggccgccaaagtgaatctaacagccacagagtccgttgcggcaacagccgccacctccgtcgtcggtacctcgactggcgcgcgcatccagagcaaagaactccgccttgcggcttgtcctggcgaaggtgtccaagatggccacaccaccggagggctggcgtcgctagaatccaggggtgcaagcacacgagttgactcccgccacgagataaccacacggttgacgtggtccaacagcaggagggagttcgagcgcgcgaaggagtcggtgaaggggagcgccgtggcagcccagaagaagtggtttgtgtcgatgacgagcatgacgaggctgtcatccccggagtagagcttggagtgcgcagaggcctcgcccaaacggcggcatgttgttccacggttaagctctaattccggcgagaaatggaaggaacacagtggagcagcgaccgtcaatggggacaacgggtttctctttcttaccaggaatcactcgatttccccctgctctcagtattgtctcatggcgctattgagtccgtaatcttttgattaggatgttctaggtaatggtctcgtgc

SEQ ID NO: 1744 - DNA, 1514 bp, Zea mays
  unsure (1)..(1514): unsure at all n locations
  Clone ID: ZEAMA-23APR03-CLUSTER119_1545
acgcactccatagatttgttgtagcatcttttcttggacgaacgaagctcttcgacagttccctccaaatgatttgcccattgatgtcacacccgactttaaggaacaaagccaggtgcatctcatacatgcgccaagaagacaacatatataataacagagtgtatagagataaatgtcacaaaacatcagagtatttattacatagcggaagacttattacaaaataaaagaataaacataaaacgaactaaggatcgttggcgccaatgtcaactgagaaacgccacctagatcagatcgaactcctcgccttgtggctcctcctgaaccacctgctcttctcctgtgggggggtgtgagacagcaagggtgagctcacacatgatcatcgctcaacaagttgtgggaaataatgtacatgaactcaccaaaggtgggagttcctgtgaagtgtaaggctggccaataaataaaggttaagctgagcattgcttttataagatggtcaaaattttattagcagttactaattgtaagtaaataccaaaccatagtaatcaaaataataataaataatcctaatgcgatgaaaatgacaaattaaatttaattccataaattaatcatgtgagtgtccgatctgctcatgaccgtgagcacggctagtataccagttttacactctggagaggttgtaccctttacccacaagtcatgtttcccatgtcgccagggctagctagacccttagacactaccgaggtgaatggctagggatccactacgaggcctttacaaagttccactagcttccgaaaacccgctacagtttatgggaagagcacttgcaagaatccctcgtctgaccgccatcgcagcaaaatcaacccgagaacctccttgcatgcaactcccctactgcccttgcccctttcgggtaaggtagtcttccactagctttcctaattagttagccaaggggtcccattcctcccttgtggtggcacgtgtttctcaagttaagcttcatgttccaattaacaataatataatgatcttgacatgaacgtaaatagaataacaaaataactggaacatggatataatgaaatattaacccaaaaccatgtaaagcaatagcataactacccaagtgattcaggggtacacagggtaaataggataaacagactagggtgacctattggatcccatcaaaattaaacctatgcagatcattatgattaatcagaacatgagtaggtaaaaagaagtgatcaagggcacaacttgcctgggacttgagattccaggtaccaggatgatcatcagattctccccccaacccactagtcgtagtaatacaaacatacatggtataggcaaaattaacatcacaccaaacataagaacaactgaataataataatctatgcgttgctncgngnctnncggnccttgnacgcctccnntcggagttnnnncggaggaccgggcccccccctagggtt

SEQ ID NO: 1745 - DNA, 1027 bp, Zea mays
  Clone ID: ZEAMA-23APR03-CLUSTER119_1633
aaaggtgcactattttgctttcctatgagcaacggagccttggaggattctgacgcagcatatattacatccataattccatagctcacggcataagaaaagaacaggaaaaccgaatacagcaaagacattacagactgcactcggtgttcttatcgagtctcgaactgaatagttgaaggcaaaggagcggcaggcggtgaatcgaatggcaggtggaggtgggcgccgcgggagggatcggacgacatagtatagtagcaatcaactgaaggccgccgatagaacatcgagcaccggcgatgccaagcctccggttgctgcgcggtggcggcgctggcatgatgagcactgccggtgttgcttcggccacagtagtcagtgctctggcgaccactgctgggcgcgccggagacgcacgcgatgtttactttcaacggacaagagcagacgtagttccacacggacagttcctcgcagccgcacatgcacgtgccgattgaagggaccaggcgaaggtcgtgccgtgggtggagggggctacggatggtctgcgggagcatggtgcagagagggtgcacatcgaagaggcaatcggtgcagcgatacaccaagtctcccggcggacagccctcccagcagaggtcgcaggaccatccgtcgcaggaactgggcatgcggcttagcgtgagggtgtgccaggggtgcgcgaagaaggagattgtctccttgaagtaattggcgcaagcctcgtggatgtcgaagtcgcaggcgctgcagcggtagccggtgaggccggccagcttggaccggcagatgtcgcatacgtggcgggaactgctgttgtactgcgtcttcagaagcacatgtgggtcggcgaagtgtctccggtgaccagcagacgccatggcgatggccaaacaaggatatgcgtttttctttggttgggacttgggaggaagaggaacacgcaggagaactctgaagctaagctaagctaagcctggtttctggggagtttgggttt

SEQ ID NO: 1746 - DNA, 1624 bp, Zea mays
  Clone ID: ZEAMA-23APR03-CLUSTER119_1652
ttttttttttttttttgcagcggaaaacttattaccaaattttacaggttacaaaaattttacaatattttatcggagtgattacaagagtataagtttgaaatatatgctagctcaaatgaccatcctcagtaagaagataaagacggggtatgtttatataagaaggccgagcccaccggcacttaacaccatcacaacaacacaaagttatatcctggataacactaggttagtgtttgttaggcgatgttcacttgacgagtatcactcgactgagcacttgcttgatttaaccatcttcaggttggtccatcagcttcatcctgcggattagcccacgcttggagtcgacttgggtcgtcttccgcatcacacgattatttatcgtccataattaactcgagctgaagttgtgaggtcaacgacgatcctacggacggggactcggatttaaaaggcgatgcggcaaaattattggaacggtggagtcgtggatgtggtggttgtcgagacgattgatgtcgacacccatggtaagaatgatgatgacacgggtctaactccattagcgagcagagcagggcgccatggtcagcaaggagatggagctcggtcagcgaatagagagggacgcaggggatgctccatggctgaatccagagcacgccggcgagcagggatttgtgcgcgcggccacagaggaactggtgctgggcagcgcgcggagggagcttcggcgcggagaaaactggacgccggagagagtaccgcgcgcaggaaaccagctgggcggcttcggctgggcgagttcggctaggacaccatgggaggggcaccgagtgctagagctgggcgcggcagggagccagcgcgccatggctggacgcgagcagaggtcaggactgagcagagggagctccacgcgagaagaaacgagtagaagagcagggcgcgagctgcaacagggggaagggggcgcgacccagggcgagctcggcaaccgcggcgctgggcagagctgggcgtagtctgagcaagaaatcacggcacgactggagatcgagcgccaccataggagctggaacaagggcgcggcaggagcagccccacggtggagttgcggcatggggacagcgaagaacacgacgggctggggaataaataccaccgaacggcggctgggcggcaggatttttccggcggcttggcaccgagctggagcaagctgggcagcgagaaaaatcccacaagcgcttggccgaccgggagagataagggagaagaagaactgagaggataacgatggtaaaaattccagctgcagacatgaagaaacggcagcagataaatccgagcgcggctggggagctcagggagagaaagtcgagcgctcgtaagaaaaatctggcgacggatgaggctgagaagagagaagagataagaacatagaagaaatatcacgcagctgctaaaaatcctttttcgattaggatgttctaggtaatggtctcgtgcgaattcctgcagcccgggggatccactagttctagagcggccgccaccgcggtggagctccagcttttgttccctttagtgagggttaattgcgggcttggcgtag

SEQ ID NO: 1747 - DNA, 813 bp, Zea mays
  Clone ID: ZEAMA-23APR03-CLUSTER119_1695
cgaggtcgacttcctcaataagcttttttttttttttttttgctggaattatagatgcaggtcagcccagcagacaaggcaaaattgatagtgcaactttgtattcaataaacatacgattccatgatccagattaagcttgactgacttaaagctctaacgacaactcaatcactcgaaaggttactagctagcgtgggacttgttcaggatgacaccctcatacttgacctggaaccacttcatggcgtcttccttggtcaccctttggtggatcccaacacgggccttgcatcggcgccggcgggagacgcggtatccagctcgctccagaaccacgaagaagtccataccatagatgccggttgatgggtcatacttcatgccaagatcaatgtgctcctgaataccaaacccaaagcaaccagtgtcactgaagttcctcctcaagagctcgtactccttcaccttcagcccactctcgagaagctgcattgccttctcacccctgatcgtcacatagcaggcaatcttctcattacgacgaatgccgaaagacctgacagtgtacctcgccttggagaaaactggcgactgcccgctcagctgctccaacaccttggcagctcgagtgaggcgatcgccgctctcgccgacggagatgttgaggacgagcttctgcaccttgatctcccgcatcgtgttcaactgtttcttctccgtcgacatggtgatctgaccggggaggccgccggtggagaggaagcggaagatggtagggtttagctggttctgggtgtggctgcggcggct

SEQ ID NO: 1748 - DNA, 2634 bp, Zea mays
  Clone ID: ZEAMA-23APR03-CLUSTER119_1699
atatacatgaatttcatttctccttttagattttcttacaaagtaggtattacatgtaattaatttttcaaggaaggaaatgcatcaacggtttagcacacaactcctatcacctaatgcatcaaacaaggtgataaaaattttaaaacatcaaggaggtggcaaatgcaccggggcttgcctgaataacactaggttagtgttgttagacgacgaccacttgacgatcatccttgtcctagcacttgatcaggcaggttcatccatcagcattatcctgcggattagtccacgcttggggtcgacttggctcgtcttccgcatcacacgatcaattaacgtacctcatgggatgcacgatgcacatgtatgagcatgagtataaagagtataagatagataatctacactaaaaaggatgaaacacttaaaaccaagcattaaaatcaattaacaagcattaagcatcatgaatatcacagcagggcatcgactccatacaattagacgaaacccgccacatactatccttcgacaagacactagaaacacaaacacaagacctactttccacaacgttacttcgaccactccttagatacgaagcaccgatttaattcttctcgctactaattctcctcacaccacaacaaagaaccaatttaagcctaatcgacatgcgcgtccaccacaacattcccttgtatgatttatatttcaatcctaagcttcacgcgacacaactacttcaccatcacgaacacaatcatactatatatatacctaccaatattctttttactgaaagtagcgatcaaatttttgttcctatatcaaacattttttatcgtaaatatatacacctctttataagtgattaaaatatttcatgatcacacatgcctactaatattctactcactccaccaattcagctaactgactgaaatagcgaaataactcgccataactgaatctggctcgataatcgcgagaaccgcgaagtcgacgagagttcagggactcacgcaattaatcgagcacctagtgagcagcacactagcacattaatttattccattcatcgactcaatcaattaaagaaatagcgaactagagaacagttaccgattcaattaaaattccaaacaaacgttgctgattcttgttcaggccttctgtcgagtacttgggggcatcgacttggggcttgtttctccacactctcttgggatccttttgtaggcgcgaacaccagttggagatgtcacgtaggaattggcattgagacgagactacggaacaacaacgaactagcgagctgaaccacgacgagtgatgtcttgacgcgaatgagcaatggcaactagcgaacacggaacagcgaagtgaggtgtatggccagctagcaaagatgaatgtgtgcggcacggaagagaaagcagaacttgatggccggcttggagactcggcgagatggtaacatcacggcgacgcggcgcgtggagctcgcagggccagatcttggcgaggatgagcacacacgacgcgacgacgaatgacgacaaccggcgaggtcaatgacacgacggggattaaggccgagcgagccgggagggcgcgctggtgagcaggaagccgcgtgagtactggatagggaaaatgacggactcgacagggtccgtggccggagcgagcatcagaaacgagcacgacggggcggctaccggcgaactccatggccgggaggaggcggcgtccaggagcaggaaacacgggcgcgcagggacgaactcggctgccgcggcgctgggcagagccgagccagggagctgcagcgcggcgtgctggggaagacgagctgggggtgccgccaactggaatccgagcagagggcactgctgcgcgcggggaagaagcagaggagctgctgagcgctcggccgaccttggctagggagagcacggcggcgagccatggagcttgggacggggagcagggaggaccggcgagctcgccatgggagggacttcgatctgtggccggcacgcaggaagcaggacgcggcaaaaaggaagagcgccggcgcgcggccatggccgagcatagaaacgcggcccgcgagaggagcaggggctggcagccggcagagcgcggaaggcgagcagggagggagcttcggctaggctgggcgactgggcgtcgagcgccagggagacggagcgcgcgcggcaagcaccggcgagcagtaggggcgcggccatgggaggagcgagctgagggaggtcggcgcgcagaacttgaaccaggacgacgacgcatgggagctccagggcgcggcgtgctggggccctgagcaccgagctggaacaggcacgcgtcagagagagagcaggtgatgccgcggctggagaggaaggagaagcacagcgcgcgcactgggaggagatggagcgcactgggcactcggcgatggagcaggcgcggctgggcaccagagacccgcgcagaagaagaagatcacgcagccattggataaggaagaggagacgacagccaaaaaatcagaggaaggcagctgggagataaggagaagatttttcgattaggatgttctaggtaatggtctcgtgc

SEQ ID NO: 1749 - DNA, 1313 bp, Zea mays
  Clone ID: ZEAMA-23APR03-CLUSTER119_1782
acgcacgcccttcagtcgactgagccgaagtgactgcagtcacttcgccgctccactgaccagcctgacaagaagacagtgtcgcccgcgtcgctccgactgttgtgccactcgacagagtgaggctgacagcggccaagtccagcctcgggcgccataagaagctccgcctcgcccgaccctagggctcggactcgggctcggccccggaagacgacgaacaccgcctcgcccgaccccagggctcggactcaggctcggccccggaagacgacgaactccgcctcgcccgaccccagggctcggactcgggctcggccccggaagacgacgaacaccgcctcgcccgaccccaggtctcggactcgggctcggccccggaagacgacgaactccgcatcgcccgaccccagggctcggactcgggctcagccccggaagacgacgaactccgcctcgcccgaccccagggctcggactcggcctcggcctcagccgacggtctccgtctcgcccgacccaagggctcggactcgacctcgacctcggaagacagatttgacctcgacctcggaggagcctccgcctcgccctacccagggctcggaccaaccacgtcacatgaggcgccatcattaccctaccccaagctaactcaggctacggggaacaagaccgggcgtcccatctggctcgtcccggtaacaggtaatgatgggctcccccacgtgcgtctgtgacgacggtggttctcagccccctacggaagcaaggagacgttagcaggatcccagcagcaccgccagccgttgcttctacagggctcaggcacttctccaacgggccacgttatcacgtacacaaggctccaagcacctctccgacagcccacgttgccatgtccacagggcccagccactcctctgcccatacacgttagcgcatagctacaccccccattgtacacctggaccctctccttgcatctataaaaggaaggtccagggccctcatgcgggagggtcgcgcgggaggacgggctgacgaacatgctcgctccctctccctcgcgaacgcttgtaacccctactgcaagcgcatccccctggcgtaggataacacgagccacgttttccccccttgtgttccatctcgcgccaacccatctgggctgggacacgcagcgacaattttactcgtcggtccagggactcccccggggttgaaacgccgacactaactagcaagttttctaattaaataatgttccaaactaaattattaactaaattacaaactaactaacaaaacta

SEQ ID NO: 1750 - DNA, 2608 bp, Zea mays
  Clone ID: ZEAMA-23APR03-CLUSTER119_1836
attaccaaatttcacaagctacaaaaattttactttgtatgatcggagtgattacaaaggtgattcaaagaaataactttaaactgttataaattatttataagtttgaaatatatgctagctcaagtgaccatcctcaataagaagataaagacggggtatacttatataagaaggccgagcccactggcacttagcaccattcacagcagcacaaaactataacctgaaaaacaacagggaataaaaccctgagtacggaattacttagcaagacttacccgactaaagaaaagactctcaagggtatgctggatttgggaatcaaggagaggctttagcaagaatcaacttagatacttttgcagaaatagcttactaaagtgagtccttactttcaatattttaacgccagattagatattaatagactctatttgcatctggtctaatttcaccatctcatcaatacaacatcatttttattcataatgttcacatcctgacttaggttgtaggtcggagatcaagtctccactctccggggatataacggcgatccgaatcgatttactcagctgaggatctctaaccacacgacatatgtttctcgtaaaccttgcatgtctaccattcccacggatcctccactgcaagaacaggtccgcgccacccgagagcacaccaccctttttaggcggtcctttgccaggagggtacgtgacactctcgccatctctccactcccagtgcgtgattgtcttttcatgtatggaatagccgggttcaagcttactctgtcccatttccagggcatgtggctagttaagatagtccttgatcaacaggcctacatacacatccaatccttaattgacccgggcagagcatcacctgttcctagcccaagtcgcgagttaaatacttccatccttaggattgttctgtgttccttaggatgaagagagcattataggaaactttgcagtaagatcccaccatgctcccaatgaaaatattcttgcagatagaaatcatccttcctcaggataaacctgagctaggcataagtgcaaaggacaaactctatctgcttataagcagggctaagcattttttgtaaatcatattttgatacttcaccaaaagtatctataaaaggaatggatttcaaggtagccaatgcatcaaagggtttccaagcatcttctataaacctaatgcacattcactagacttaaagtgtgtaaaaataatttaaaacacaaggaaggggttgcatgcaccgaggcttgcctggataacactaggttagtgttgttagatgacgtccacttggcgatcagcctttattccgatacttgcttcgttcatccatcttcgggttaattcatcaacattatcttgcggaaaagctcacgctttccattatcttgtggtcgactcaactctggttctccgcatcacatggttaattcacgtaccagcatcaaacgtgactcaatacttatgagaatgttgataaattctggttcgggcttgtcgttgaacatctgacaggtgttgagatcttccgcccccatgacccagatgaggctgatcacgaggaggcgaagcacggcgaggcacgtatcggacgagcttctgatattaaagacgatgacacgtgtcatgatgaggcggcatatggcgaagaaaaataggaatgaatgatgacgagagaacagaggcgcgcagagggaagtcggcgtgcaggggacggcaggtccaacggtcgtcatggcgcggtgcagggaggccgagtggaggacagcgttgccggatcacgcaggccgagcaagaagctcggcgagtcgacgaggttgaggggcatgcgcagggacgagcgagcagggaggagcatcgagcggagctgtggacggaggaacgcgagccgggaacgcgacgcggcggccatggccgagcagaggaagttccggccgggcgcggcgagcagagagaagcggctgccagacgccataggagacgggcgtcgagcaagcagaggggacggggcgcgccgctgggagctccgcaagagatagatgggcgtgcagagagccatgggagagagagccgagctggagctggaagaagctccggccatggggaatacaaggggctggggcgagctcggggaggaagaccgtggcgcacaggaaaaccggacgccgagcaagaacacggcagggaggagctcggccgggcgccatggggcgagctcgaggaagctccacggcggggttcgcggcgcaggacgcaggcgcgcgcgcgcagagggagatgcgcacggctggcgagcgcagggagcatggccagggcacggccgagcagtgagttccatggcagcggcatggtggagggagctgggaggaaacgccggggaagatgaggttggcgagcgctggggctggcagccaggcaccggatgcgagaggtagagggatcgagaatggatgcgatggtgaccgaaggaaaaggataagcccccagaaacgtgagcaattttggtgcagtttcttcgggaacgagccacggcgacggctttggataagaccagagaatacgt

SEQ ID NO: 1751 - DNA, 1100 bp, Zea mays
  Clone ID: ZEAMA-23APR03-CLUSTER119_1857
cggtccggccctcctcgatcagctacgtatgccccccccccccccagatggtgtgctgctgggttcctcttcgcgaaggcgcaagagcaagcggaagcaacgccgacttttgcgatgcagatcctcgggcggaaggttctggaggcttcccgccgcctacctctcttctacgctgcgcacagcggccgcgcccatgcgatcgccacgcttgcgggcgccgccgcgcgatgggctccgcccgctacctcgggctcgcttgccaccgcgccgtgggctgccacccagcgccgcggcgccaagatgctcggctccgacgtgaaacttggaaatgtaatacaaagaagaggccacatttatcaggtaataaaagcacaacattcacatcaaggaagaggaggggccacaatacaggtcgaactgagggatgttgacactggaaacaaaataacagaaagatttcgtactgatgaggcccttgagagagtttttgttgaggagaagtcattcacatatctgtatcaggaaggagatactgtgactcttatggagcctgaaacgtttgagcaacttgaagtttcgaaggaactgtttggcaaagctgctgcatacctaaaagatgaaatgaaagtgaatctacaatactttgatggccggccaatgtctgggacagttcctcaacgagtgacttgcactgttgttgaagcacaaccaaatacaaaagggctaactgctcaaccacagtataaaagggtcttgctggataatggtcttacagtgcttgcaccaccttttattgaagcgggtgagaatattgtaatcagtacagccgatgattcttatatgacgagagcgtaaggggtatcgtggatgacgttttgttctaccaaatggggatcgattacaatgtggctaccagaataattttatttacactcagttgtggagttgccgtaaacagtgagccttggcggacaccaaccaagaacttttagttcttcgctaataacccacacattttgtactcacatgtcttttcgttttgttcctcacttcaaatatttatgcaacagaatccattcatgccaaaaaaaaaaaaaaaa

SEQ ID NO: 1752 - DNA, 2809 bp, Zea mays
  unsure (1)..(2809): unsure at all n locations
  Clone ID: ZEAMA-23APR03-CLUSTER119_1892
aaacaaaaatcagctgagcgaacgaacgaagagagcacaagtggttctcagggcacaactgacaattcactacatggaggacagatgataccctgtatgtgaagaatctacaatggagggatagggcatcaaatacattatggggtaaaagattaaagaaatgactaaacaaaatactgcatgtgttagttcagccttcttccaaatgtagctccttgataaggcaaattgtccgactgttacgtccttgttaagtacgattgtccatccatgatctagatatggtacaaaatacaacaggacctgaaagatagccgtgcattagattaacccggaaaatcacttcgatagaactgcctgatagaattttgctcgaaagtgccctggctgatcaagcacaggaacttcaccgtttgcagtggtcaacaatattaaatatgtcctgctaaacgaaatcgaaaaatagaatatcagcagtgaagtacttatctcatgttttgaccactggaaaattagcgttgtaaattcattagttgttttaaagactacaacgaaaaacgatataaaaaatgatcttgctagataggtacttcacccatgcaccccttgcctccatctgtcaaatcaaaatcgttccatgtttagttttcgaagttcgagggcacattctaggatgacaagcaaaaatatcttccacactgcattacatatatcaatcactagttacttcgattcaaagcatacagccacatcatatctactaggatggcatgtacaatgttagtttgttattggtcaccatctaacctctgaaaatgtgaagacacgagatgaaagtgacagattcctactatcacgacgactcgaccgattctgtgttcacattgattttgaacggttttaccaaaacgattctcacaaaagagggctgaaaagctgaacgattgtcagtccgcagcagcttttggcggccacaagctggaaaaaagcctaaacaagcaccctcatcatgtcgagggtgacctgcatcagcaatgatactacactcctgctgctactaactagcagacaattgcttggatccttgggatgaaaatggattatggatgtgaacagcagcataaagtatggtaagctaaaagatggattggccttcgaaacaatttggggtggaggtgggcgctgtggcaacaagagacagaagagatcatggatatgtcagtctttttctaaaaattcagatgaacgtgacccaaacaaaatggaccttaacagatatgtgtctcttaagggcataaacaaaattatcccttatcagaatgtcagtcatgaagggcgggcctggtgcagcggtagagcctaccgtctgtaaccggaaggtcccgggttcgagccccagcctctgcatattatgcgggtaaggtctggcgcttaaagatacccttccccagaccccgcacagtgcgggaagcctacggcactgggtacgcccttatcagaatgtcagtcatgatttcacagatcattgaccatccatatgtcctcagggatgaaaaaaatcaaagttcatttaggtgtaaacttaccacgggtggtaagcagatggcagaaaatcaggcagcaagaagatcatcttggcataaaacagggggctccctgcacattttgacagcacttcaatggtattatggtaccgagttcacattttgttagcaagatagatgtctatgtgcaggagttggaatgtgatcagtccactctaactagcattacaaattacctcactgctttgtccatgaaattaaatgtcaagcagttttccaatttactaacagattgcttggaacgaattattggcatttttgtttggaagaacgaaatatttgggacactacacatgcacctggaattatctcttaccctagtagagtgctgtgcccctgtgccaacagtatcgaaaccatcagtgtacagactcaatgtttatgagcctgacatatttagaaggatgatgtatcaatttcgcccctttccttacgacaaactagcactataaacatatggtatgttcttataatatcataaaaccaatgcagttaggcacagtatctattagagcaatttggcgactgtgagaaagtgatataccattgtgcaactgcaactcagtaaataatatttgttactcccttcgttgcaagctacaaatgtaatgtaggagttgaggaaagcttcttgtaaagcatttagaagtagaatttgttatcaccgctaagacaaaaggaactaataataggttgcttagctaaggattcttccacacctgattagtccactctaatacaatcgtcataaaacaatctcatcaagctcctagttgattgggggggggggggggnactaatgagctctctcnnnnngnnnnnngnnnnncnnnggttgggntaggccgcggtagggggggagttgggtatgtggtcccccctcgggtggcttcacttggcgctagaagatgactcgtccctatatgtatccctggctccttacatctccgtctatactccgaagcccctttatactcttgcgggatcccctattagccctactatctctcaagaaggttccaccgtcaattttttgtgttgacaatatttgcgtgcttcccagaggaacccccagaccgcccccccgggcggcgggcagcgcccccagacccgcaccccccccgcccccgccacccagccccaccccgcccgcggaccgcaccgcccctcccacgcgcccgcccccccggctcagcccggccccc

SEQ ID NO: 1753 - DNA, 2672 bp, Zea mays
  unsure (1)..(2672): unsure at all n locations
  Clone ID: ZEAMA-23APR03-CLUSTER119_1899
atcccgtggttcggccaagtacaacacttgcctagttcacgttgttgcgtcccaatggactagagttgcactcaactcctttcaagtgatccaatgatcaacttgaataccacggtgttctttttcctttactctttcccgtttgcgaggaatctccacaacttggagcctctcgcccttacattgagatgatcacaaagaagcatagatataagagtgggaagagcaacacacacaagcctcaaagcacgagcacgagcacaaacacgcacacaagtcacaacttgagctctaagatcacacacggagttctcaactcaagaggagctcaaattgctatcacaacgaatcaaatgcgctagagagatgccttggtgctaagagatgatcaaagaatgcttggtttgcttcttcatgcgcctaggggtccctttgatagccccaaggtagctaggagccgttgatagcaatccaggaaggcaattcttgccttctgtcgactggtgcaccggacagtccggtgcaccaacggacactgtccggtgcagatttctttcctgttttggtgcagccgaccgttgacgatttggagccgttggcgcaccggacactgtccgcgaacactccagaccgttggcccggccacgcgtcacgcgcggaattgcgcgcscgaccgttggctcaccggacagtccggtgcacaccgacagtccggtgaattttagccgtacgccgtcgtcgagttcccgagaactgccagttgaccagcgccaccttgggnaaccggacactgtccgcgacccaccggacantccggtgcacccagactnancagagtcttggctgcnggagccaagtcttttccatttgacttttctctgattctagcacttagacaaatatgttagtacacaaaaaccaatgtactaagtctagaatcatacctttgtattgatttgcactttgtccaccatttggcattgtttaacacataaccatttgtgttggacacttaatcaccaaaatacttagaaatggcccaagggcacatttccctttcaactatgcacgaacgatgacgatgaatagggactatggacaaatgaacgaacgatcgagtgatcggatgaacgaacgatcggaatttcggcagcataatgactgaacaaagattatttggacgaacgaacggacgaacgatcggacgaacgaacgaacgaaccatgaacgatcagacgaacgaacaaacaaactatgaacagctgaacgaacgatcgaaagaacgaccggacgatccttgtgcttgtgttgtgcttttttgggagtgggagtgggagtgggggggagagagttgccatgaaatggcttggtgtggcttgaggggaggcccttgcccctctatttttaggtaaggtgggggattagtgggaggaggcgaggattagtgggaggatgcgaggattagtgtgagataagcatgtattagtcatgtataagtgaaattagcttgtagagctcactgtatgacaccagaggcgtatgtatacatacgagcatgaggaaaattatgaagaaaatatttgtagggactttaaaaatgattctgaaggtatttctcaggaggaaaatatttggagaattatcggtggaatatttgggcagtatttctggaaagaacttgagggggatcactagggaaatatttgtaggatattttgaggaggatatagaccactatattttatttgttgagatcaagttgcaaacaaacattttgaaatgaaatttaaaattcatttgaatttagagcgagtttgagaaaatttcaagatttgaattttcgggttgctacaaaataatggtgcaatattgttttggagaagttcctcacttatgaatatcgatatagagaagtccaatctaagtattgttgtggagaagccatctcttatgagtatcataatagaaaaaactcggcaaatgctgcccaggtaaggcagaggccgacgagttctctgttcctatcaatctaatctagcagtttcctctcccttgaaaccccattgccactccctccctctacttgtttgctgacccacgccaacaactgtcgtcgcttctctaattcgatttcccccacccgtcctatatatcaccttagatgaaacctcaccctagctagtcgacgcaccgaaaggtctgaccgcaccaaccgcgcccgacctggttagaccgcaccgagccacatcagcccgcacggacccaacaaaagttgaatgcctttttacagcgccaggttttccgctgcaccccgtgattttgaaatccatttcatagtgctcgcaactactgcccgaaatcgccgtgtgggaggatgagatttcatcacagttctgctagggtttcgtatttggactacacgtagcggaatccggtgatgtcgtttctctaacaagaagatcaccaattgcgacagagttggttttgtgattcgctacaggtagggttttgctttttatcggcacccaaaacccgggggggggggactagtgagctctcccctgggaaaattttggaccccgggaaacccaatttttaaagggccccccccccgggggacccccccttttttccccctttgggggggtttttttccgttggggaaaaacggg

SEQ ID NO: 1754 - DNA, 1053 bp, Zea mays
  unsure (1)..(1053): unsure at all n locations
  Clone ID: ZEAMA-23APR03-CLUSTER119_923
ttttttttttttttttcgacgatcgaactattttaaataatttatcagcataccgtttccacagctgacacgaatccgcgagatcggtagtgattttccgatccagcaaatttgtcgagcgcttggggaatatcgcgctgttggctacgtcttcatccgacgcttgggatttcttgacgacacacgaaacgacgacaggatcgtgtttagagcgagctagtgaggtgggggtcgaacaggggatgatagcttcgacgacgatataggagggnggcatatatagagctgtacacacgacacgacgaactaagtcgcgacgagctanaaaaagattcggcacgcgagcttgacgtgcacggatttttgtttcgttgctcaacgcacgacatgattgggaattaaagccgagcgggtcgagagggctggagctgaagcgccgcgatgggcaaagtggagcacggccagcgcacgtgacagagggactcggctgagctcgtgcttgagcaagcaggggactcgcgcacagagctgaatccgagcagggaaattcctggcgccacgagagagagctccgagcttgagctccgcatagggagcaagatgcgctgctcggctgagggggttggagcaggcgcgcagcaaagagccagggccgggaggagcaaggggcgcggcaccaaggaggtcagctgccggcagtggaaaccgccatggcgagcacagggaagctcgcggcgggggaagttcatctgggtgtgctggaagaagagcgtgcgctgcccgaggacgcttggtccgagcaggagaaatgggcgcgtagaggagggagaggaaggagagagccgccatgggaaagagaggagagctgggcacaagtggccaaggagaagaagagctccgtgagctgagggaggaagatgcgcaggggagagagacagagctctcaggcacggctggaagatggagagtagagcagagcgagcaggcatctgggcgcaggagattaacaccatggcgggattcggattcttatccaaggacggccgagcggat

SEQ ID NO: 1755 - DNA, 1475 bp, Zea mays
  unsure (1)..(1475): unsure at all n locations
  Clone ID: ZEAMA-23APR03-CLUSTER12011_1
aagatcgccctcgacccacagtcccggcgcccgcccgcgccaccgaccgcgacacagccaccgacgcagccccccacccccccccacccccacccaccgccgcagcaaccacgcacctggtttcgtccccaaatctcactcaatccccagtcccgacacccatcctctccaccgaagtcaccaccgcatggacgacgccgcgaatcccacccctccaccatccacctccgccgcatccgcggcggccgcggcggcgcaacaccagcagctccagcgccaactcttcctaatgcagcaggcgcagtcccatccgcagcagctgtcgcagcaggccatgtcccgcttcccctccaacatcgacgctcacctccgccctctagggccgcttcgcttccaacagccccagccccagccccagccgtcccactcccagggtccatctcagtcgccgtcgcaggccacgcagcaggcgtcaccccagcagcagcagcagcaggcggcggcggcggcggcagcggcgcaggcacaagcacaggcccaggcccaggcggcacgggtacgaagccccgagatggagatggcgctgcaggacgccatgcgggtctgcaatccggacgtcaagacgcccttccagtccatcgaggacgctgtcaacaggttattaccttaccatgttgttgccgactatgaggctgaagaagatgacaggatccttgatagcgacacaacaggccagatcccttctcgcctgcagcaatgggaccataatattctggtgaagattgctgagttcacgacaacttttgacaagcaagtattggcatataacataatgaccaagaaaagggccatcggtgagttcaggtcggaggagcggctcatgctggagcaagccttattgcaggaggaaaagcaagctatgctgggactgagggcagagatggagtcgagagagaaagctggtcgcgaggctgccgaagtgaagatgcgtttggcaatggagcatgctcgtgctgaggcacaagctcactctgagatgatgaatcatggtcctataagggccagtgctgttgcttcgcaaggggaggatggtccgagtcatgacatggtgcaagaacatggcgaagatgggtggggaaattctcagagggatgatgaagatccatcggaggatttcctcaacgatgagaacgaacctgagaatgggaactcagatgggcaggaggactggcgcagatctggggagtttgatctcaactctaggtaaggcagttggatttccacatgaaggtttctaggtaggctacgacatgctggtattgtatctactattctattgttgtgttcggtgaagatgtctttgtggctgtaaacatggcattcgaacaattcagtttctttgtaatttgactagtaatatttacttgagcactcaatatgtgccatttccaacttggagaaaaaaaattacaatn

SEQ ID NO: 1756 - DNA, 1652 bp, Zea mays
  Clone ID: ZEAMA-23APR03-CLUSTER120490_1
aaaggagatagagagagagggagtgagaagaaggagacgcgaggagagagagagagcggcaggcaggcaggcaggcaataaatggcagttttggtgcgcgcaggctgatggcggcgtggcaggtcctctctgtcgcctcaccgtcttaactccggccgcgcgccggcaccacaaaccacaccgctcggctgcgagcacgcgggttttaatccgtcgcagagcgcatgagcacgccgcccagagcgcagactacgacgagcagccgtctgtagagggggagggaccgagggagagatcagggcgtcaggccgttgtctctcagcttcaccttcaccttgccgggcacggcgaacggcacggcggcctatggatttggccacatggcggggttccctctaggtggaggaggccacagccgcgacgcccccgcgtcgtccgtcccgccggtgcacccctccgacgcagcgtccttcctctacgccgcgcgcgcgggagcgggcctgcagctatggcagcagcacgagcagcaacagcagcacccgttctacacctccaacatcatccgcttctccgatgacccgcccggcgccccgccctcgctcacgggcgccgcgtcgtcgtcgtcttcgcgcggcacgaggggccggcgcgggaagcggcggcggaggcggcggcggggtcagctgccaggactgcggcaaccaggccaagaaggactgcgtgcaccagcgctgccgcacctgctgcaagagccgcggcttcacctgcagcacccacgtcaagtccacctgggtccctgccgccaagagacgcgagcgccagcagcagctcgccgtgctagcggcctccgccgccgccacaaccgccggcgccggcccatcccgcgacccgaccaagcgccctcgcgcgcgcctctccgtcgccacccccgccacgtcctcggatggtcacggtcgcggagaggttcccacgggaggtgagctcggaggcggtgttccggtgcgtgcgcctggggccggtcgaccaggccgaggcggaggtcgcgtaccagaccaccgtcagcatcggcggccacgtgttcaagggcatccttcacgacgttggccctcacagcttgcctgccgctggagtcggaggcggcgccatcgagtaccacttccgccacgccggggacggattgccgccgagcacggcagccactggcgaagcaggcggcggtggcgtggggagtgtcgtcgtgtcatcggctgtggtgatggacccgtacccgacgcccggaccctacgccgccttccccgccggcgcgccgttcttccacggccacccgagacagtgaccgccggctcgctcgctcgccagcagccgtcccgctgtgtaacgacatcacgactcccatctctggctcgctcgatctgtcaatttcgttagcttcctaatttcttagcctcttgttgagatgcataaattcatgttccttctagagcctagctagctagcttaggcgcgggttagacttgtttgcttcttgagatcaattcatgaggtgagtagcaatatactcagtggctgcaagtggctaaaaatctgacatttaggaaccttgatgagacatttgagatggtttcttgcactgtgcaaaaaaaaaaaaaaaa

SEQ ID NO: 1757 - DNA, 2799 bp, Zea mays
  Clone ID: ZEAMA-23APR03-CLUSTER1205_2
agacaaccaaacgaaccctcccggagcagcaaagcataggcgctcgagcgctccctcccgagctcctccgcctcacggtcacgcctcgtgtccccccaccccctcctcctcctcctcggccggccgcctcacgccgtcacctccgctcggcgagtctcggctccgaccgctgccgccacgtgcgacctcccctactcctgagagatctgcggggctcggcatggggtgaccagatcgggccgctgctcggtgctttccagctgaattttgcccgcagctcgtgtcggaggcagcgaagatggcggaggccggcgtggcacgcggctcagggagcgctggcgatgctttgttcagggaactctggcatgcttgtgctgggccgttggtcacagtgcctcgccaaggcgagctggtttattacttcccccagggtcatatggaacagcttgaagcgtctacagatcaacaacttgatcagcacttgcctttgtttaatctaccgcacaagatcctctgcaaggtggtcaatgtagaacttagagctgaaactgattctgatgaagtttatgctcaaattatgctgcaaccacaaacagagcaaagtgagcccaccagcccagatcctgaaccacctgagcctgaaagatgcaacattcattccttctgcaagaccttgactgcttcagatacaagtacccatggtctctctgtcctcaggaggcatgctgaagaatgtttgccccaactggacatgactcagaatccaccgtggcaagaactagtggctaaagatctccatggaaatgaatggcatttccgtcacatctttcgagggcaaccaaggaggcatctacttacgacaggctggagtgtttttgttagctcaaaaagattggttgcgggtgacgcgtttatcttcttgagaggtgagaacggagagctgcgagtcggggtaaggaggctcatgagacaactaaataacatgccgtcttcggttatctcaagccacagcatgcatcttggagtcctagcaactgcatctcatgccatctccactggaactctattttctgttttctacaaacccagaacaagtagatctgaatttgtcgttagtgtaaacaagtacctcgaagctaagaatcacaagatgtctgttggtatgaggtttaaaatgagatttgagggtgatgaatcccctgaaagaagattcagtgggacaattattggtatgggatgcatgccagctaactcaacatctccatgggctaactctgaatggagatcattgaaggtccaatgggacgagccttctgctattctgcgtccagatagagtttcaccatgggaagtagaaccccttgatcgaacaaatccacagccacctcaacctcctttacggaataagcgagcacggcctcctgcttcaccttcgattgctccagaacttgctccagtttttggtttttggaagtccccagctgagcctgcccaagctttctcattctcaggactgcagcgaactcaggagctataccattcaagccccagttcaatgttctcatcgtcgttgaatgtgggattcaatccaaagtacgagggtcccactccaaacaccaaccatttgtactggacaatgagagagacaagaactgaatcctactccgctagcatcaacaaagctccaactgaaaagaagcaagaatccactacttctggctgcagattgttcggtatcgagataggttcttctgcagtgtcacccgtggttactgttgctagcgtcgggcatgatcctccgccacctgctctctcagtagacgctgaatctgaccagctgtcacagccgtcccatgccaacaaagcaacggatgccccagcggcaagcagcgatcgctctcctaacgagacagagagccggcaagccaggagctgcaccaaggtaatcatgcaaggggtggcggttggcagggcggtggacttgacgaggctagatgggtacgatgacctccgccgcaagttggaggagatgttcgatatcccgggagagctttccgccagcctcaataaatggaaggtgatctacacagatgacgaggacgatatgatgctggtcggggacgatccatggagtgaattttgcaggatggtaaaaaggatatacatttattcctacgaggaggccaagtctttgactcccaaggcgaagctgccggccatcggtggtgacaccggcgtcaagccggacccaagtaaactgtcagcagaatctgacgtgccacagagcgactccgacaacagtgctcccgttgctgctgataaggactgatggacgctagctcggccgtaccttctctttatgttggccatgggaggccagtgcagtgcccatgctccttgagactgctaagagttgatcatctgttccatctgcctcggcttggaccagcgaggatggccgggagggagtgcatgccgctccgtgcgtgtttcgtttgccgtgtttggtaggagccatggcttgttgccggctacttgggttctgtagactgttacactgactgctgccgtctcacctggccgtcggcgcgggccgccccctctcacctctctagtaatatactagggcttatgtacacacagctgttttggtagtggcatatgtatatcgtcggtcatgttgcttgcgacatttagcatcctccgtagctgctatttcctcaaaaaaaaagtgcggccgccgactagtgagctcgtcgacccgggaattaattccggaccggtacctgcaggcgtgca

SEQ ID NO: 1758 - DNA, 1226 bp, Zea mays
  Clone ID: ZEAMA-23APR03-CLUSTER120_25
gtcacaccttccctcggtcccttccatcttctagccgccgccgccgccgccgctgcccaaaaccctacctaccctcttcttccccctcactctcctttcatctccattctaatggcggcccaacccgtccggcgaagctgctagtgcttgtatctactatcttcatcaggtacttcgccatcctactgaagtattccccgccgccgctgccatggccaccctcaaccctttcgaactcctcggcgccgacgacaacgacgacccgacgcagctgattgcggcggcggcggctgctgctcagaaagccgaggcgaagaagtccgccgtggcgcctgctgggaaggctgcccagcctgcggcgaccaccaagttcccgaccaagcccgctcctccctcgcagacggttcgggatgcacgcggcggtggctcatcagctcgtggaggctttggccgtggtgaacgtggccgtggcagaggtggacggggatatggccagaaccgtggcttcagtggtgacaatggcaatgagttccagggaggttatggtggcggaggctatggggatggtgctgtaactgggtggatctgcaaggatgctactgcaaatgaggaggaagaaaaggaagaggacaaggagatgactctggaggaatttgagaaaataagagaggagaagaggaaagcactacttgcattgaaggctgaggagaggaaagttgaagttgacaaggatttgcagtctctgcagccactttcaaacaagaaagaaaatgatgaagttttcattaagctgggttctgacaaggataagaagaaggaaaatgcttgagcgtgatgagcgtgccaagaagtcggtgagcatcaacgagttcctgaaacctgctgaaggagaaaggtactacggcggccgtggccgtggaaggggccgtggggatcgtggtggttttagaggcggatacagagggggatacagtcgtggcccagctgctgctgctccatccattgaggatcaagctcagttcccaagccttggtgggaagtgaagggcgcccagctgctgctgtcaccgagcgttgtgttgtctgctgttgtcatatttaaattttgtccgacgttaaatttctgtgccacggtttaaacggaacaaataatgatgttgcatgtggctatctttagttatgtggtacttgacgttgaataccggagttgttgtttaaaaaaaaaaa

SEQ ID NO: 1759 - DNA, 2175 bp, Zea mays
  Clone ID: ZEAMA-23APR03-CLUSTER120_33
tgccagcacacacaagcaggcaaagctctcgaccccgctctgagggattaatggcggcgggaggaggcggcagcatcgccgacgagaaggcccccgttgctgaggctttcggcgggcacctggaggcggccgagatgacggaggcggaggaggaacacagcggcggcggcggcgtcaagtcccggctgtcgggtctgctgtggcacggcgggtccgcgtacgacgcgtggttcagctgcgcgtcgaaccaggtggcgcaggtgctgctgacgctgccctactcgttcgcgcagctggggatgctgagcggcgtgctgttccagctcttctacggcctgctgggcagctggacggcgtacctgatcagcatcctgtacctggagtaccgcacccgtcgggagcgcgagaaggccgcggacttccggaaccacgtgatccagtggttcgaggtgctggacgggctgctgggccggcactggcgcaacgccgggctggccttcaactgcaccttcctcctcttcggctccgtcatccagctcatcggctgcgccagcaacatctactacgtcaacgaccggctggacaagcggacgtggacctacgtcttcggcgcctgctgcgccaccaccgtcttcatcccctccttccacaactaccgcgtctggtccttcctgggcctcgtcatgaccacctacaccgcctggtacatggccgtcgcctcgctcgtccacggacaggtcgagggcgtccagcattcggggcccacaaggatcgtactctacttcaccggggcgaccaacatactctacacgttcgggggacacgcggtcacagtggagatcatgcacgcgatgtggcgtcctcagaagttcaaggccatctacctgctggcgacgctgtacgtgctgacgctgaccctcccttccgccgccgcctcctactgggcgttcggcgacgagctgctgacgcactccaacgcgctggcgctgctcccgcggacgcccttccgcgacgccgccgtggtgctcatgctcatccaccagttcatcaccttcggcttcgcctgcaccccgctctacttcgtctgggagaagctcatcggcctccacgactgccgcagcctctgcaagcgcgccgccgccaggctccccgtcgtcgtccccatctggttcctcgccatcatcttccccttcttcgggcccatcaactccgccgtcgggtcgctcctcgtcagcttcaccgtctatatcatcccggcgctcgcgcacatggtcaccttcaggtcgccgcagtcgagggagaacgccgtggagcggccgccgaggttcgccggagggtggacaggcgcttacgtcatcaactccttcgtggtggcgtgggtgctggtggtcggcttcggcttcgggggctgggccagcataaccaacttcgtgcagcaggtcaacaccttcggcctcttcgccaagtgctaccagtgcccgccgcatctcactgctgccccgccggcggccttcatgccgccgccgcaccaatggccgcggcgccctccatgccaccggcggcgacggcgttcaatgccaccggcctcttcttccctccgctgccagccccggttccggctccggctccgtcgccgatgatcaacttcttcctccgccaccaccaccgtgggcaccacggccgccacggcctgtgacgtcgtcgtcgacgcgctgtgcattgcatgcatggtcgctagcgctgcgcctctgtcacgtacggccgattactccctgtcgagtttgctccacagtagttttagctagttatatatcttggtcatcagcacgcagcaaaggtgcaagttaattagctactagcctgattagtaaaagttgtgtgtcgtcaaatgccctgttgtacgttcatcagataaaagagatcgaggtacacgtggatgagagtctggacgtacgtacggtcataaggctaggtaactctgcctacatgatcgtcaggatacgtttggagtcccttgtcctgtaccgtgtccttgtgtgtagctgctttcgagaaagaagctgagcagaaaaagaaaaaaaaaagagaatggaatgttgttacgttttcaaaaaaaaaaaaaaacacagaaaggaagcctataacaaatctgatgacaccatcacattgaatccg

SEQ ID NO: 1760 - DNA, 2259 bp, Zea mays
  Clone ID: ZEAMA-23APR03-CLUSTER120_57
gcacgagaccattacctagaacatcctaatcgaaaaacaacaaactcagtttccaaattagcaaattagcaagcaactgagtgcaacagaaacatgaaggtaacatgtttttttttctgcttcttttttttctgccgggaagagtttgtctctcttcgatggaccacggcatctagctcttttgtgtgtgtgtgcctctagccctccagctgatgaaacatcttcttgggcttttttttgatattattcgggtcccagcaaaggattgtgatcaaggtgcagatgacctgcgacaagtgccgtaaaaacgctctggctctagcttgctcgacatatggtaagcactgcgttactgatcgcagtgacccgtgtctgaacgcccagcctctcgcgtggtcgaggagcggcacagcagctgatcgtgtctgtgactgtgacgtcttggttgcaggagtgcaatccgtggggatcgagggtgaggagcgggaccagctcgtggtgatcggcgacggcgtcgacgccacctgcctggcgagcggcctgcggaagaaggtgaaggtgggcagggcggacatcgtgaaggtggaagcggtgggcgacgagaaggaggcgacgacgaaggacgacgcggccgccagtagtagtagtagtagtcctaatcccgtggcccaccgcttacaccttccctcggtcccttccatctcctagccgccgccgccgccgcccaaaaccctacctaccctcttctccccctcactctcctttcatctccattctaatggcggcccaacccgtccggcgaagctgctagtgcttgtatctactatcttcatcaggtacttcgcgatcctactgaagtattccccgccgccgctgccatggccaccctcaaccctttcgaactcctcggcgccgacgacaacgacgacccgtcgctgttgattgcggcggcggcggctgctgctcagaaagccgaggcgaagaagtccgccgtggcgcctgctgggaaggctgcccagcctgcggcgaccaccaagttcccgaccaagcccgctcctccctcgcagacggttcgggatgcacgcggcggtggctcatcagctcgtggaggctttggccgtggtgaacgtggccgtggcagaggtggacggggatatggtcagaaccgtggcttcagtggtgacaatggcaatgagttccagggaggttatggtggcggaggctatggggatggtgctgtaactggtggatctgaaggagaaagggagagagacactcgtcccccgtaccgtggcggaggcagacgtggtggttacaggaatgttgagtttggtgatgactctgcagaggccaccacggagaaactatgagcgccacagcgggactggccatggctatgagatgaagcgtgatggcgcagggcgtgggaactggggcactgccactgatgagcttattgcccaggatgcagaggactctccgaagatggaggaggctgctcctgttgctgagaaacaaggtgagcagatcgatgccccagcagcagatgagaacaaagataacaaggatgctactgcaaatgaggaggaagaaaaggaagaggacaaggagatgactctggaggaatttgagaaaataagagaggagaagaggaaagcactacttgcgttgaaggctgaggagaggaaagttgaagttgacaaggatctgcgttctctgcagccactttcaaacaagaaagaaaatgatgaagttttcattaagctgggttctgacaaggataagaagaaggaaaatgctgagcgtgatgagcgtgccaagaagtcggtgagcatcaacgagttcctgaaacctgctgaaggagaaaggtactacggcggccgtggccgtggaaggggccgtggggatcgtggtggttttagaggcggatacggagggggatacagtcgtggcccagctgctgctgctccatccattgaagatcaagctcagttcccaagccttggtgggaagtgaagggcgcccagctgctgctgtcaccgagcgttgtgttgtctgctgttgtcatatttaaattttgtccgacgttacatttctgtgccacggtttaaacggaacaaataatggtgttgcatgtggctaactttggttatgtggtacttgacgttgaataccggagttgttgtttatcagaattataccccaatttttgtaggccaaaaaagaaaaaaaaaaacacgagggggggcccggtaccca

SEQ ID NO: 1761 - DNA, 1140 bp, Zea mays
  unsure (1)..(1140): unsure at all n locations
  Clone ID: ZEAMA-23APR03-CLUSTER12139_16
aacaaacaaactgatccaccaaaacatgaagagccagcagcatgtcgtcctcgctgctctcatcgtcgtcgtcgtcgccaccatattggtgcagacgacgccgccgccgcgtggtgcggaggcggccattattccgggtaatgttagcgcccccaacgccgtcgtcttcggcgtagtgccatgcagcaccgggagctccatcaacgtggccaccgccccgccgttcccaaacgccagcctacagctgcagtgcggcgccgcctcccttgctggcaacgtgagtggacgcgcgacgacggcagacagccgcggcaacttcctcgtcggcgtgggcgtcatccgcaacgccaacagcagcggcggggcggtgctctcgctctcctccatgctgctgggcaaccagtgcagcgtggtggtcaccaccccgctggccgcctgcaacgtgtccctggccggcgccaataatggcacgctcagcgcgccggttcgggtcgtcggcggcgggccgctcctcggcggactgctcggtntggccgccgggcccttctccttctcattctcgaaccgaagctcttctcctctaggtcgtcgtaggatgatggggtcgtaggacgatgggatgtgatctccaacaaataaaaggaactactgcgactacgagggagggagtctatagatgcatggaataaattaaacaaatgatgatatgtgtaccgtgtgttgtgttgtgttatcatatcacgtaattatacgtatatatatacctgtaccgtgcgttgtattatggtactaataataagcacgtacgtataacatgcttctctgcaaaaaaaaaaaaaaaaaaaaaaaaaagggtcttgatcgagagccgatccgcgctcaaattacacctgacgaacctggacttactgcataggaacctatcaagccgactcctatgaaaggagggagttgtgccccagcttcctttatcacattttgctatttctgcagtaaactgctggctggtattatgtattagaattagtctcagcaccaggagcttgaagagtggcaagtgacaccgtgtattctttatcttagtttctgttgacataccaggtatttgtagttggcagacaggcagaatttcatattaag

SEQ ID NO: 1762 - DNA, 1140 bp, Zea mays
  unsure (1)..(1140): unsure at all n locations
  Clone ID: ZEAMA-23APR03-CLUSTER12185_3
aatctgcaggaggaggaagaggtgaaatggtgaaggccgcgacgtggctactcgatcggctcctctacctactcaagcaggacaagggcaacgacgccaacgccgcgcgtnaccgacggcgaaggaggcgtgctccggccggtggcgccgccaacgccgttgaaacgatgatgncgaggagcagcacctcaacacctttctcgacactgcgaatngtcgttcgcctcctcaagggtgcagttcaggtgcgtgcttcgtttctcttgcagatgctttgcttttttctgtccgtgttggctcgtcctggtgggattgtgaccacgctgggttctgcggatctgggaacaggaatatggcgtcgcgcgcgcggtgggtggaggaagccggcgctgcggaggtggtggagaacaggggcaagctgtggctgaccaccggtgtcactcgggggggcaagctgtactacaacgttgaggagaccgggttcttggccgaaatgggtgccttgattcttctcaatgataaggatgagacgataggaattgaagatatctatgggaagcttgctggaggaaattatgggtgctcctgggatacctttcaggcttataagcacttgaaatcacttggatatattgttggaagatttggtgttccctggacaatgaagcatggtggtactcatcacaccattgctccccagatgaatatacttgagactgatcagagcttaaatagagttgatggggcctccaatgacataaccaaattgctcaaggaaatacagattgacgggatatgtccatcttttgaagtttatctgccaaatagcaagttcaaaaagtcatccccagggtgccctagtttcctcttatgtctattaaggtaatagtagtcctttatcgactcagttaattttatgatcatagatccaatgcagtttcatttttgtgcaattcatcttctgtggatctttcagtatttcagtgtagggtaactaggtctatcttctaaccaggcttttctttaattgtgtaattgtctgtctgtaaatatgaacacatatacaatgttactacaatatcttcttgattggaaaatgtgagtgaatcctggtacatatgggctgagctcaaggttcac

SEQ ID NO: 1763 - DNA, 876 bp, Zea mays
  Clone ID: ZEAMA-23APR03-CLUSTER12187_2
gaaaacactcctctaagccaccaaacacttgctatgcccgctcctccccgcgcactgctcagcacgccgtgcccgtgagaccatggacgcgagcgcggccaccgccaggcgcaagcgcaagcgccccgacgccgacatcaccggcgacgccgccgctgccgctgccgccgccccggtcgccgtcgacgaggcctcggacgccgaggtcgaggagttctacgccatcctgcggcgcatccgcgacgcctcccgccggctgtgcggcgccggcgcccgccccgccccgcgcgcgccggcgtggcggcccagcttctcctgggaggacttcgcgaccccgccccctggcgcgccggcgcctgagaccccgacccccgccgcagcaggagccggcgcagccgcggcccgacgagcctgtagccgtcgtccgcgctaccgccccgtcgccgcgtgccgggctggacctgaacgcggagccggagccggaggcgccggccacccctcgctcggcgcgcgtccaggcgtagcgtagcgcgcggcgcatcgtcgcctgcctcctgcaccgcgccaagttgggcccgcgcgtcagctcggctgctgggaggtggccggcccggtgatccggtgatgtcatgtcagccgaaagccgacggtggtcgccatcgtccgcgggcggcacagcacacacagtgcgtaccttcccctcggtgaattactgatacgaatccccatcatgtaatcgtatttttttagtggctctctttggtgcgctgctccgtgtggacaggtgagactggttcgttgctttggttgcaggaaaataccttttaatcggagcagttgatgttccgtccgaaaaaaaaaaaaaaaaaagcggcc

SEQ ID NO: 1764 - DNA, 1791 bp, Zea mays
  Clone ID: ZEAMA-23APR03-CLUSTER12215_2
gtctctctcagtctctctcctgccctgtccgtcccactccccgtccagcggagagagaccctgtgggctgtggccgggcagccgtttcccctccccttccctctccgctccctccagagtctactgtagccagtgccgtagggtttcgcgtcctatccttcctcgcatcctccatggccgatcctgacgacctcggccgccgcctcgccgcggtcgccgtatccgagtctcctaccgccgccgcggctgcgctggagagcagcaacaacaacctgttccaggtgatgcgcgccgtggaggacgcggaggccaccatccgccagcagctggaggagaacagccggttgaaggacgagctgatgctcaagacgcgggagctccacagaattaggtcagaagccacagaccaagcttcctctcatgggatccgtatccatcaggatcgcgctcttggtgcccacacagacacctcctccactgctcccatcaggactaccgctacagcagcagaggccttcgaatggggagctggggatgccggcatcaaccacaagtaccttgaggccaaccaggctaatggaattccccgtaaatcaccgagcgctcccgatagcgctttcccatctcagctatctaccccgtcttcgcgatccctttcaccaactaggcaccacaaagaaacagactatgattctaggctcaacttatccggacaaggcgcactgcctgtttcagacctcaactcaaacgtcgtcatctggaagcaggtatcaactgtttgcttcgtgtgtctgttgccatactttttgatcgattgattcactcttcttgctgagctgcttatttccttccacaggatctccttgttaaggtcaaagaacaaggggaggagattgcacagctgagaaggcatctttctgactactctgtcaaggaggcccaaatacttaatgagaaacatgtcctggaaaaacgcattgcatatatgcgcatggcatttgatcagcagcagcaagatctggttgatgctgcatcgaaagctttgtcctacagacaggatattatcgaagaaaacatccgtcttacatatgcattgcaggcagcacatcaagagagatctacattcgtatcttctttattgcctcttctatcagaatataaccttcagcctcctgttcttgatgctcagtctattgttagcaatctgaaggttctgtttaagcatttgcaagaaaaacttattattactgaggagaagctgaaggaatcacaataccagattactccttggcatgctgaatcttcaaataatacaagtgctgctgcacagtcgccttctcatcctcctggaaatgcattgatcaaagccaaccttgacattgtgccccagcaagcatattctcatgtacattctccagtttcttctcctgttcaaactaggcgtgactgggatttgttagggaatgaaaatcgtcaggtcattcgaagtgaggttgccacaacaagtgcagagcatgataatgttgggaggacctctccttcaaccaggttgctggtggttacttcaaaaattcaataggatgtgttcttagctattttttgccgtttcacaattacaataatttcactatgtacatcccatttttgccacatgatgaaaatcttaatagtagtattagctctagctagcccccttttcttctttgttctgatgtaattaatttttgtacagtattttgaaaccatttctccaactatgattgttctaaaaaaaaaaaaaaaaaagcggcc

SEQ ID NO: 1765 - DNA, 1078 bp, Zea mays
  Clone ID: ZEAMA-23APR03-CLUSTER12229_2
ttttataaccagtttccctttattcactaattttgggtattacaaaaacaattgatagtacgccttgttgctcgacgaaatacctgcatcatcaatataatgcatgcaactaatactatgcgatctgctagggaatgatgagaagagccagccaacaaggcagagcagagagatatgcatatagagatatgaatcattggacgcatgaaaattaatgcgacaaggaagagaagcgatgcatgcatatgacatgatgattcatgcggcggcggcggcgtggtgtgtgaatccgaaggcgatgtgcgccatccgcccgtactccctgtcgtgcgcggcgacggggacatcctcctcgcccttccacgcgtcctcgcagctctcggaggcgcccatcgccgcggtcagctgctccatggccttgccgtagatcttggccttgaggttgtccagcgcgtcgcggaggaggtcggcggcgccgccgtactgctccaggcagtggttgaagcgtgcgcgcgcctgcggatccgacgacgccgcctccagctccgcgaggtcgtcgatcttggactcggtgctggcggcgtggtcgatggccatcctggtggccagcaccgccagcgcgtgcatgttcttgttgccggcctccttgctgcgcgggtcggcgcccagcgacgccatgcagtggtcgtaggccacgccggcgtgcgtctccgacgcgccgcggcacgcctcctccacgctcaccggggtcgcgcactcctgcggcggctcatgatccatagtcatcgcaattgcatcagcaggcaccaactccatctccaactccaccgcctgcgccacaccaacaaccagcaggctgaggaggaccagtagcgctagcgacctcatcgccattttcgacctactgctgcttactgacttattagcttggatgaacgatcgaagatctactaatataccggccggttgcctgcctgctacctgctggctatagaaatgaaagagagagagagagagagagaatataattaatggtgtcgaacgaacgaacgggcggacgcgtgggcggacgcgtggg

SEQ ID NO: 1766 - DNA, 1062 bp, Zea mays
  Clone ID: ZEAMA-23APR03-CLUSTER122309_1
ttttttttttttttttgaggcaggcaaaacaatacaatgcacacgtaacagagaagcaaacgcagcgaaccagctgccagcgacacatgccatcggacgtcccaaaccgggttttttaagaagctgcgacttttgggagtgaaaaaaatcacagcacgcacacgacattgtaatccctgcggattccgtttctcctcgtgattccgaggcccagcccaagatgtcggcccgcagcgctctactcatgtggcacgcgcggcgctgtgggcgaggaggacgctggtgggggagaggccgagcccgtgcggcgggggcgcgccgcccgtgtggtggacggggccgccgccgaggctggtggcggccgccgcgctgggcgccggggcggcggcttccacaggctttcttgaacggccgcggccgcggtggacgtgccgctcgcagtacttgtggcccggcaccacgtcgcgggagcaccgccacttacttgccgtccgtgcgccggcaccgcccgggctccggctccatgctgctgcggtagtcgaagcacaggctccccaggcccatcagcgaggggaagcgctgcgggccgaaggaggacgcggcgacgctcttccagatagggagcacaaggtgcgccggcaccggcgcgcccgctgcgaagtagcggtagatgagcacctggtgctccagttcctgctgctgcatgaacgtcagcgctgacggcctcttgggcgtcgccgttgccggggacgcatccgcgtctcgctcgccgcccccgccgagccccaggcccagcccgagaaccagaggcgacgaggccgccactccggcgctcgtgtcggcgcaggagagacggggcagcttcgccggcggctgcggcgagtcggtctccttgtcctcggcggccattttggagactccgctgttgcgcttcctgtggcggtttggactctacggagggagcgcgcgggcagcttctcgatagaagggaagaagagacagcattcgttctcgacgcagcggctccacgctagtagcgaagagccggcagccgtcctcctc

SEQ ID NO: 1767 - DNA, 3150 bp, Zea mays
  Clone ID: ZEAMA-23APR03-CLUSTER1224_4
aattcggcacgagggtgctgtgcctggtgcctcagtgcctgccctgcccgttgatggtttctggttatttttattattccctcccttctgctggcccggccatccccatgtattactagtgcagcgtgcgtgtgcgtctctctcccttgccatctgatcgatctcggcaaaaaaactgcgagatcttggcgtgctgccggcgataagattctccccggcgcaaagcacatcaccagagcgagcaagtggttcttggtctctctctccgttgccgcctccccccgcactgcatttaaaatagatgctgggtgtctcctgcctgcccccccaacttgcgccgcagagcgccactaacgcttgtttctgccgttgttgcttgccgcagagatcgccgggagagagggacagatcatgctcggggaacggtgtgtggcgaggaatgttgactagttgtttaatacgagatcaagaaggacaaagcaattaaacaagcagcaggctttgtgctttgtgggtgtccctcctctggttcactgccccgctctccactccagctccatacattagtttactcctcctgaggtactttgtgctcctcccccttctggcccctcactgcctacgatagcagcagcaccggccgcataagtaggttgggcgctagagtgcgcttcaagcagcagcgctgttgctgcatcggaacccatccccactatttgtttgttttcgctgtacgagcgatctcctggccggctccggcacgttgcaatattcggtcttctcttctcggcgcagcagcaacttgttcttgtgcgctgcctcgctgctctgagccatttgccgttgctgcggtggacaagtatgggatagtggttgtggtgctgtgcagttcttgcttcttacaagtggtggtggtggtggtggtctggacgtctggtctctgcgtgagcattggactagaggagcgggaagctgtgcggctcctctttcgtggtcaagatgaagttcatgaagcttggatcaaatccggatacatttcagggagatgggaatgaagtcagtattgcggcatctgaattggtgagcgacatcactgttcgtatagggactacaaagttttaccttcacaagtttccgctcctatccaagtgtgctcgcttccagaagttgattccaactactggcgatgaaaatattgagatccacatccatgatattcctggtggtgccaaggcttttgagatctgtgccaagttttgctatggcatgattgtcacactcaatgcctacaatgtgattgccgcccgctgtgccgcagagtacctggagatgaacgagactgttgacaagggcaatctgatctacaagatcgatatcttcctcagctcaagcatacaccggagctggaaagactccataattgttcttggtacaacaaaggctcatttaccttgggcagaggatcttaagctggtcagccactgcattgactctgttgcttcaaaagcctctattgacgtttcaaaagttgaatggtcatacacatacaaccgtaagaagctcacagttgagaatggtcatgattcgccatggaatggagtcaagcagcagcagtttgttccaaaggattggtgggtcgaagatctgacagatctcgacattgacgcctacaagcaagtcataacagcagtcaaaaccaagggtacggtgcccaaggatgtgatcggtgcggcgattaaagcctacacttacaagaagctcccgtcactaagcaaggtctcgatgatccatggcgacgcaaaagttcgggctatgctagttaccatcacatgcctgttgccatccgagaaaggttcggtttcgtgcagcttcctcttgaagttactgaaggcaacaaacttgctcaagtgtggagagatgtgcaggaaagagcttatgaagcgcatcgcacggcaactggaagaagcgtcagtgtcagatcttctgatccctacggtggatggggataccaccgtttacgacatcgacctgattcttagcattgttgaagaatttgtcagacaagatagcaagaatgcccagagacataacggtggtgaggtgaacgaccacgtatctgctcctagtgcgtcaatggttgcagtggccaaaactgtcgatggatatctcacagaggttgcaagggacccaaatataccggtctacaagtttttcagcctagctgagacggtttcgaccggttcaaggccggttcatgatggactgtatcgtgccattgatatgtatctgaaggagcacccaagcttgggcaagagcgacaagaagagattatgtgccctgatggactgcaagaagttgtcgcccgatgcgtgcgctcatgccgtgcagaacgagcgcctgcctctgaggatcgtggtgcaggtgctataccacgagcagacaagggcctgtgccgcagccaccgccatccgagccgacagcatcggcatcggctcctacgagagctcaaggtcaggcgccacaacgaacacagaggacgagtgggacggagtcatggccgtggaggacctcagcctgtccaagacgacgaagctggtggacaaatgcgacacggcggccagtacggtcgtcgtggggaaggacaaggaccacggtggcaacaagggcgccaccggcagggtggcgaaaggtggcgctggcgcggcgacaccaaagaaggcgctcgggaaaacggtgtccggcaaagggcagaccggggagcgcagcagctcggactcatccgacagcgccgtcgccgtcgcagtcttgaccagccaggagcatcccaagaggacgacccgcgcaaggaacgccgccaagtcggctgctgcgtagcccttccgctgagagaaatgctcaaggagcactagctaggttttagcagtcgtctgttctttgttattacgagtgttgcatagaagccaggaccatgttttttacacgtctgtagctgcctgtagggatggtgtaataccaggtacgtgcgttgttaggtgatgctgttagcacgtaggttccaaacctatgagaccttgggctctgctgggtttatgtcgaactcgcagttgtgttataagaatcctactttgatagacttaaactgttctgcag

SEQ ID NO: 1768 - DNA, 1367 bp, Zea mays
  unsure (1)..(1367): unsure at all n locations
  Clone ID: ZEAMA-23APR03-CLUSTER122562_1
ttttttttttttttttctaggattaaggaaatattatgttatgttctgaaacagatccttagtgtttgcacatgatatgtctccggatataactataatcagacaaaaaaagattgtactctatgacacatcctggacggatacaagaatgtccaatcttataaatgcatgccttgtttgattttctggggaatgtactcatgcgataaaaaggaaatggaatttgcggatagtgcctcaatctcaaacttgacacccttttgcagcattgcttccaactctgacctccattctggggcttccctgtgtaaatagcacctagcaagaatgccttcagctttcctcctatcttcaggtgacaaacgaagtaggcagcagtctggaaggcaatattcttcaaaatcagatgtgaaaactccaagccaccgtatatcagggacacgcaacaagtttgcatcatgtgccaattgcaaggaaccaaatttataggtagccagaatgtcgaaaccataaggatctgagtccactaagcaataagcaggcagatgcagcagttcaacaaggtaccgcaggaatcttcttgttggaatatctggatagcctcttcctgtaataacaatgcagcgatttctttcacagaacttgtcattggccaaacgctggaacactgtctccttctcaaccacaagtatgtagtgggcaacactaacaacatctttgattgcctcaatgtcaacaggaatggagaaagcagcattgacgcttgttatacaatacactttcttttcgccctccataaatcttatccagcccatcaccaaacctttcactacaggaaccacgttgagattgtgccggctgcacttgaagagtatgcagatatcgttgatggcacggtcaacaactgctacttctacgaagatggaggggtacatgtagtagatgtccctcttggagcagtgcttgttctgctgcaggaggtgctgcaccacgaacagcaccctcaggagcacattgaggcgggaggtgtggtagtccttgtggagcagagagaggacgtccgtgccgacggggatgtcgtagctgcaggcacatggggacggggacgcagagtcggcggaggagcaatagttccggtaccggtggagcactatagacggggagcggccggcggcaacctcttcgacgatccagcgcacaagccctttgatcctgcggaggaggagcgccgcttcctccagcctccgccgcaactgctgctcgtcgccttcgagcggcgccgctcgtcgcctcttatccctccccgccatggcgctagtttttttttttgattttttcgaagccgccatggagctaatccnnccggc

SEQ ID NO: 1769 - DNA, 1012 bp, Zea mays
  Clone ID: ZEAMA-23APR03-CLUSTER12262_3
atcgtcctccgctccagcagctgccacagagacatcagagagcggtcctccttgtgagtctgagctgaagaggaggaggaggaggaggagaagcagcagcgcagccggaggagggagagcgaagatgcgccgcgtcgcgctgttgctcgtcgccgccgtgtgcgcgctggcggcgccggctgccgcggtcgtcactgacggtcttctcccgaacggcaacatcgaggacgaccactcgccgctccccgcctggatgatcgtctcgtccaaggccgtcaagtacgtggacgccgcgcacttcgccgtgccccagggcgcgcgcgccgtcgagctggtgggcggccgggagagcgcgctcgtgcaggaggtccgcaccgtgcctgggtggacctaccgcctcgccttcgccgtgggagactcgggcgacggctgcgcgggctccatggccgccgaggcctacgcggcgcgcgccacggtcaaggtgccctaccagtccaggggcaccggaggatacaagcgcgccgtgctggacttcacggccatcgccaaccgcacccgcgtcgtcttccagagcaccttctaccacatgaagcccgacggcacgctctgcggcccgctcgtcgacgacgcctcgctcgtcggcctgcgcaagaagaagcccgcgcgccgcctcatgcagctcctgtaagcgctgcttccacgtgcactacgtccggacggaccgcgcaagcgatggtgtaatacggctggtatgtgttttttggtttggtgtgtgcgtgcgtggtatacgcgtgccgtgcgcgccctgtggctgtggctgcagtggcgtcgcgttgggtgttttcttgttgtgacgaagaaaaaagggtatgggttggggtggtccgctggccggcgcaccggggttttaatcaacttatattaacctgatgaaggtgaaggtgaaggtgacacgggattaatggcaaaaaaaaaaaaaaaaaaaaaaaaaaaaaaaaaaactcgaggaggg

SEQ ID NO: 1770 - DNA, 686 bp, Zea mays
  Clone ID: ZEAMA-23APR03-CLUSTER12267_7
accacctcccccattttcgccgccccctccgatctcgctgttctcgtctccttccgttggattagggctcttcatctgttcgccgcacttcgtcagtcgcccatatgcttcctcagctctatcttcattcagcacagcatttatgttagattaattaaaaaggcggatgaggaggtcactgatccaaaggcgctcctagaggattgttcaaaagcagagtaggggtgtgtcgcagtggtatgaatatcagaaatgtgttaagaggattgagaatgatgagactgggcacaaacaccgtaccggccagtactttgattactggaaatgtgttgacaagaatgttgcagaaaaactctttgagatgttaaaatgacaagaaaagttttccctacttcagttatccacccaaagttggtaataattgtatcacttgtgtgacctatagactattaaggcgctcaatatttgttagagaagttttgccacttgggtaacacaaattttccactgccagtttgcatttcatttctgctactagtattgaaccagcaggtttcctcctgcattgttggataaaaaatccatcgaatatttacaagattgtggctgattattaaatgctgtaatacccaaaaaaaaaaaaaaaaaaaaaaaaaaaaaagtactctgcgttgttaccactgctt

SEQ ID NO: 1771 - DNA, 2109 bp, Zea mays
  Clone ID: ZEAMA-23APR03-CLUSTER123122_1
tttttttttttttttttttttcaactacacaaaatttaataaatccatcataagagaaaaatagagaccacatatttgtcatcgttcaggtagaagaatgagaagcaccatgttgaagaggaagaatttgaagttgagttggactatcttcattgtattatttggactaataattgttattctgttactcaaagctcgagccgcacaagcaagaaatcttgaaggaggacggcaggtgcccagtcctcctgatgtagttggccttctccgatgtcctggccgcacgctcattgagcttcgcctcagcgctcgcccgcttctcctcagccatccgacgcgtggtggccagccggttggacagctcctcttggccccgtgctttcatctgatcagccttcatctgcattttcttcatctttgtctcggcttttctcttctcatggttctcccaggcctgtatctttacctcttcacgtttatacctcgccatgaacttggcccgttcagcctcatcccaggctgccgcgcgagactccagagagttcacgctgggcacatgaccagccacggggcgctcgtccccgacgcaagcgacctcgtctgctgccgctacctgctcggtcagcgtccctgctacaatggccgtggtcacgcccacgggcccttcctggcgtcttctcaccggggtggacgaccttgaggccatcgggctcagcgcaacgggcgtgcaggcgcgccggggcgtgggtgtcctggacggctccttgctggcgatgggggtcatttccgtccccatgtcccgcaggcacacggaccgcatcaccgcttggggcgagtcatgcagctgcaccatgcagtcgatcttcttggtttcctccatgtcgccgccgccctcggcggcctgcggcggtgtcgagggcgcggccaccaccatgctgtactccaaggcgccatccacgctgctgcaggacacgcggccgttctgcgaggccgagccgaggaggcgcctgtcgtcggcgttagagctcctaggcttgactctggcaccgtgggttccgtccgcgtggccgttcgacatgcccacaagccatttctgcgcgtcgtcccacttggacggcgtcgccttgggccgagccaacgcttgattcttcttgccatgcggccgcccgttggcgcccttgttggtggtgtagtctgagttcatgagagcgagtctgggctccagatccaagatttatccagaccaaaaatatgaatccccttttcaccgttccccacttttgtcgcgcatagcttaatggcaccaaatcagtatgaagttagaactttttcgattaggatgttctaggtaatggtctcgtgcattgccagatccttttcactgaaagcgattggaaaagagagacaggaaaagttgttgctgacctcggaatcaagaaagagcctgcagggtgacgatagcaggactgcaggaggatggctggctgagatcgactgcaaagtgcaaagtgatgaatggagaactactactctagtagtagaccgtattccttttttttcctttggcgttgggcgcaggagcatgcagcaggcaccgcggtactggtgtgcacatggcctactgatagggcttggcgctgaccactataggcactacagtacggggcgccattgccggacgtgtgcccttaaccggttgcattggctgccattagctcacccgctgtgtttgcgcccgccgcaagactcacccgcctgagggagggcaacaagatcgccactagcctcgccagcaaccaagccatagatagacgccgaggaggtcgccatctcgcgcgggtgcgtcgtcgtgttcacggtagccgtcgtgagaccattgaacggggccgccgcgattgactcttctccagcggatggcaagagatacggaggaacaagaggacaagtaaagttaaggttagggttaaatttttcgattaggatgttctaggtaatggtctcgtgcgaattcctgcagcccgggggatccactagttctagagcggccgccaccgcggtggagctccagcttttgttccctttagtgagggttaattgcgcgcttggcgt

SEQ ID NO: 1772 - DNA, 1610 bp, Zea mays
  unsure (1)..(1610): unsure at all n locations
  Clone ID: ZEAMA-23APR03-CLUSTER12322_1
acaaacggcttttccctaccctaagccccttctagggtcgccgcgttggtcggaccaccgtagcggtgggtggctcgccctggcaccctcgggccacggcttcaccgccggcgtcgaccagccctagacagtgcggatttctctacgttgccgccatggcggcgcagccacggcgaggcatgttccgccaccccaccggaaccgtcgaactcctcgtccgactttgcgtgggtatcgatcgaactggcgcccacgactttgccgatgctgccgcccaacataccgacgaggctcccgggcgtgacgaggaaggtccagcctcagcccgtggccatgacggctccggtggtggggccgcccctcttcgtgctgggctcgatgggcgacggcttcctgtcgattccactttccatgccggcgccgggcaccatgaccaggtgcatagacaccttagcggccgcgaacccggagacgcgcgtctcccgggtgacgtcggccacgacggtgccgttggcaccgaagacggcgaagaagagctgcatgaggatgagcgccagggtctcgccggcaggcgccagcctgccgagcggcgccgggaacgccgtggccaggaacacggccagcgccgtgacgcagggcagcgtgccgccctggagccccagccgcgcggccatgaccgacccggccttgcagatgatgaaggacaaagcgaccgccgcgccaccgttcagcaccgacagccgctcgccgtccttctgcggactcgccgtcgccgtcttgggctctgctgggatgtttgacgccagtgagaagagccccatgaagtagagcgccgagatgaggttgtccgctgcgacgccggcggcaaggacggacggcgtgaggcctagagcttccgagacggcaaacgtagttcaccgctccgccaatgtagctgcccatgagtgcagctgcgatcttccagctatcttggcccagcgatctcatggggatcagcagataggccaccgtcgtgccgattacacttgcaacagatccgagcaggaatgccttgaggaggtcgccggtggtgcggacgacgcggcggaggtcggcgccgaggagcagcagcgggacggcggccggcagcaggtactccatgacggcgtcgtgcgcgggcgccccgggggtgacgaggccgacggccgtggcagccaggccggccatgatgctgaccagcgccccgctgagcgcggcgccccacgacgtgttctcctccgcccatgtgccgaacgcggcggcggagaggaggaaggcccagtttccccagtggtcgccgggcgcgatggccacggcggtggcggcgggcgggcggagggcgtggcgaaggcgagtggaggaggaggaggcgcacttgtcgtggccgtggtggtgccggatggcgcaggtgtgtgagcgaggcggcggtccactgaggatgcgacgacgttgcggcggcgacagcaacggcgaggggtggttggagaggaggagctgagcctgagcggcgggtggcgccatgccgccccccacctcacccgaaacaaaatcctttttttcgattaggatgttnctaggtaatggtctcgtgc

SEQ ID NO: 1773 - DNA, 686 bp, Zea mays
  Clone ID: ZEAMA-23APR03-CLUSTER12323_5
aatttttttatttctcataccacgacatgaaaggaaaaaaaaaagatatatatgcactcagtgatgtacaacagtgtctatggcggcgggtggcgtgcggcgagccctcgtggcgctgcgctccggttccccgtctactatctctgcaacgctctcccgccaggcggcagctcgctcctcggagctggcgggtgcgcccctgccgcgcgcctctcgccggcgcctcgggatctcgaggtagcctgcctgccgcctggagcttttgaatctctagcggagcatttctattcttctccttggctcagatccggtggtgcagggtgccggttgtggcgctcggcggcgtgcagggttcgctgatgccgatgcacagcgccaccgcgtcggcgctgctcacctccatgctcgggcttaagcctgactcttggggttggctctccgagggatttgctacacctctataacaagacacaagagcctgatttttcgcctttgtactagaggattccaataacatttttacatgccttgcgggagtacgcccttggacttttgctgatggaatctgcgaccgaaaacttatggtcttatttccatgatatgcatcgatttttctcggattatctcttttttttcccccttgtatggagccatgggaagtatcaggatgtgttatctggagcatc

SEQ ID NO: 1774 - DNA, 1112 bp, Zea mays
  unsure (1)..(1112): unsure at all n locations
  Clone ID: ZEAMA-23APR03-CLUSTER12347_10
attaagactagctaactagcgtgaaagagctcctccgacgactactagctctcgcttgctccgacgacccctgccggccgcctctggtacaacgtacgagaggaagagagacgatcgatggccggcgccaccgtgaccgtggacgaggtgaggaagggccagcgcgcgaccggccccgccaccgtgctggccatcgggacggcgacgccgccaactgcgtgtaccaggccgactacccggactactacttccggatcaccaagagcgaccacctcaccgacctcaaggagaagttcaagaggatgtgcgncaagtcgatgatccggaagcggtacatgcacctgacgcgaggagttcctgtcggagaacccgagcncgcgctggaggacgcgttcgagccgctcggcatctccgactggaactccatcttctgggtggcgcaccccggcgggcccgccatcctcgaccaggtggaggccaaggtcgggctggacaaggccaggatgcgcgccacccgccacgtcctctccgagtacggcaacatgtccagcgcctgcgtcctcttcatcctcgacgagatgcgcaagcgctccgccgaggacggacaggccaccacgggcgagggcctcgactggggcgtcctcttcggcttcggcccgggactcaccgtcgagaccgtcgtgctccacagcgtccccatcaccaccggagcggccaccgcctgattcatcatcaacgatccaattcgtcgtcgtctcgttcgtcattattttacgtcgtccgtccgcaaataataatgtcgtgtgtagtaagtagctgatactatttttccatgtactgtcagtcgcacagtcatcatatataatatctctatatatgcatttcatgcaagaccagggtagagctagcttgaggagaagacccttatcgttgtcactttagcatgcatggggtggtgaggtattgggtatacctgtgtaagacaagcttggctggtttaattatatattttttttaaaaaaaaatctgtttgatacaaaaataacacctgtaatgtgcatggtgacggcaaattgaccgccattttcagtgcacctaaagctgtattggat

SEQ ID NO: 1775 - DNA, 1634 bp, Zea mays
  unsure (1)..(1634): unsure at all n locations
  Clone ID: ZEAMA-23APR03-CLUSTER1238_1
gtcgtcctaggtagatagccaccattccattgccccgccccccccgggcaccggcacgagtccatactatactctcgcgcggcgagctcctcgagctcgctccccgttccaagatagaaaaatggccgcggcggaagcagcctcctccgcgccggcgcccgagcatctcctggaggtggaggacgacgaggtgctgatcgacttcaagcccaacgccaagtgccgcgccgacctccgcctccgctccctgcacccgtccctccccgtcgccttcaaggtgcagacctcctccccgctcaagttcctcgtcagcccgccgcgcggcgccgtgccgccgctctcctcggcgtccctgcgcgtcgtgctccgcccgcagccgcacgcgccgccgtccttcccgcgctcccgcgccgaccgcttcctcgtcctgtcctcgctctccgcggcgcgcctcgactccgtgggaagcagcaacgacggcggcggcgggggcggagtcagggccgtccgcctccgcgtgttcttcggcgggccgtaccttctccgcctcgccgcggacgccggagacgccgnngccgtgcgcctcatcctgcgccggcagccgcacctgctgccgttcctggagcaccagcaggccgccgcggcgcccgacgccggcgagcatgattgggcgccgctgcacgcggcggccgccaggggggactgcggtgtagctgaggcggctggggcccgaggcgctggccgcgcgtgaccgcgaggggaggacggtcctgcacgcggtcgccgcggccggcgaggccgagacggtggcggtgctggtggacatgggcgccgacacgtcggcggtcgacgcgcgcgggaggactccgctggacgtcgcgcgcgacaagggataccaagaagtggtggacgtcctggaacggtggcagctggtgatgacggcggcgaggcgaggcgacctcgggagcctcgagtccctgctcagcaagcgcgccggcgtccgcgggcgcgaccagtacggcctcacggcgctgcacctggccgcgatcaagggccacggcgacgcgatcgcgctgctcgccgggccgggatgcatggacgtcgagtgcgaggacgtggaagggcacaggccgctccacctcgccgtcgagggaggccacgcggaggccgtggagctgctgctcgacatgggcgccgacgccaacgcccggaccaggcgcggcgccacgccgctccagatggcggaggccatggggtacgaggccatcgctcagctcctgtgcgcgagaggtgcggaggtggccgccgcgtcggcgttgtgcgccgcgtcgtcgtcttcatcgtccatatcgtgcgcctgattgctgccggtatcgtttccgctgctgctcctgctgtgcgtgagctgtgtggtacagtactgtagccgagagatgcctacaaccgccgtggctggctttaaagtaagaagcgaacccgtccgaaattgcactgtactgtatagtggtttgttctgctttgttgggagagtagctcattgttgagacggtcgattgctatacccagcgtgctggtggaaaaaaaaacatcgccatgcaattgcagtgctttacatgtcaaaaaaaaaaaaaaaa

SEQ ID NO: 1776 - DNA, 1506 bp, Zea mays
  Clone ID: ZEAMA-23APR03-CLUSTER12403_1
gcacgagaccattacctagaacatcctaatcgaaaacatgccctgccatgcatggtcagtgatctcctcctcctccttttcctctctctctctctctctttctctcactcccgcgcgtacctgttgggaaaaaaaagtacctactacagcttggctacagttttgataaactacacacacatggacagcagtcagcagcagcagaaacaagacgacgtcgacgtcgacgtaatggaggtcccggaggtccacggcgacctcctcatggagctcctggacgcgtccctcgccgccgagaacgctgcccaccaccaccaccaccaccaccaccaccaacagcttggtctagcgcccgacggcgacggcgacggcgactgttggatcgacgacaaccaagagaactacgacaatatgcacgcgcaccagggctgcgaggactgccgcggcctcctcgacggcatactgtccgacttcgacgactacgacgggggcccatcacggccgaggtccccgccggcgccgtaccgcgtcgtcttcggccacgacgacgacaccctgctggagctggagtgggcggaggaggccgccatggacccgttcgccaccagcgagtccgcggggggctggtacatggacggcctggtcatggccatggcgtgggacgagcagcaggacggcggcggcttcccgttcgagccctgctacggatacgaaggggaggcgggcgccgccgggcagctctatgatgccagcccgctgtgggagtgagagtgaagtagtgtacccggttacgtcgtcgatcacacgtgtccgcgtcgtctgggccgtgccgcgctgccgcgccggcctaactactcctccgtactttacttttgcgccgcttttgcaaatttttttgaggatatgaatttgctgaagagaactggacttgtgtgcctcttgtgctcattagtgttgtgtggctcagattatcagaagcattctagtttttgttctttgttttattttttttgtttgaaagctttgtgctaaatgaagtgcattgtctacattcaggtttgctttactgcctgcaggatgcgttcggatggtttatgctctcgaatcaaaaacagaggtcgtggagaatgtactgcatatacgagcactgttgttccgtgtttcaggcggagaacagctaaaaaccgggcatacagagagcctgcaagaataacagtgaccctcttggccttggagcatgcggagaatagcttgaccccggtcactggaaactgcgccgtctgcccccaccgcgcgaatcattgtacgtcgtcgtcctgattccgtcgacaggaacaggcgggtgatcgcgggtgaatgttgtttctgctcttgatgacatgggtgccgctcgctctctgccgtgcgtgaggggaagctgcgacataagcctagttattacattgtacatgttctgaataaacatcttaaaagattggagtcctaatataatatcccccccaaaaa

SEQ ID NO: 1777 - DNA, 1393 bp, Zea mays
  Clone ID: ZEAMA-23APR03-CLUSTER12459_2
accatttcccgggtcacgagtccacggcctcctcgctcgcggtcccgcgccatggcccgcgccaccaacgcccaccaccaccgcctccgcctcctcctctgcctctccctcgcggccgccgcgtgggcgcacggcggaggcggggactccgacgccgacgccgacgcggatgggggcgccgccgccaggccggacctgcgcgcgcgcagcctggtggaggccaagctgtggtgcctggcggtggtgttcgtcggcacgctgctgggcggggtgtccccctacttcatgcgctggaacgaggcgttcctcgcgctgggcacgcagttcgcgggcggcgtcttcctcggcacggcgctcatgcacttcctcagcgacgccaacgagacgttcggggacctgctccccgacagcgggtacccctgggcgttcatgctcgcctgcgccggttacgtcgtcaccatgctcgccgacgtcgccatctcctacgtcgtctcacggtcacaggggcgcagcaccggcaccgccgctaccggcggttctgatgcagggctggaggagggcaagatgagaaccacaaatggcacgaggtctgagcccacaccagctgatgcacacggatctgatcactcggccgcatccattctgcgcaacgcgagcacgatcggtgacagcgtgctgctcatagtagccctttgcttccactccgtcttcgagggcatcgccatcgggatcgccgagaccaaggccgacgcatggaaggcgctgtggaccataagcctgcacaagatcttcgcggccatcgccatgggcatcgcgctgctccggatgctgcccaaccggcccctcctctcctgcttcgcctacgccttcgcgttcgccatctccagccccgtcggcgtcggcatcggcatcatcatcgatgccaccacgcagggccgggtggccgactggatcttcgccgtctccatgggcctcgccacgggcatcttcgtctacgtctccatcaaccacctcctctccaaagggtaccggccccagaggcccgtcgccgtcgacacgccggtcgggaggtggctcgccgtcgtgttcggcgtggctgtcatcgccgtcgtcatgatatgggacacctgacctggtgagagacacgtagggctgcattgttgggaacttccgggggttgcttattgcacgagagatcgaatatggtgtagcagactctttttagcatttttttagcttattacgatcgtacatgtgcgttgctattgcaaaaaaattaacacgataattaaagtttagatatgtattctatgaaaaaacatttttttagtgtgatgtgtgtaacattcggtttgtaaccaatcatcattattatattgttagcaaaattggc

SEQ ID NO: 1778 - DNA, 1289 bp, Zea mays
  Clone ID: ZEAMA-23APR03-CLUSTER124794_1
gtctcgggctctcggctcggctcggccacccaacgggcaagacgacgagggtttttgccgccgccatggcgatccctcgagcacgtctaactcgcctgctcctccacttcggcagccggggctccagattcctagcgcaacccttctctacctcttcctccgcacacggcctcttcccctctctgtggccgacgccgtccaccgccggcgcgtggcggcgcgcgttccacgatgggcggccgcgagggccgctgtggcggagcaagaagctgatcgggaaggaatccctatttgcgatccagggcctcaagcggttcaagggggacgaggagaagctagcggatttcgtgcggcggtatgtggccagactgctcaaggcggacaagctcgccgtgctcggcgagctggaacgccaggaggaggtcgatctggctgtcaagatgtttaggatcatacaaaaggaggactggtataaaccagatatttacatgtacaaagacttgattattgcactagccaaatgcaagaagatggaggaagcaatggtaatctgggggaacatgagagatgagaacttgtttcctgactcacagacttatgccgaagtaataagaggattcttgagatatggctccccatcagatgcaatgaatatttatgaggacatgaaaaagtcacctgatccaccagaagagttaccttttagggtattgttgaagggtcttttacctcacccactgctaagaaatagagtaaagcaagattttgaagagttcttcccagaaaggcatatctatgatcctccagaagaaatttttggcatgcactgaggtatactcagtggcatgaatgtgtttatcaattggatggttgcgttgcaaaaaaaaaataaatgggcgaaaactgagaagctgattattctgatttctgatagacagattagttgtccatatcattgtgctatcctttgttgttcagccaagctcattaatactgggccatctattcaactcaaccagtacaactttgcatggttgcaatgcctgatcttatgagtagtaacagaaaaaaatgtgttcttctttgggcccacttgtatgattaggttgttagaacaatgtactggcgtctggctacattcatgtcgttccttccctaactgcatgagagacctacttcgcatgaacattgtgatggtacctcatttcgtgaccctgttgagtttatgggtgatgattattgttaaaaaaaaaaaaaaaaaaaaaaaaaaaagaaaaaaaaaaaaaaaa

SEQ ID NO: 1779 - DNA, 1472 bp, Zea mays
  Clone ID: ZEAMA-23APR03-CLUSTER12479_2
aattcggcacgaggcacccagcgacagacaacaactacccagtccgtcgtcccggcttccgtgcgggccggggtttcccacgagcgcgcacggcacggcgccgtctgcatggtcacgagtcggctggactcgtcctcttccctcgccgcgagctccgggttcccctgcgcatagctaggccaagccaggtataccccaaccatcgcatgggagccgcgactgccccgacgaagcggagacgcggccccagcaagacgcaggaggaggccatggcgcgcgcgagcccggaggcgcggcggcgaccgcggccgcgcctggtgggctatgaggagctgccggagtacctcaaggacaacgagtacatccgcgggcactaccgcgccgagtggcccgtccgcgacgcgctcctcagcgccttcgcctggcacaacgagacgctcaacgtctggacgcatctgggagggttcctgttcttcctagcgctcgcggtcgccggaggacggaaggaggccgccgacggtgccgctccgggtatcatgaggttcgttgtgagactagattcatggggcagcgaccatccgggccagccgaggcacgacgacgccggggcatcgctgcccagtgtgccgcggtggccgcggacggtgttcctggtgggggccatgtcgtgcctcgccatcagcgcggcggcgcacctgctggcgtgccactcgcggcgcgccagcgcggtgttctggcagctggactacgcgggcatctccgtgatgatcgtcgcctccttcgtgccgccggtgtactacgccttcctctgccacccgccggcgcgggcggcctacctgtgcgccatcgcggcgctgggcgcgctggtggtggccgcgctgctctccccgtcctgctcgtccccgcgctaccgccgcctccgcgcggcgctgttcctggccatgggcctgtcgggcgtcgtcccggcgctgcacgcgctctggctcaactggggccacgccgcctgctacctggcgctgggcatcgaggtcgtcatgggcctcacctacgccacgggcgcctggttctacgtcagccgcgtgccggagaagtggcgacccggggtgttcgacgtcgtcggccacagccaccagatcttccacgtcctcgtgctcgtcggcgccgtcacgcactacgtcgccgtcgccgtgctcatccactggcgggagaaggtggccgtcgcctgtggcgccgcgtcggcgtaggctcacctgtttggttggctcactcaacaaccattcgaatggcaaaccaagtagtcgcaacatagatcagctctagagtttgagtgtgaccttcgacgatttataatttaattgatggggtgattgagtatggtggttcattagttcatgagatttatctgtcgagtgagtgcgtgcctcagatttccagaccttttgtttccagcctactcaactttttgtcccgtc

SEQ ID NO: 1780 - DNA, 1452 bp, Zea mays
  unsure (1)..(1452): unsure at all n locations
  Clone ID: ZEAMA-23APR03-CLUSTER12479_3
agctcagtcacaactcacaatcacccagcgacagacaacaactacccagtccgtcgtcccggcttccgtgcgggccggggtttcccacgagcgcgcacggcacggcgccgccagcaaggtcacgagtcgggtggaggcatcggacatggccaccacgacggtgacgacgactgcggaggcggcgagcgcgcccgggaagcggcgcggcggggggtgctgcgccctcgcggcggcggcggcgagcgtcgtgcccgtgaaggcggcgggtgagcaggggcagcagccgctgccgctgccgcggctggtgcggttcgaggagctgccggactacctgcgcgacaacgagttcatccacgcgcactaccgctgcgagtggtccgtccgcgacgcgctgcgcagcgccttcgcctggcacaacgagacgctcaacgtctggagccatctcggaggcttcttcctgttcctgtacctcgccgtcgccgagccaacggggacggtggccggcggcgccggcgccggagccgccccgggtatcgtgacgttcgtgctcgcgtcggccaacacctcctggtcttcgtgggaggccagcagtaactcgagcttgacggccagcaagggtttgatggccgtgttcgggagcagcgacggcgacgcccacgcggtgccgaggtggccgcggacggtgttcctggcgggcgcgatggcgntgcctggcggtgagcgcggcggcgcacctgctggcgtgccactcgcgccgcttcacgcgcctcttctggcagctcgactacgcggggatcgcggtgatgatcgtcgcctccttcttccctcccgtctactacgccttcctcggccgcgcccgcacgcagctcgtctacctgtccgccgtcaccctgctgggcctgctggtggtggcgctgctcctggcgcccgcgcgctcgtcgccgcgcctgcgccacctccgcgccggcctcttcgtgtccatggccttctccggggtgctgccggcgctgcacgcgctgtggctcaactgggtacaccgcgagtgccacctcgcgctggcgctcgagctcctcatgggcctcgtgtacgccgccggcgccgggttctacgtcacccgcgtgccggagcgctggagccccggcaggttcgactgcgtcggccacagccaccagatcttccacgtgctcgtgctcgtcggcgcgctcacgcactacgccgccaccgccatcctcatcgactggcgagaggcgatggccgtcgctgccggcggggcatcggtgctctcgtgatccgtgactgcaaagcagcgcagtgtatatgtaggtgaagggggtactatcgattcgttcattctttgtacgcgacgtcgatttatttacctcaatcgaaatatttgttcggcattccagatgggaagtggcccaatataattgagtctgaaaacgtgcgccc

SEQ ID NO: 1781 - DNA, 984 bp, Zea mays
  Clone ID: ZEAMA-23APR03-CLUSTER12486_2
gcacgagaccattacctagaacatcctaatcgaaaaatgatcggtgcaaggcgagacgttggcgacataggaacaggaggcgaagaggcgacggtgcatagctccaatggtgaccctccccgtcgccttctcactatacttctggttgccccttcggtgagggttgccattttatccattactttcttagtggctaccaggccgtttaaaaatgaccaacctcctggaagtatgatgatggatgggtcacctacacccgtcgtgaagactcgcttgtgcaacaagtacaacactgcaaagggatgcaaatgggggacaaatgctactttgcacatggtgaaagggagcttggcaagtctatgatggacaactatatgccaccccaatcgaaccaagacccactggttattttgcgcctccacctatggcctaccctggcttggccactctaactagatttggcgcttctgccacaaccaagatcggtgttgatacgtcctttgcaggtagcatcattgggagggggtggagctaacacaaagcaaatatctttcgtcataggagccaagctggccatctgagaccatgaatcatacaccagcttgaaaacattgaacttgagggcacctttgatcagatcaggaacgctagcgctatggtcagtgagttgattgtcagtgttagtggcattgctcccccacaggtcaagaacccaactgatagaactcatcatggtggaggcataggaagcaacttcaagaccaaaatgtgtgagaacttgtcggtaaatgccactttgcacacagtgagagtgagctgcgcatgcctactgctgcttgagatccatgccttgtttcatacctcgtagtcattagtcaatgtaactctaaacttggccaccgatgatggatttgctggcttctttaggcctacgctactgaattggtgtcttcagtcctactattgaatttactgacttctttc

SEQ ID NO: 1782 - DNA, 1789 bp, Zea mays
  Clone ID: ZEAMA-23APR03-CLUSTER12502_2
gaaagctttgttcacagtagaaataatcagtttcaaccgcgcttacatatgtaaatatgtaatctcagacaagacacctatctaagggcatgaaccagcagctagagttcaaccccaggagataactgttatcaatggctaaacaagcaacaaaaacagacacgtgcatccggctagcttcttttgaaccggacatgggtgttgctggcggcgaatattgacgacgagaacctgtgtttcctagcaccgggtgacgcggtaccatggttgtgccttcgtgaggactggggagtgaagtagtcaccaccaccagacaagtactggtgattcgtgtaagacctcttgggagtagctggtgaaccccatccattgggtttgtacttcttcgatggtagatcgtcatcaccagtccaaccacccctccatttcgatttatgattagatgcgcccattctttcctcgaaagaggggctattgcttttgcttgttgtacaggcatcatgaggagctgatctagcactggaatctttcttccatttttccttcctccggatgtgtgatggtgacttgccatcgtttttccatcttcccttcctctgactgtgtggtgatgaccagccttttggcccatcggacttggcattcttcgtgcagccgcgtgcgaagtgaccttcctcgccacatttgaagcataaggttggggttgtgacagcactagcttccctgcgttgcttagcacatccctgttccagagaattgtcaaagaagtcggaacaacatagatggcccttctgattacacgcgtagcatcttatttgctcgatatcatctggtgggtaatcattggcacatccaaacatatcatgacctgtttctccacatcttatacataatgtggattgatgatcattcctcttgtgcttatcaggacaatccttcgccatatgccctccttttttgcagatgaaacagtcttgaccccaagtcaccaagtgataatccctcggagataggggggaccaacctgcttgcactgctttgcattgtgcccaaacaacccacaaacaaagcaaggcttcttccgctttcccattgggcagtttgcagctacatgtccttcctcgctacaattaaagcaagtatccaacaatgtttccccaggatcaaagtatcttggtatgcgaaggagcttccgcagaaacatactgtgagatgtaggggcatcaaccccatcttcagttagcaccgattctgctgtcccaatttgctcctcctgggtggtaccaacctccttctcttcctcgtccacggcagcccccgccgcagcagcggtcgcctccttccgatgcttcttcctttgcttccggcgctgcctcttcttctgcttcctccggggctcatccgcctcatcgagctccaccacggcgccctcctcgtcggcggaggacaccgaaagaaggtcggcgaacacgggcactccgccgcaggattccccgcgccgcttccgctgcgcgcgcgcgacgatctccaggctgagatcctcgttccccagctcgtcgtcctcctcgtcgcccccgctgtggcgcggctgccgggacggcggggaaccatcttcgtccaggtctgagtcccgccgcgccctcgagcgccagcgctcggccatcggcgttctgcggcggcgggcgaggggcagagaaaacctaatagcgcactcgatgtggaggaggcgccgacaataggatgggaaagccttcccagcgggtctccccgtctccggccggggtcgagg

SEQ ID NO: 1783 - DNA, 2670 bp, Zea mays
  Clone ID: ZEAMA-23APR03-CLUSTER1252_24
atggcgtcacacatcgttggataccctcgcatgggccccaagagggagctcaagtttgcactcgagtctttctgggatgggaagagcaccgctgaggatctggagaaggttgctaccgacctcagggccagtatctggaagcagatggctgatgctgggatcaagtacatccccagcaacactttctcgtactatgaccaggtccttgacaccactgccatgctcggcgctgtccccgaacgttactcatggactggaggagagattggatttgacacctacttctccatggccaggggcaacgccactgttcctgctatggagatgaccaagtggtttgacaccaactaccactttattgtccctgaattgggcccaaacaccaagttctcctatgcttctcacaaggctgttaacgaatataaggaggctaaggcgctcggtgttgataccgtgccagtacttgttggaccagtctcgtacctgttgctctcaaagcctgccaagggtgtggagaagggattccctcttctttcccttcttagcagcatcctcccagtctacaaggaggtcattgctgagttgaaggcagctggggcttcatggattcagtttgatgagcccactcttgtcctcgaccttgattctgacaaattggctgcattctctgctgcatacgcagaacttgaatctgtactttctggattgaatgtgcttgttgagacttactttgctgatgttcctgctgagtcctacaagaccctaacatccctgagcagtgtgactgcttatggttttgatcttgtccgtggaacccaaactcttgggcttgtcacgagtgctggtttccctgctggaaagtacctctttgctggtgttgtggatggacgcaacatctgggctgatgatcttgctacatctctcagcactctccagtctcttgaggctgttgttgggaaggacaagcttgtcgtatcaacttcctgctcgctcatgcacaccgctgtggatcttgtgaacgagactaagcttgacagcgagattaagtcttggcttgcttttgctgcccagaaggttgttgaggttgatgctcttgctaaggcattggctggtcaaaaggatgaggcttacttcgcagcaaatgctgctgctcaggcctcgaggaaatcctcaccccgtgtgaccaatgaagaagtccagaaggctgctgctgctctcaagggctctgaccaccgccgtgggaccaacgttagtgctagattggatgcccagcagaagaagcttaacctccccatccttcccaccactacaatcggttcgttcccacaaaccgttgagctcaggagggtccgccgtgagtacaaggcaaaaaagatctctgaggaggaatacgtcactgccatcaaggaggaaatcaacaaggtcgttaagcttcaagaagagcttgacattgatgtgcttgtgcatggcgagcctgagagaaacgatatggttgagtacttcggtgagcagctctccggttttgcgttcactgccaatggctgggtgcagtcttatgggtcaaggtgcgtcaagcctccgatcatctacggtgacgtgagccgccccaaccccatgaccgttttctggtcgaagacggcacagagcatgacgtctcgcccaatgaaggggatgctgactggcccagtcacaatcctcaactggtccttcgtccggaatgaccagccgaggtttgagacttgctaccagatcgctcttgcgatcaagaaggaagtcgaggatcttgaggctggtggtattcaggttatccaaatcgacgaggctgcactgagagaagggctgccgctccgcaaggctgagcatgcattctacttggactgggctgtccactccttcagaattaccaactgcgagatccaggacaccacccagatccacacccacatgtgctactccaacttcaacgacatcatccactcgatcatcgacatggacgcggacgtgatcaccattgagaactcgcggtccgacgagaagctgctctccgtgttccgcgagggcgtcaagtacggcgcgggcatcggccccggtgtctacgacatccactcccccaggatcccgtcggctgaggagatcgccgaccgcatcgacaagatgctggcggtgctggacaccaacatcctctgggtgaaccccgactgcggcctcaagacccgcaagtacacggaggtcaagcccgccctgaccaacatggtctccgccgctaagctcatccgcacccagctcgccagcgccaagtgagcaccttttttttgcctttttcgtttccgaggagggcgtcgtcgatgccaatttgtttccaataaacagggctgtgcccgccgttctgttgtactccgtctgtggttaggttagtagttttcttgatctcgcccccacgcggtacctgttttactactctctgtttggtggtttctgaggcaagttgcccgtgtacttgtatcgtaaaaaccgagtgggacatctgcatcgtttcatctgccaccactcccccgaggtgtgctgtttcacggctcaaagaaagatgtcgtatcggcaagctaaatgctccactgtgtgcaactatatacacttgcattgccaggttttttaatcaaaaaaaaaaaaaaa

SEQ ID NO: 1784 - DNA, 1470 bp, Zea mays
  unsure (1)..(1470): unsure at all n locations
  Clone ID: ZEAMA-23APR03-CLUSTER1254_3
actcgccattcctaagtcctaactacctccanccccgcacgcacaactggccgcgccaaggcaaagctagaagaagacaacgcaaagggagaggacagaggaggagcagaggacgatgggcagcggcggcgctaacactgcccccctcctcaccccctacaagatgggaaaattcgatgttacccacagggtagtcctcgcaccactgacgagacagcggtcctacggcaacgttccccagcctcatgccatactgtactatcagcagagggcgactaaaggaggtcttctgatcgctgaggccacgggggtttcagacactgctcaagggtacaaggacactcctggcatttggacccatgagcaagtcgaagcatggaagccgatcgtagacggggttcaccagaaaggagggatatttttctgtcagatttggcacgtagggagagtctccaattccacgtttcagcctaatgggcaggctccaatttcaagcaccgataagccactaaagcctcaagtgagagccaatggtatagacgtggctactttcgcagttcctagacgcttagagactgatgaaatccctttggtcgtcaatgatttcagggtagctgctcgaaatgcgattgaagctggatttgatggtgtcgaaatccatggagctcacggttacctgattgatcagtttctaaaggacggggtcaacgaccgcacagacaaatacggtggcagtctggagaaccgctgccggtttgcactggaagtaactcaagccgtggtcgacgaaattggagctgacaaggtcgggataaggctgtcaccattcgctagctactcggaggcgccggactcggacccggaagctctgggcctgtacatggcgaacgcgctgaacgagttcgggattctctactgccacatcgtggagccgcggatggtgaaactcggtgaaaagttcgaaaccccctacagccttcgcccgataagggacgctttcaggggaacgttcatcgttgccggcggctacggcagggaggatgggaatcgagcgatctccactgggtatgctgatttggtcgcgttcgggcgcttgttcttggctaatcctgacctgcctcggaggttcgaagtagacgctccccttaacaagtacaacagagacacgttttacatccctgatccggttgttggatacactgactacccatttctttcgtcagatgtataaatgttctcttttcagcaatctgctttttagattgtgtagtaactggttggtgtaccagtaaattattagaggaataaaccattggtctgaatgcctcattctcatatatatggacaaaagcaatatgatcgttgtaattgtgcctcaaatcttatagttgtaaaaaatattgtgaagaagctcagtcagttgtcattgtaaaaaatattgtgaagaagctcagtcagttgtcaagttgt

SEQ ID NO: 1785 - DNA, 1109 bp, Zea mays
  Clone ID: ZEAMA-23APR03-CLUSTER12572_1
aaaaatcacacccagattctttcgattctttcacggttccacctctcccctccctctcgtgctcgatccatcgccgctgcctaatccccatggcctcagcgaacaacgacaaccgcgagcggcgggcatcctgcggctgctgatggggatggcggcggcggcgccgcagcggcattggcttcgtgggcggtctgcacctctcccgtccctctcgtggctcgatccatcgccgctgcctaaatccccatggcctcagcgaacaacgacaaccgcgaggcggcgggcatcctgcggctgctgatggggatggcggcggcggcgcccgcctcggcattgcctcgggggggcggcggcggcggcggcggcggcctgatggtggtgcagcacgtcatcctcgacgtcgacggggaattgttctcgggcggggtcggcggcggcggcgtgccgccggcgtcgaaggccgcgatcgccgcgctgaaggaggtgaaggccggggagggcgagggcgagggcgaggacgcgctgggcgagtgcgccatctgcctggacgcggtggagggcaccggcaaggagatgccgtgcgggcaccgcttccacgggcgctgcctggagcggtggctcggcgtgcacggcaactgccccgtctgccgccgcgagctgccagcgccggccaaggaggaggaggaggacagcgcggcgtcggcggagggcggcgaggaggagaggcggaggcccagggccgcggtcgtcgtcagctacctcgtgttcggaggcgggcgggcggaggcgcagcaggagccggagagggaggagccgtggaacattagaatagaggatgtggattagcattggtcgccttcccattggttttcagattggtttgatggcggaggaggttatgtacatactagtaatgtcatgaacgctggaaatgggcgaagggggaatttgtgaatatttcgggagttcaatctgttgatcaatgcttatattgccattaagcactattcttttgaaaatgagcagcggtttgcttctcagctgttttgatgctattctagaaagtctcgaagatgggcaggagtttgttcttctgccgttttgattgt

SEQ ID NO: 1786 - DNA, 1443 bp, Zea mays
  Clone ID: ZEAMA-23APR03-CLUSTER125908_1
aatcactctgcgaaaccgaattggccaaagcccgctacgccctcgtcatcgtccaatgagaccgcccccacacagtttcgtcttcctcttctccgaccccgaccatggagccggacgccgatgaggactacatgggcgacctctcccgcttcctcccgccgagtccgtcctcctccccaccgaacaacctcgggcgccggcagcagctatccacgcgggcgcaggcgcaggcgccggcgcagcccgagggcgaagcgcgggaagggtgtgccgtggcaggagcggcggaggcaggagcgcgagcggaagcagcgggaggaggacgcacgcacgatggccgggctcgcggaagctatccctgagagcaacgtagggttcaggatgttgaggcagatggggtacgatcccgactcccgcgccggcgccggtggagaagccccgggaggtgtcggagcgggagcgtaggcagcaggaggagatggcggtagagctaagggcgcggaagagcacgcagtggaagggccggagggtggtgtgggactaccgcaaggccgagagggcactcgcgcagctggagaaccgggaggtggagccacaggcaccggagggggaggacaaggagaaaggggcagaggaggaagaggatgtgatcactgaagaggatttgcagcaaatactgtctaagttgcgtgatcagtaccagtattgcctttattgtggatgcaaatatgaatcaccagaagtgctgtcaaaggaatgccctggtcctgatgaggatgaccattgatttgttgtgtgaaggtgacaaataattgtctttgatacaaacaggtggtctaagttgcgtgatcagtaccagtattgcctttattgtggatgcaaatatgaatcactagaagtgctgtcaaaggaatgccctggtcctgatgaggatgaccattgatttgttgtgtgaaggtgacaaataattgtctttgatacaaacaggtgcttcgatgcttctatacttcccaagtcactaggatgattagggtattggtacccttcacattcttgagaagcttattgcagtgataaatatatcgatatgaaaattgaatagtatttgttcttcgtcggcctggaaaggtgggagtggatggaaagccacaaggagcgtctgcatatgacatgctatgcagcaaaactgaagtggagctacatcttcagaaatgcctcatcgaggcaccaatgcacttcagagccagaagtgaaatgttgccggtggtgaacaagcaaacttgattttgatctgtgataatcagataacattttgtatctgctttccactgagcgagagagggggctatactgtggactctgctcattttgttgtcagaagagaagaattggattcccaatacattggagcacaaactttgtggttaactttgtggtttgtgc

SEQ ID NO: 1787 - DNA, 1721 bp, Zea mays
  Clone ID: ZEAMA-23APR03-CLUSTER12624_1
aactgcttcttgcggtagcgactagcgatcgacccaacttcccacccgcccccgcgtccgcgagctcgccgaagctaaggccgaagggtacccgccctcggcgctatgtcgctgtcgccggcggacagcgcggcgtactggctgcggtggcaggtcctcgtctacggcgcgctcatcgctttccccgcggcggccgcggcggcgctactgccgcggctgcggagcgcggcgccgcctctgcgcgcggccgacctctgggtcccctgctgggcgcgcctccacccgggttggctcctcgcctaccgcgccttcgcgttcgccgcggccgtcgcgctcctggcgcgcctcctcgtcgggcacggcctcaccgtcttctacttctacacccagtggacatttctattagtcaccatatattttgcgtttgccacagctatatcagcccatggctgctgggtttactcaaggaaaagtttgaggaaatccgatgaatcccatggatttcttaatgctgatgtcgaaaatcgtgatgtttccaattctgtttctggagagaggaaaacagatgagacaaatatgatgatgagctattatgaacaaatagtgaatgagagaagagcagggttctggggccggtgcatgcaaatcatatatcagactagcgcaggtgcaacaatgttgaccgatgtcacattttgggggcttcttgtgccatttttctaccgtgacaagtttgggttagcgttggtcactgatggcatgcactccctaaatgctgttttttctacttatagacacagttctcaacaatatgcccttcccctggtaccgaatggctttctttgttttctggagctgcgcctatgtaacattccagtgggttcttcatgcttgtggaagcttatcctggtggccatacccgtttctggacctttcatcatctggagctcctctatggtacctcggcatggcaatcgctcatatcccctgcttctttttgtattggttggtcgtcaaggcgaagcacacttatttcccacggatgtttccacatgcttatgttaggacagtatagatctaaatatcagtagcatactatttcaacacctgcttggctcaagtgtacacccgtatagtctcattgaattcgccgcacctttgagatgggtctgagctctgaaaacaagccggtaccggcggcttgatcaatgaaatgcagaggttcacaatcacctggaaacagagtcttgtcctgtcttgctccttctcttgtaaagcatgtaatcagccacaactactgcatctgttcgaaccctaaacccttaaaatactgcagttgttcgactgctgtagttacaatctatacaaataaaataccgtacacaaaaaaaaaaaacgctagagacactgacctagagtcctcacatcgtcatctcgatgttgaggctaggtatagccaaagacgtcggataggaggtccgagacttcgagagcctgtcgtggaggtctatgatattgaagagtttctcgggaggcgaccgatgctgatggcctcggcgaagctgaagaggtggagcgcggcgccattaccaagcatcacaatactcgttgagctttgaaaccaatttacacgataagttgagcttcaaatagaatgtccttctcgaatgtaaagtaaacataagaacacacctgagaacgatgtccttatcgactttact

SEQ ID NO: 1788 - DNA, 1506 bp, Zea mays
  Clone ID: ZEAMA-23APR03-CLUSTER12642_3
tcaaataggaacactcttcaacagtatgctcaaggtccaagtgaccgacatatggatcaaatgtaccatggatccaattttcagcagtaattcaagatttgccattatggcattatctaattattgtttgtagtcatccagtctaatctctgatctatacaaaaatatctttgacatatgtttcttgtctgctttattctttcagggatactggcggtactactccctctaattattttgagggagacagaagagtagatggtgactcacagttataccaacctgatggtgacgctttacctggtattgaggggtttcaaattgctggtgaacctagaccaggatttcaattaacagcatgcggttttcctactaatggtactaccctttgcaatttccaggtatattgttttctgaacttttgttgctattctttataattgctataggtgttaaatcttgtaaataaaacctttcatcccattgatgttgctgttctagtgggttcgccatcttgaaaatggtaccagacagtctatcgaaggtaaagtggggaatttatcctagatcctatggcatattattgttcacagataatttaattttgttgactagttctttgtattttgaaatttaggtgccacgatgtatgactatgtggtcactgcagatgatgttggtacttttcttgctgtagactgtacacctatggatgataatggccgccagggtgatttggtgacagaatttgctaacaatgggaataagataacctgtgatccagagatgcagagtcatattgatgcatatatttctaatgggagagctgaatttgaagtttttgtcctggcttattctcctgaggagtgggaattggctacattggtgctaacacgacctaactatcagattaagttcaaaaagaccggtgaagctataattgatgagaagtactcacaaagtctacagatgaaaattccaaatgggcgcacaactcaatttgttttagtaactgcgggtgcaactctcccatttaacacacagggaatatcagagccaaacaacgaggattacgatgttaggttacgcgatctaatcgtattagtcatgagaactttccagaaaaaggctttagatgccaaaaggaaagtcaacacttagaatccatgttgatctgttacaaaagattctatgtaaaaccgtagaaaattttcctatttttgattgttttgtgcagtattcgatgatttttgttcttgaggtggaatgagcttctcgatagagcaggaatttcaagagttacctggtgggcacataaatggttagaggaacgtaggatcgattcttatcctaattcttttttcccccccattgcttactctaagttaagccatgtcactgcggtctttgtaaattctaagcagccagtgctgcaaataaacctatgagatgttcgctgcagctcttggatgacttaacatgtccatatgattgttgattttgttt

SEQ ID NO: 1789 - DNA, 1963 bp, Zea mays
  Clone ID: ZEAMA-23APR03-CLUSTER1264_1
atcagacacctctctgttccgacaggtatggctgcaacgctcccttcaccagccgcaggagcatcgccgctgctgctccactgcaacgccgccccttccgtctccttccgccaccgcaggcgttggcagcggccggctgctacacggcacgatgcccgcgtcgcgcagctgttgctgccggttgcgcgccgctggctgccggaagcagcgcctcccggagtcaatggcgcgcgcggaggcattgcggcgtcggggtcaggggcaggggcagcggctggggaggcgccgtacagaggcaacgaggggcaggggtcgctgtggatggtctccctcgccacggcggtggtcgtgtgcggctccttcgagttcggcacctgtgtcgggtattctgcgccgactcaagctggaattgtgagcgacattgggttgtccaactccgagtatggtgtctttggatctgttttgacaattggagcaatgattggtgctgtgactagcggcagcctggcagacattcttggacgcaaaatgaccatgcgatttgcagcagttgtaggcatttttggctggcttactgtatattttgccaaggatgctatgatgctctatgctggaagagttttgctggggtattgtactggagttctttcctatgtggtgcctgtgtatatatctgaaatagcaccaaagggtatccgaggaggccttgcaacctcaaaccagttattcatctgttcagggtgttcagctgcttacattattggagcacttgtttcatggcgctgtttggttgtagtaggattaataccttgtgctgtcctattagttgggcttttcttgattccagagtctccaagatggctggccaaaataggaaaagaaagagaatttcaagcttcattgcatgagtttaggggggaagatactgacatttctgaagaggctactgagaacaaagttatttaatctgaacatagcttccatttatcaaacaatgttgaccgatattcaaactaaacattctatccaggatatatatagaatcagttcgtcgattgcctaaggccaggattcaagatttatttcagagaaaaaatatgtatgcagtcacggtgggtgttggcctgatgatttttcagcaactgggaggaattaatgccttaggtttctatacaagctatattttttcctctgcaggattttctggaaaacttgggaccaccttgattggcgttattcagattccaatcacattcttcggggcccttctgatggataggagtggaagaagagcccttcttttggtctcttcatctggaacatttcttggctgctttctgactggactatcattctattttaaggcacaaggactgtgcacacaggctggttcctactttggctctttgtggcatactggtatactatgcggcgtactcagttggaatgggcccagttccttgggttatcatgtcagagatattctcaatcgacatgaaagcaatcgccggagggtttgtaaccctggccagttggattggttcctttgcgatttcatactcattcaacttcctcatggattggaaccccgcaggcacattctttctgttctctgcagcgagcctggtcactgtgctgttcgtggcaaagctcgtgcctgaaactaaaggaagaacactagaagagatccaaacattgctcaaagccacatgagtggctaccattcgctcagtaggtaaagatccagttaaaaaaatgctgtaaatattcgcctcttgtaaattcttgtgcacggcaggtgaatgatttcgcctcttgtcgattctcctatattttagtctctttgatatatgttatttaggacaaagatacggtctacaacatatgcttatcttcaactatttcattttctgagttttttctctgctactatacagcaccagtttcgacggttgtcttatag

SEQ ID NO: 1790 - DNA, 1779 bp, Zea mays
  Clone ID: ZEAMA-23APR03-CLUSTER12719_1
aaacgcgatagcaaccggcaacggcaagcaaccatctgggcactcggctctcccccctcccacgctctgctctccgcagcaagccagcaaacagtctcccgtgccacctcagcccgctgcctgcgaccttctcccttcactcccctcgccgacggagcaaacggcgatcggaagtcgagcgccgtcacctgagggacagatggcggcggcggaggggcaggtgaggcgggacatgtgggggcaggagtatcggacgtcatccgccgacccgacctgcgccctcgccgccgcgcacgccgcgcaatcagtcgcccccagggaccccgcgggggccgccgccttcctcaacgccgccgcggacaacctcgggaaagcaacggagtacgagagggccgttttcgggacgctctccgtgctggtgggcgagaagagggacgaggaggtggcgatcgagcggcacttcgagcttctcgagcaattccccagggatctcctgtctctcaagagagcgcagctcatctgcttctatatgggaaagccagatttgtccctgaaattcgttcaacaagttttgccaaagaatcaagatcagaatttcatatatggcatgcttgccttccctttgcttgagcttggacggatggatgaagctgagagagctgctcgaagaggcttggctataaacaagaatgacttctggtcacagcataatttgtgccatgtttttcagcaggaatgtcgtttcagagaagctactgagttcatggaatcatgttctccgtcatgggaggcatgcacatcatttctgttaactcacaactggtggcatgtagctgtttgttacttagaagctgagtcccctttgtgtaaagttctggagatatatgatcacaacatcatgaaggaacttgagaaaagtgattgtgagacagcagaggtgtatttgaatggtctagggttgctgctgcgattattcatacgcggtcatatagattcagctaaagagaggttaacgacattgctagatgcactaaagaatgagtctacatggcatgtggaatggctccttgacttgcttatattgtgggcactatcaagtatgggtgagctaaaaagtgcacataatatgttggaatcattgaagtcaagggtacgtttaatggacaggaatcggcagcaagcgatgcagaaggcaatcaagctggcggaggctgcttatgaatatgggaaaggagatcacatgaaagtctatgacactctgggtccagactttgatgcgcttggttataaaatgattggtgcatcagatgaacaagtggatgtcttcaatgaagtttggtacactgttctaataaatgctggagaaacttccaaagcaattgagattcttggcaaacaaattaggaaacgagagggtgcacctttcttgtggcgcttgctggagaaatcatactcattggctggcagaagcgcagatgcttcagtagcatctaaaaaggcaaatgctctgcaatcctcttacttccattagctcatatcttgttgaataatgaatagccttgtttctggaaggtcttgtaacttttattttactgatggaagttaccagtatgcaccataggaagtctacagtcagtatatataccgcataatcaacagtttcagaatactggaacatgtgccgtgtatcaatatgtgcgtacatggaagttttatgttcagtaaccttatgggtatagatatgacatatgtcaaattgtcgcaaaaaaaaaaaaaaaa

SEQ ID NO: 1791 - DNA, 872 bp, Zea mays
  Clone ID: ZEAMA-23APR03-CLUSTER12744_2
agtcgtcacgaccatgatttggtaactgaagcaacaggaagccggcggtgtaggcgacccatggcgccacagaggaggagagagagggcggtgggggaggcgcggccgagctcgtcggcgccgacaccggcggggccggggtgggtcgaggtgcagcgccggcgggtgggcggcggttggacaagccgccggatctctatctacgcctcccgagtctacttcctcctcctgatgctccagatcccgctcttcagggttccttgtagagcaggcacatgcacaactcctattcaagtcacatcgtctcagttggtgtcaaacgagatattcccaccagctgttgtgaaggccatgctctaccctggagctatcgtgagcagcctaactaaaagcaaggcatttccgagttggagtgacctgtttgacatgtacaacctgacagaagccaaaaatgcttctgctgtagttgatctccagcgtctagagatacttgcgggaagctacttctgtgttgctggagggcttcttggcatcataaatcctgggaggatgactttgtttggtactcttttggttatctggggtctcgtgaaggaagcactatttgggaagccagtgaacagcgatccgactgaatcaagttatgtctacccaaccattttgattgcacttatatgtgctttcatgtcaataacttacaatgtaaagaagacagcagcaagtagtcctgtttctctcgcgaagccactgaaaagttctgccaagtcaaaactgaagtagaccctgttacaactttaatccttgtaactcattccagaatatttatttatccttgtaactttcaatcctatagcattcagttttttccttgt

SEQ ID NO: 1792 - DNA, 1189 bp, Zea mays
  Clone ID: ZEAMA-23APR03-CLUSTER12749_2
atctctctctctctctctcttcctgcgcccacacgcacgtttccactccgaccgggccagagccccgccgggcagtttccgttcgctgttgcgatccacctcctgcctgcacatcccctcccccgagttcgagccggagggccgaagagtagatctgcggcggcggccagaggatggccgtcaactgggagctgcggggctgctgcgaccacgaccagaggatcttcatcgccgccgtcggcgtctccaccgtcgtcatcctcctcctctggaggacgttcctgctcacgccgttcaagctcatcaccgtcttcctccacgagaccagccacgcgcttgcctgcaagctcacttgcggcgatgtagaaggcatgcaggtccatgcgaatgagggtggcgttactcaaacccggggtggcatatattggataatcttgcccgctggatatctgggttcatcattttggggaatggtcttcatacttgcatccacaaatctcctcactacaagaattgcagcgggttgtttcatacttgcattgtttattgttctttttgttgcagaaaatgtaagacttgtttgaattgtgcagtggtttcttcgctggctctgccttggattcatattgtgttcattgctgttgtttgggtcatacaagaatttacatctttccatattctgaaatatgtgatcttattcataggtgtgatgaacagcttattttcagtttacgatatttatgatgacttgatatcccgaagagttaacacaagtgatgctgaaaagtttgctgaaatctgcccttgcccctgcaatggttttgcatggggtgttatatggggattcatctcgtttatctttctctgcgcttcaatataccttggactggtcatattgtcttgagggttcgccattttgatctgacaatcgactctggttggctttttcgaagcttcgttgctcgaggttttggttcaagcttacatggttctggtggttgtacagtatacatgtgcagggtaaacatgtacatccattataagttaatttcggtggggattattcatgggattcttcgattttagcggttctatagataccattgctcatttatggtctgtagcctcattgctcatttgaccaatttgaaatcgtattcagaaacgccatattcttcgatttacaggt

SEQ ID NO: 1793 - DNA, 1165 bp, Zea mays
  Clone ID: ZEAMA-23APR03-CLUSTER12767_7
atcaacaacgatcgtctgctctgcttgtgctgctggaattcgccgcggtggcggtgccggccatggccagcacggtggtggccggcatggtgttctgcgatcagtgcaaggacggcgccaggggactcttcgactacccgctctacggcgcccgcgtggccatccagtgcggcggcggcgacaccccgctgacggtgcgggagagcaacaccaactggttcggcggcttctccgtccgcatggagggctccccggacatgaaccgctgcacggcgcgcgtcgtccaggggacgggccactgcggcgccgcgtcgtcatcaggtggcggcgccgtgccgcgcgagctcaccctcgccttccgcatgctgggcctctcgctctacaccgtgccgccgctgctctcgcaaccggaggaggccatggacttctgtccggggcacgaccacgacaggttcaggcggggcaggccatcttcgcaggcgcaggcgccggcgccggcttcgccttcttcctcgccgctcccgccgcccttcttctggcgccggaggtcaaggttcctgccgcccgtctggcgaaagccactaccacaaacattgcagccgccgccgccgcctccaacgacggcagcatcgcagggctcctccgcctgcacctacgacatgtggtcgtcgccggagcaccgctgccactggaaggtagtgaccccgaacacgacggtggccatggcgttcgggcccctggcggcgcagcggtacgggtcggagctgacgctcggggaggcgctggaggggcgcggcgacatgtaccgcacgctgctccgggaggccacggcggcgctgctcaacgcctactacaacgcccccgggggtcccttcctgtacccgaccacggccagcgtcatggaccacatgaacggcgcgctcctcagctccgggcagagggtgctcctggagggcgcgcggttccgcagggccaacgcaggcggcggcgggcggacaaggctcatgtgcgacttcacgacatgcagctgagctgaggattattactacctacctgttgatgatgaatgatcatcagatcagaccagtagcagtagcagcagcgcagcaaatgtttctaaaaattgcacggcgcgcatatgtagcactctgtcgtcgttttattc

SEQ ID NO: 1794 - DNA, 2145 bp, Zea mays
  Clone ID: ZEAMA-23APR03-CLUSTER12770_2
aattttccgttgggcctcgcttccgatgcgccggagctcgcacgcgatgggagcgcaagcgtttcggctgctgctgcttctgctgctcgcggcggcggcggcggaggcgcgcttcgttgtggagaagaacagcctgatggtgacgtcgccgacttcgttgcggggacgacacgacagcgctatagggaacttcggaatcccacagtacggcgggagcatggcgggcgccgtcgtctaccctaaggacaacgccaaggcttgcgacgatttcgacggcaggcaccccttccgtgccaagcctggcgcgatgcccacgttcctcctcatcgaccgcggtgagtgcttatttgcgaagaaggtttggaatgcacaaaatgctggtgcctctgcagtacttgtagttgatgacaaggatgaaccattgataacaatggatttacctcgtgaagatgacgaggcttcaaagtatatacaaaacataaccattccttctgcattaatagatgaaaaatttggtgaccagttgaagaaggctgttaaagatggggaaatggttaatgttaatcttgattggagggaggctgttccacatccagatgaccgtgttgagtatgagttatggacaaacagcaatgatgaatgcgggcctaaatgtgatatgctgatgaattttcttaaggaatttaaaggagctgcccaactacttgagaaaggtggctatagccaattcacgccccattacattacttggtactgtcctcaagcatttgtgatcagtaaacaatgcaagtctcaatgcataaaccatggaaggtactgtgcacctgatccagagcaagattttagcacaggctacgaaggaaaggatgtggtggtagagaacctcagacagttatgtgtgtttaaagttgcaaacgaaaataagaaaccatgggtctggtgggattatgtgactgattttcacataaggtgtccaatgaaggagaagaagtacaataaaaaatgtgcagaaactgtcatcaaatcactaggtctggatgtgaagaaggttgataaatgcatgggagacccaaatgctgattctgaccacccgttacttaaaatggaacaagatgctcagattgggaaaggttcaagaggagatgttactatattgcctacacttgttgtgaacaaccggcaatatcgagggaagcttgagaggaaagctgtcctcaaagctatttgtgctggttttgaggaaactacagaaccaaatgtttgcctgagtgatgatatagagacaaatgagtgtctgaatgacaacgggggctgctggcaagacaaatctgctaatgtaacagcctgtagggacaccttccgtggtagagtgtgtgaatgccccactttcaatggcgtacaatttaaaggcgatggctacagcaattgtgaacacattgatgagtgcaaggagaaaaaagcttgtcagtgtcctgaatgcaactgcaaagatacatggggtggctatgactgcacttgcagtggtgaccttttgtacatcagagagcatgacacctgcataagcaagacagcagttcaggctaaagcagcatgggctgcagtgtggggtatcttgatagttgttgctgttgtggcagcgggaagttatgttgtgtacaaatacagactaaggtcatacatggactctgagattagagctatcatggcgcagtatatgccacttgacaatcaaggagaggtcccaaatcatacacatgacgaagatcgttcataagtgtgcagatcattacgtggtgggcccatatggcctaatctgacaccaatgcagatcgtcgtgagctctacaaacagaagctacaggccaataatagcttgatttttagagtacaaaaatctgttatttgcctgatagtttatctggagcagtttcattttacatatgactgtaatttgtgagaatgtacatcttacgatttttgttgaccagtattcataggtttttagttagcaatgtgttgttggcccgttgctagtccttgtaatacaagcccacctgtttttttgcgcacggcaagacttaaactgacaacattttgtagtaccttttattttgtatcacctgctctatacacgagttttcttggt

SEQ ID NO: 1795 - DNA, 2094 bp, Zea mays
  Clone ID: ZEAMA-23APR03-CLUSTER12785_2
tcgcattcgcatcgcctcgattccaccaacccacctccgtccgcctccgagcaccaccaaaccctagatctcgcaccggcggcagccatgtccaagccatggggcagcgtcggcgccggcgcgtgggcgctggacgccgagcgcgccgaggaggaagagcgcgagcaggccctgacctttccggcgcccgagccgcccttgcccgcggccagcttcccgagcctccgggaggccgccgccgcgggcggcgggggcaagtcgaagaagaagaacaagggtaccacgctgtcgctgtccgagttcaccacctacggcgcggccgcggcccagcggcgcgcggcgcccgtcgagcccaagggcctgacccacgatgagatgctgctgttgcccacggggccccgggagcgctcggccgaggagctggaccgctcccgcgggttccgctcctacggcggcggcagcggcttcggcggccccgggggagagcgccgcagcggcttcgacgacgaggaccgccgcgggccgggcagaagctcggatcttgatatgccctcccgcgccgacgaggctgacgactggggcgccaccagaagtttaccccggctcccacagactctggccgccgcgataggttcggcggcccttcccctctcggccgtgctgatgatattgacgactggtcgcgcggcaagaagccgctcccggcgcgctaccccagtctcgggtctggaggtggcttccgcgactctccagccttccgcgactcaccagctgcttctgattctgaccgttgggtccgtggcgccacccctttgccacacaacggcgagggggcgggggagaggccgcgcatcgtcctgaatcctcctaaacgtgatccgttagttgcctctaccccacctgctgaggtggcccgcaaccgaccaagcccgttcggggctgcaaggccccgggaggatgtgctggcggagaagggggtggactggaggaagtttgagaatgagattgagcacaagaccagccgtcctaccagttcgcactccagcaggccgaatagcgctcattcctcccgccctgggagccctgggtcgcaggtttcggcagttgggagtgaaggagcaccgagggcacggccaaaggttaacccatttggtgaggccaagccaagagaagtggtgctgcaggagaaagggaaggattggaggaagattgatattgagcttgagcatcgtgctataaataggccagagtctgatgaagaaagaaatttgaaagaagaaatcaaccttctgaaggtggatcttaaggaaatcgagagaaacatgagtaatggttctgaccagacatcggtagatgcaaaaggtttgtctgagaagatatctcagttggaaagccagcttgagcagctttcaagggagttggatgacaagattcgatttggacaaagaccacgttcgggtgcgggcagggttacagcacttgcaccaactagtttaggggaggaaccgcatgctacagtggtggacagaccgcgctctcgtggtggtatggagccaccaccaaggcaggaagaaagatggggatttcaaggaagcagagaaaggggctcttttggtgcaagcagaaattcggacaggccaatggcaaggcagagatggtgaaactgggacaacaagcatctcttagggatatttccggttcccagtccctttttttgttctgaaaagatgggcaaaataagtcgttacttatttgtttgtcgtgtttgcttggtctagaagattgttgaggatggagataactccacatgaagttattggtttgtcaactctatgccgtaggatgttttgcatttccctttttgccatctaccatgtcaaaacgatatcttagcaacctccgatactaactgttatgcttactggattccagttcagcatatgtcactagttgattatttgtgcactgcttagtggaaaccttggatttgcacttttactgatgctatgtcacctttctgttagtgttttttttaaaaaaaaaaaaaaaaaaaaaaaaaaaaaaaaagggaagccgctcgcgatctagaactag

SEQ ID NO: 1796 - DNA, 3173 bp, Zea mays
  Clone ID: ZEAMA-23APR03-CLUSTER12873_2
cgcgtgtgagggcgggagagcgcgcggggctagggtttccacgggtgatggaagcagaggctgccgcggcggtagtggcgtcgtccgcatctgcctcggcttccgcgggccggtctcgcccatctagcagcgccgcccaggtcaccagtaattcggctgtgcgagctggagaagaaaatgctgcctccctctatgttttatctgttattgactcgttaaaaaagaggattaccgcagatcgtttgacttacattaagaataggataggggagaacaagactaatatcagcagctatacacagaggacttacaatttatcaaaaaataggcaaattagtacatcaaagggtactgattcagcatcaaatttgctcacaaaaaggcaagatgatgcgctatgcaccctgcatagtcttgatattattccggttgacaaagatggtggtacttttcaagacgaaagtcctttctcttcatctaatgttatgtttggtggaaatcttggtcccaagaatgctattattagaccaattaaactaccagaagtgccaaagcttccaccttatacaacatggatatttttggacaggaaccaaaggatgacagaagaccaatctgtacttggtcgacggaggatttactatgataccagttgtggtgaagctctaatttgcagtgatagtgaagatgaagccattgaagatgaggaggaaaaaaaggaatttaaacattctgaagatcacattattcggatgacagttcaagaatgtggcatgtctgatgctgtactgcaaacgctagctcgacacatggagcgggctgctgatgacataaaggccaggtatgaaattctgcatggtgagaaaactaaggattcttgcaagaaagggactgagcataatgtcaaagtggaagatttgtactgtgacaaagatttggatgcagcattggattcttttgacaatctcttctgtcgacgatgtctagtgtttgattgcaagctacatgggtgttctcaagatttagtatttcctacagaaaaacaaccagcttggagtggcgttgatgacagtgtaccctgtggtattcattgccataaactggcatctgaaccagatgctgctgctggtgctgatcacatgctttttgatgttgaggagccaactcactcatcagacaatgtgatgaaccagccaggttcaaataggaaaaagaacggctccagtggaaggaagactaaatctcaacaaagtgaaagctcttcaactgcaagagttatctcagaaagcagtgattcggaagtacatccaataagcaataaatctccacaacactcccctagtccctcaaaagttaaaattgggccgaaaggtggaatcagaaagattaccaatagacgaatcgctgagagaattcttatgagtgtgaagaaaggacaaagggaaatggcatcatctgattctaattttgttagtggatatcttttggcaagggacatgaagcttaggtctgatacacgaaatggaaataaggaattaattgtatcctcacaacagagttctccaagcacaagaagttccaaaaagaagagtacacctcaaattgggaacagctcagcttttgctgaggctcataatgattcaacagaggaagcaaataaccgtcattcagcaacagatggttacgatagttcaaggaaagaagaattcgtcaatgagaatttatgcaagcaggaggtgtacttgagatcatggaaggcaattgagcagggacttcttgtgaaaggattagagatttttggaaggaacagttgtttaattgctcggaaccttcttggtggaatgaagacgtgcaaagatgtttttcaatatatgaattatattgaaaacaacagtgcctctggagctcttagtggtgttgattctcttgttaaaggatatattaagggtactgagttgcgcacaagatcaagatattttagaaggcgaggtaaagtccgtcgtttgaagtacacctggaaatctgcaggttacaatttcaaaaggattaccgaaaggaaggatcagccttgtcgacaatataatccttgtggttgtcaatctacatgcggaaagcagtgtccatgtctttcaaatgggacatgttgtgagaaatactgtgggtgtccaaaaatttgcaagaatcgttttcgaggatgtcactgtgcaaagagccagtgtcgcagccgccaatgtccatgttttgcagctgacagggaatgcgatccggatgtttgcagaaactgttgggttgggtgtggtgatggtacattgggagttccaaaccagagaggagataattatgaatgccggaacatgaaactgcttcttaaacaacaacaaagggtcttacttggaagatcagatgtctctggctggggagcattcctcaagaatagtgttagcaaacatgaataccttggtgagtacactggggaactaatctcacacaaagaagcagataagcgtggaaagatatatgatcgtgagaactcatcgttccttttcaacctgaacaatgagtatgttcttgacgcatacagaatgggtgacaagctgaaatttgccaaccatgcccctgacccgaattgctatgccaaggttatcatggtaactggtgatcatagagtgggcatattcgccaaagaaagaatcctcgctggtgaagagttattctacgattaccgctatgagcctgacagagctcctgcttgggcccgtaagcctgaggcgtcgggagcaaaggatgatgggcaaccgttcaatgggcgtgcaaagaagctcgcccaaaacaaccgaggctgaatctgatttgattctttcattgttaggacaaatttggcagccattcaactaatacaaggaacctgtcattcataggccccaatttatttgaactcgtcattgtaactcgtatgtgcttgaattctccatggcatctggtcctgccatccgtagagttaggtcccgtttgttttgaggaactaaaaattaatccctctattttagtcacattgagtcttagattgtcaaacggcgggactaaaacaaaagactaaactatttgtctctagtacctcaagccatgactaaaagggaataaatcatataaattttatttttatccttccttta

SEQ ID NO: 1797 - DNA, 1904 bp, Zea mays
  Clone ID: ZEAMA-23APR03-CLUSTER12900_11
gcacgagaccattacctagaacatcctaatcaaaaagaccactcgttcctcccaactcttcttttgcttgatcattcccatatattttttgtcttctcccgtgccaccgcctcgccctcgccctcgcccctcctaccgcacccggaagctaggtttagccgccgccttctcccttttcgccgcggcggccgcaagaaccgacttctccccggagaagccccaagcaagcgacccccgcttcctctccgcgccagatctttgtttatgagctcgaaggagaagcccactcttggaggcacgcggattaagacccgcaagcggaatattgcagctcctttggaccctgcatcattctctgatgcaattgttcagatctatttggataatggtggagacctggaacttgtcgccaaaagtatcgagtcttcagacctcaacttctcacgttacggtgacaccttttttgaggtggtttttgttggagggcgcactcagccaggcactgtaaaacctgaagaaggagaccgccacccttattcggtgttagattgtgcgtcacagcgtgaagcaattttgcctttcgtactctatatccagaaaacattgcgcaggaggccttttttaataaagaatcttgaaaatgttatgcgtaaattcctgcaatccttggagttctttgaggaaaatgagaggaagaaactcgccatattcacagcccttgcattttctcagaagctatcagggcttcctcctgagactgtgttccagccattgctcaaggataatcttgttgccaaagggatagtactttcattcattactgagtttttcaaggagtaccttgaggaaaacagcttggatgatttgattgcacttttgaagaaaggcaaaatggaggacaatctgttggacttcttcccatcagctaagagatcttctgaggctttatctgagcatttcaccaaagaaggtctgactagccttgttgagtacaacgaaaagaagatgtttgaggttaaacttaaggagataaagtcaacactgactgctatgataaatgatgaggctgcaatatctgaagtgattgagactgtcaagcagcaagttaaggatgctaaatttcctgatttagaggttattcgcatgttgtgggatgtgctcatggaggctgttcagtggtctgggaagaaccagcagcaaaattccaatgcagcacttaggcaggtgaaagcttggactgagcttttgaatgctttttgcacgagtggcagactcgaactggaacttatacacaaagttcagacacagtgctatgaggatgctaagctgatgaagctgtttccggaaatcataagaacactgtatgaccaagatgtcctagctgaagatactatagtcctttggttccgtaaaggttcaaacccgaagggcaggcaatcttttgtgaaagctctggagccgtttgtcaaatggctcgaggaggctgaggaggaagaataagctcttgatttggagattggccgaatgtgacgaattatggttctcgaaaatattacctttttttttatttcgaaagctatgaaaggttgaggagttatggttgctgctagttattgccgagtttgttactggcgatagatttatgttatgctgtttaggcacttggctctcggctgcagtatgttgctgttaaggtgttgaaacttctgttatcattactgaactggtttataatgtgacgtcaatttactatgggtattgtacatcactactgggtggcgcaaagcactcgggaaagcttgcaaacctaatgtaacactcggcaaagaagaatcaatgaactgtacaacgatctctttctcgagagcattatgtcgggcactcacgaagtttttgttgagtgt

SEQ ID NO: 1798 - DNA, 1565 bp, Zea mays
  Clone ID: ZEAMA-23APR03-CLUSTER12931_1
atttacctattgccattcgtaggatagggccctagcgcgattagaagggacacgagcaaccgatgctgccgcagcctcacactcaaccaatatttctcctgtatacaaagaaaaagaaatcttccatacatcagactttgactcgcttctatctcgcgcaagccgagaagaaaggagcccgtctacgcgagagatgggcggctacgagaacggcgagtcgacggcggccgcggcgcttgctgacggtggtgtgattctgggcgtggacggcggcaccaccaacaccgtttgcgtctgcctgccggctgcaatgacgccgccggagtctccggccaccgtacccgtgcttgcacgcgccgtcgccggctgctcaaaccgcaattccgtcggagaaaatgctgccttggaaactctcgagcaggtcatgacacaggctctagcattggccaacacagatcgttcagctgtccgagcagtttgtttagccgtatcaggagtgaaccatccttcagatcagctgaggatgctggaatggatccgggatctgttcccagacaatgcaaaaaattatgtagaaaatgatgcagtggcggccctggctagtggtacaatgggaaagctgcatggttgtgtgttaattgcgggcactggatgcattgcttatggagttacagaagatggaaaagtagcaagagcagctggtgctgggcctgttttgggcgactggggtagtggatatggcattgctgcacaggccctgacagcagttataaaagcatacgatggtcgtgggccacaaactagacttacaagagatatccttgagaagcttgatctttcttcaccagatgaaatcatagggtggacatatgcggatccatcttgggctcgtattgcagcacttgtaccagttgtggtatcttctgctgaagatggtgatgaagtagctaacaaaatcttgcatgattcagtccaagagttggctgacactgttatagcggttgttcagcgtcttagattgtgtggcgaagatggaaaggacatgtttccacttgttttggttggaggggtccttgaaggaaataaaaagtgggatatcagtggtgaggtcataaaatgtatttccaaggtcttcccgggcactgatcctatttggcctgaggtggaaccagcaatcggtgctgccttgctagcctggagccatcaccacaaagggttgaaattggagaatggaagttgattcccagcatttaagggtgtcaattgtacattgaggagttggcgagccaaaggggtattggtcccaatgatacattcatcggcatgaaggcttttcgttcccagcaaaaagaataaatcgtggatgggtgcaaacatgcggtgtggatagaacatatttctgatgtaagtaggtagtaagaattgttcaaatattcctctgattctaactctcggtgattgttgtatgtgttctgtttgtgtttggaggtagtaacatgtatctgtctaccatggataattgatcgtcaaatgttcagatctttttttgaaaaaaaaaaaaaaaa

SEQ ID NO: 1799 - DNA, 2621 bp, Zea mays
  unsure (1)..(2621): unsure at all n locations
  Clone ID: ZEAMA-23APR03-CLUSTER1293_2
ctcttccttttccctctcctcagtccctgtctgctgctgctagacagcacaaactgcggtccggtgcgctctcctcggcggtggagttggagctgcagtgcaggggaagaaccgaagaagcgagctagagccgcaagaatgataggcgccaaggccaacgccgccggcccgtgcccggagtatgcggaggtcgaccccaccggccggtacggaccggttcagcgacgttcttggcaagggcgcgtccaagattgtgtaccgggcgttcgacgagtaccaggggatggaggtggcgtggaaccaggtgaagctgcacgacttcctgcagagccccgaggacctggagcggctctactgcgagatccaccttctcaagacgctcaagcaccgcaacatcatgaagttctacacctcctgggtcgatgtctcccgccgcaacatcaacttcatcaccgagatgttcacctccggcaccctccgccagtaccggcagaggcaccggagggtgaacatatgggcggtgaagcactggtgcaggcaaatcctcagcggcctgctgtacctgcatagccacaatccgcccatcatccaccgggacctcaagtgtgacaacatcttcgtgaacggcaaccagggagaggtcaagattggcgacctcggtctcgccgccatcctccgcaagtcccacgccgtccactgcgtaggtacaccggagttcatggcgccggaggtgtacgaggaggagtacaacgagctggtggacatctactcgtttggaatgtgcgtgctcgagatggtaacgtttgagtacccgtacagcgagtgtacacaccctgtgcagatctacaagaaagtgatctctgtaagaaggccccctggaggcctggaccctatgagcaattgtgattctggtgtgcagtttgaaatgatcttcctgacttcagctagttgtttgatttggtagggtactaagccagaatctctgtacaaggtgaaagatccaatggtgaggcacttcgtcgagaagtgcctagcaacggcatctcagagactgtcagcaagagaactgcttgaggatcccttcctacaaagtgatgacgtggttgtttctttggatggtggaaattaccatgtgccggccaattatatacctcagccttcatatttagggcatacctacagcaatggctccatgatgagtaatggattctcagaaagcattgatgaagatgttctcagtgaagactgtgaggatgatgacatgaaaggccaagatggcattgacctgttcaacgagaatgaaggtgagcttcttggcaatgtggatataacaatcaaagggagaaagagtgaggatggaggcatattccttagattgcggatttctgatgatgatggacgggtacgcaacatctattttccttttgacattgaggctgataccgcactaagtgttgctactgaaatggtagctgaactcgatataactgaccatgaagttactcggattgctgacatgattgatggtgaggtcagtgcactggtaccagattggaggcctggtccgggcatagaggaggctcctgacacttcatactgccacgattgtggatccatcgtgtcatcgtgtggttcactttacgcctacatgtcatcaggccgtcgaggttgccaatgtgcagaggtacatgggcggtttgaggagatcacgttcgaagctgatggagagcggtgtgatttgcaggaatctgcaggcagctctgatgatggaggtggccaaacagagcactatgtcaaaagcaaggagtccactcatgtgaatggccttctacagatgggtagaagagatctttctaatcagctttgcttcagttcattccaagagcaatcatgttcatctaaccattatgagaacgacactaaccatcacacaaatgggttcgacatgaagcatgatgtaaagattgccaagtacaaagcacggaaaatggcacagttaaagagggctatccatccatctcttgacttcgacaatgcaaatggagtaaataggatgaagccttcactgaacaagctgcaatctttccatattggaaagaaccacagtttccgtgtaccgaccggtgaccgaagcccgtgtaaagtaagtacggattaccattctgatttgaacagccaattatcgcatagcaggcaccccgatccaggagcccaaagggcctggcattgtgaggtcaatgcagctgggagctctgattgtatgtttacagcaaggcgctactatgccggagctcagttgccaccaaatctcccgcgaacaaaatctgtacccctacatgctgtagacgtctgaaatgctcttgccctgtaaagtttatagtgtacatctgttttggttctctctgtacccattatgaaacgtagttgctgagagcaggagactgaatgtgacgaggttgcatgtggattacggctgaggtgtttgtaaatttccatcttgtgaattcagagaggttagattgttcgagtccaatcaaaaaaaaaaaaaaaaaaaaaaaaaccaaaaaaaatataannnnnnnnnnnnnnnnnnnnnnnnnnnnnnnnnnnnnnnnnnnnnn

SEQ ID NO: 1800 - DNA, 1417 bp, Zea mays
  Clone ID: ZEAMA-23APR03-CLUSTER13058_2
gcagcggattgcggagtggcattgggttggcagcacgcccctgcacacggtgacacgggccacggcgcggcgcggcgcggcacggggagcgagcgccagcgagagcaagcaaccgctgtccgccgggccggccacggcgctgccccctgcttcgcgccttcgccggtgcgctcacgcctcacgcaggtgcatgcatcgacctacggtatcctagtctgggatcagaaaagaacacagcaacaacaaagaagaaaggcgcgagcgatggacggtgacgccggaccagagcaacacgggtgcgtgcactacaggaggggatgcaagataagggcgccgtgctgcggcgaggtatttggttgcaggcactgccacaacgaagccaaggactcgctggaggtcagcgtccacgaccgccacgtgcttccccgtcacgacatcaagctggttatctgctctctctgcaacaaagaacaggatgtgcagcaagactgtgcgaactgcggagcatgtctcggcaaatacttctgcgcgaaatgcaacctcttcgacgacgatgactggtggcgcagagaatttctatcactgtggcagatgtggatgctgctacgcgactccgctgaaggattctcaccgctgtgtggacggagctatgcatcacaactgccctgtctgcatggagtatctattcgactcgatgaaagctatcagcgtgctccactgcggacacaccatccacctggaatgcctttacgagatgagagcgcaccagcagttttcatgcccggtgtgcctgaggtctgcctgcaacatgtccgacatctggcaaaagctggatcagcaggtacacggcttcttcctctcccgaccacgcgtcgtcttgatctcatcctgcgacttcaggcaccagaccagtccaagtaaaccgtttcattccttcaggttgcagcgtccccgatgccagccatctatcagaagaagatggtatggatcctttgcaacgactgtggcgtgacgtccaacgtgcagttccacatcttggcgcacaagtgccctggatgcagctcttacaacacccggcagacgaggggcgatccagccgcatgctctagagtttgagagcaaataaaactgcagtactgcactgcacataaactcgtggggttgtgtggtcgatcgataggtagcttgcagggaggaaattaaagactaccattgcgcatggacacgattggtgccggcagttgagtacatgtattaggcctgtcatatgtagatgtatcatatgctatgccttcacaaagaagaatttggcgcagcggacagggtatatatttttttgttgctatatacacataatttttgttgcgcggtgcttgtgccaatgatggagagttcgtacgttgtttttcttatattt

SEQ ID NO: 1801 - DNA, 2166 bp, Zea mays
  Clone ID: ZEAMA-23APR03-CLUSTER1306_42
accccttcgtcagccccttgaccaccgttccaaccctctcccatccgcgtcgcctcgaaggaagcgcggctgatcctgctccaagcctccaaccctagctcctccgctccccaccttcctccgtccggggctcatggcggagatcgaggtggtatccgaaggcggcaggcgagaggaggacgaggagcggcggcggcagcagcagcaaggcgcgggggagccggaccccgtggtggacgtgtactctgcggcggcgtatggggacctggagcggctccgcggcttcgtggagcaggggggagccgccaccgcgctcagggagcccgacggcaacggctaccacgcgctccagtgggccgcgctcaacaactacccccacgtcgcgctctacatcgtcgagcacgggggcgacgtgaatgcgacggaccacgcgcggcagacggcgctgcactggggcggcccgtgcgtgggtccacttccgtggctgacgtgctgatggagcacggagcgagggtcgaggccgccgacgtcaatggcttccgggcagtccacgttgcatctcagtatggccaaacagcattcttgcatcacatcatctcaaagtacggtgcagattttgatgctttggacattgatgggaggagcgctttgcactgggctgcctacaaaggaaatgcagatacaatcagattactgctatttatggatgctaatcaagtaaggcaagacaaaaatggttgtacccctttacattgggctgccataagaggaaatttggaggtttgcacagttcttgtacatactggtactaaggaagagctcacacttaaggatagtggtgggttaactcctgtgcaactggcagcagaaaaaggtcattgacatctttccaatgtcctttctaatgctacaaaagtaagctttgaagataagtttttccctggaaaatcgaggaaaattggatatgcccctttcttgtttgcttatcttgtcatctgcctcatcctgttcctaaactcaattgtatttgcacctaatttttctaggatcactgctactgctggtctttggtcttgggctgctgtatcacttttctttgcatcacaagtaatgttctacagagttagcagaaaaaatcctggctacatcaaggcaaattccaagcgaactgacccaaaggagccacttatggaaattgatcttaccaattcctctacttggacaggcaattggtctcagctatgccctacttgcaagataattcgacctatgcgctccaaacattgtccaacttgtaagcattgtgttgagcagttcgaccatcattgcccatggatatcaaactgtgttggaaagcgaaataagtgggacttttttgtgtttctttggatggggatagctacatcctttcttggtgctgctgttggattccacagacttcagacagagcctgttatactctcatcttcagaatcgtggatacattttatggtgacaaagcatcctggtgctgtactgttcatgtttcttgatgtctttttgttaactggagctcttattctgactggagcacaagcagtacagatagcacggaacatcacaactaatgaggcagcaaatcgatctcgttacacatatcttcgagggcctgatgggcgtttcagaaatccttacagtcgaggttgccagaggaactgcactgattttcttatcagtggatacagcaatgacgaggaggtcgcatggccaacacttcaacaaacagtacagtgaagatagatgcactgattcatgaaacaaaagtgttattgacagatttaatgcccaagatccctggaaagcttatgctttagcgctccgaatatttcagtttgttcagacactggattgacaatggtgtgaagagcgacctgggatcacattctgagtggcacccttttattataagggtctttagtaggtgctgtcgatcatggaattgtttgatactgtagattgttcgcatgcgtgggtgtgcagcagtatgttttcttttctccggctacatgttttgctaggacaagtcatctattcatgttatcgagatgagtgttgatagtgatagatggtaaatgctggttttctgatctccggtgtagtaagttgaattcacaatcttcattcccg

SEQ ID NO: 1802 - DNA, 1737 bp, Zea mays
  Clone ID: ZEAMA-23APR03-CLUSTER1306_60
gtctgtggtgtgggcgggttttgctgttggttgggcgtgtcattgtgtaaaggggggctggatggtttgacgagtgggggagggggggggagggggccgtaagggggggtgagaagctcctgccgtgggcgatacgaggttgtgcgtgtaggttccgggcgcggaggtgggggggaggggggccccccccccccccccccgcggggagcaaataagaacatggtttccccaacggttcaatttacctcccttaaagggaacaaaagggggagcccccccgcgggggcggacactttagaactagtgggttccccgggctggcaggaattcgcccgagaccctttcctaggacatcctaatcaaaaagcagaagcgatgtggcgcatgtaggtttcgtgtaccctttttacagatgctatttctgttctatcacaaaagaggtcagttggaaaaaaaaaaccttttctctggtcgatcagctgtgtagctagaacacaagaacagttattagctacacgcgatcgaggcccgcctgatggaaactgctgcatgcttgtgagtaggggactgccacaacaccaaaggggagaagaacatgtgcgtggtcggagccatcaacaactacacggcggcgctgaaagactcatcaagtccatttgatccgacggagagcttgatgttcctggcgcacttcgtcggcgacgtccaccagcctctccactgcggccacaccgacgacctcggcggcaacaccatcgtcgtccactggtaccgaaggaagaccaacctgcaccacgtctgggacgtgaacgtcatcgagacggccatgaaggacttctacggcaacgatcagagcaccatgatacaggccatccagcagaacatcacggaggagtgggctgatgaggagaagaagtgggaggcctgccgtagccggacaaagacctgtgctgacaagtacgctgcagagagcgcgaagctggcctgcacggcgtacgagggtgtcgaccaggactccaccttggaagatgactacttcttcgcccgcgctgccggtggttcagaagaggatcgcgcaaggaggcgtcaggctggccgcgatcctcaacaggatatttggtgggaacagcagatcaggcttcagagcagttgattgatcgatccataccagtagtagatatcaaacgattggacatgtggaggagtgggtggggaggggcagacatgatctgccatctgaattagaataataagaggtatcttgttgccgtctggcaatattgtaacttcagtcttcagtagccactagctcacgaattttattatttcagaatcgaagcacttgtacgtactgtgcaatagaatagatgacgcggtcacacattcgtattcatatatgttcgcgtatctttcagatcgacgtgatgagaaatgtcttagaaggatatttgaaggattcaaaaaaaaaaaaaaaaaatatcgatacccggcgacctcgaggggcgtggccgggacaccatttcggcctatacgggggcgggattccccgccactccctgctctgacttcctctgacgtgtcccctacggggagtcctcctcgggtccccaccgcctcctcgcgctttgccgccctctcctctcctccgactatctctacccatctcgctgacggtggttgtgtacctgggcgtgtcgactccgttgcgctctagccactcgccctccccttttcccc

SEQ ID NO: 1803 - DNA, 1645 bp, Zea mays
  Clone ID: ZEAMA-23APR03-CLUSTER13073_1
agaacggcctaggcgctagcgataagccccgcccaccgcgcacgcgccgcggcaccataccgggatgggcgccatgggcatcgtcgtcagagcgtgggcgcctcccgctcttgccgccgcggccgcgccggcaccctccggctccagggacaccggtcaggcccagcggaggagcaagccctcgaggaccggccgcgtgcgcgtgctcggcggcactggccgtgtcggaggatccacggccaccgcactctccaaactccgccccaagcttggcatcctcgtcggtggcaggaaccgggagaaaggcgagtccattgcagccaagcttgggggccagtctgagttcgtccaggtcgacacccgcaacacaggcatgttggaggaagcgctgcaggtggtagctgttcgcggagttgccaaaccggaggcagctgcgacgccggcgaggcgctcgcgccccatccctctggcttccgtggccgtgtggagtctggttgccactggcgccgcaaatgctgccgagctatgggaccccttggccctgcacggatcatcaggactcgtcttggctgaccttggcattggagattggtttgggggtttgctgttttcagctgggcagcaggctaatgaggctgtccaagatcagttgtctgctcttagtttctctagcctagcagttatttttggtgctggacttgtaactagtttatctccttgtacactaagtgttctaccactaactctaggatatataggtgcatttggctcagggaaaagccgatccgaggttgttgggaattcaattgcattttcactaggactagcaacaaccttagccattcttggtgttgctgcttcttttgctggaaaggcttatggtcaggtaggacaagggctcccagtggctgcttccggtttggccattatcatgggattgaaccttctggaggtacttgaattgcaacttccctcatttttcagcgattttgaccctcgagctgctgcagctaacctcccttcaggtgtacaagcataccttgctggtcttacatttgcattggcagcatcaccttgcagcacacctgttcttgctacccttctgggatatgtcgccacttcaagagacccaattattggaggaagtttattgttgacatacacaacgggctatgttgcgcctcttcttattgcagcttcatttgctggagcactgcagagtttgttgtcattcagaagatattcggcatggataaacccaatcagtggtgcatttctacttggtggaggtgtttataccctactggacagggtgtttccagcaacatcaatggccatgtagaccatcgttggacaagaattgctaggcaccagtctgtttggcgtgcgaatgatatttggatgtgaagtagtgaaatgatggcaacaaagtttagccagatctctcagcgttgtataggcacgcaggacattttgatcgggacaagcaaagcaccttgacctaagtacagtagtctgcatcactgtatctgtatgggcctcgatacttggggccggtctaccctactaaaatgtatttctgggacagattgaaagagtatgaaatccatataagggtttgttcgttccaaaaaaaaaaaaaaaa

SEQ ID NO: 1804 - DNA, 2082 bp, Zea mays
  Clone ID: ZEAMA-23APR03-CLUSTER1319_3
agaacaggactccgactcgttcgggctattccatctctgctctctccctatatacgactaggctaccgccgccgccagatgcgcaggtcttcgtcggctccttctacttctcaggcaacgagcacccggcagtaccgatcgggtgttcttcactgggtccgctcctgcgtgctagaactagaagaatcctctgctcggctcgaacttgggaaggggagacgaggatggggtccctgctttgctgcatgcggggctcggaggacgtctcggcagcgccgcccgtgagctgcttgtgcctactatggcctttccattattaccacaatttgaactcgggctctgctgcttgtcacagatgtgatacacgggtggcacctgatggtggaatgagtcctcctgcaaatcaagtggatttattggatactttgggtctccctccaaggcctttgccttacgatgatcctcaatccagccctcgcatggtgcaacacccacttgtatcaggacacgacaaagcaccaacgcatgtccagaaactaggacagcctgcagaaactaagaatacccatactgggtcaacttgcacagctcataaggtttctgcgtcctcaccaaaacagcactcagaaggttcaagaatggatgatggagtacaattctgtgattcctctgacagtgaggatgactgtccagtatgcctggaagaatatgattatgagaatccgaagattgcactgcaatgcaaacataatttccaccttagctgcatttacgagtggatggaaaggagccaggcttgcccggtctgtgcaaagactatgttgttcaatgaggatgaatgaccccgccgatggaagtcttcccagacggcaagtggaagacccaagctaaatcctgcgtgttgtgtacatagcgctgatcgtttgctgaaacttacagcattgcgaaaatttatttttatagattctttcttgatgttaatgtccgcaggggtgcttacaataggttttcatgctgaaatctcaggttctgaaaaccacagctttcggttgaaatcaaatcaaatatacagactggcctctatttacaggacataacccatgttccatatccaatcacctagaactctattcgaaagtgaacatccacaccatcttcaccactaattatcaccacatcaaaactacgaaacacaacgggttccacagtttttctcgcaaataagcgccattaagttccatcttttgcagccatctcaaacgccctcgtgaattcatttggtggctggcccccactgagttgatatttattattgatcacaaagtgtgggaccccggagatgtccgatgagtacttcttgagctcttcctgaacctcatcgactcctttgataggatcttcaagcagttcctcggccccttctatgcccacctttcttgcagcatccagcaaaacctgcttgtcaccaatgtactttccttggcaatggtaattgaggaacaattcttcaacaagaacattttgcttgtcatagccttggtgtccagcaagtgttatgagcctatgactatccatcgtgttccctgtcaatcctgacatgtcgtattcaagcccgagtcctcgaaatatctcagtcatgcgagacatcgcaccctcatattggacaggaccgaacttcatcttgaagaagtcagatttcttgacgccctccttaggcgcgtcggggttcagaaagaatggatgccaacggacctcgaaatcaaacttgcccttgctttgctccattgctttctcaaggttctttttaccgacaaagcaccaagggcacactgtatccgagctcacatcgatctgaatgagcttcttgcgggtgtctgaagccatgaattttgcacaccctgggagtgccgagtttcgcgagggacgggatgcggacgtagagcaggcgatctggcatgcacaagcacggggagatccttcgttttcctccacagcttcgtcgatagagatttacgccatttgttcatcagcgttcttccctcgtgtaattcgtggaaggatggagaagcagtcgccgaattt

SEQ ID NO: 1805 - DNA, 1512 bp, Zea mays
  Clone ID: ZEAMA-23APR03-CLUSTER13232_4
accgagatgcaatgcaatgcaaacatcctccctcttctcctgctcctcacagacatcttatcctagctcccggtcgaaggccgtaggtaggattcccttctctattcctcgtccgcttcctcctccggcagccggacctagctagctagctttcttgccgttcgccgcccatggctaggaagtgctctagctgtgggaacaacggccacaactccaggacctgcggcgggcacagcaggaccacggcggccttcgagaacaacggcggcgccggcgtgaggctgttcggggtgcagctgcacgtggggtcctcgtcgcccgtagccgtagccatgaagaggtgcttcagcatggagtgcctgtcgtcgccgccgcccgccgcgccggcgtactacgcggccgctctcgccgccgccaacagcagctcgccgtcggcgtccgcgtcggcgtcctcgtcctcgtcgctcgtctcggtggaggaggcacaggcacccgagaagatggccagcgggtacctctccgacgggctcgtgggcagggcgcaggcggagaggaagaagggcgttccgtggacggaggacgagcaccggcggttcctggcgggcctggagaagctcgggaagggcgactggcgaggcatctcccggcacttcgtcacgacgcggacgccgacgcaggtggccagccacgcccagaagtacttcctccggcagagcagcctggcgcacaagaagcgcaggtccagcctcttcgacgtggtggagaacgctgctgagagggcgacgacgacgagctccagggagcgcccgaggctcacggtcacggatgcgataatcgcgaccgcctctgctgcagcacccggaacaacggcagcactcccggccctgtcgctcggcatccgacggccagcgaggcctgagtaccacgttgacgtcgcgctgcctccgagcagcctgtccatgcagctgccgcggtgctcggcggcaatgggtagcgcgtcggcgtcgccgtcgccgagcctggcgctggcgctggcggggccgaaacacaagcacccttcgccttcgtccctgacggcggcaaaggctagtagtagtggccaggcaccagacctggagctgaagatctcgaccggccggcagagcgagcaccaggtccagacgggctcgccgccgaggacgccctttctgggcaccatcagggtcacgtaaccggaatgacggcggcggcggttagtcgggaatgtcctgctggtagaagaagagcttggccgggccggggtgggaaaactgaaaaggaggagcttttggcagtggtgttggtgtgtgtgtgttgctgccagtggcagccgagacgacgatgccgttcgtttatcacgtgggtgtggtgttgtgcatcatcatcagaaagatggaaactttactttagtggcctaattagaactctataaactttactgtcctaatttagcattcgtttgtttctaaaaagaaaagaacgccgttgccaaaa

SEQ ID NO: 1806 - DNA, 1021 bp, Zea mays
  Clone ID: ZEAMA-23APR03-CLUSTER13271_1
attccatatttccattcacgcatcacaagctggaaggtactgtgggcaatgatggatctgctcatgcgccaacagtcagccataccatacccctcctcccgcccctccccctcccccccgtccccgctgggctccccggcgcgcgcactgggctgcaccctggctgggcactgcaccacatgcggccgcggcggcgccaccaacggcacctgggacggcatcgtcccgccggagtggcgcgccctcggacccgcatcgtccgtctctcccccgcgcttcgctgggagcaggcgcgcgagccgctgcacgccggcgtcgacgtgggcaacgttctcggcgtcgggcccggcatgcccttcgcgcacgccgtgctcgccagcgagggcgcagccgcagagccccccgtcgtcgtcgggctcgtgccgtgcgcacagggcggcacgccgatcgccaactggtcccgggggacggagctgtacgagcggatggtgacgcgcgccagggcggccgtggccgagtgcagcggacgcggtcacctggccgccttgctttggtaccagggggaggcggacaccatgaggcgccaggatgctgagctctaccagcggcggatggagactctcgtgcgtgacgttcgctgcgacctcggccggcccgacctcctcgtcatccaggtgggcattgcaactgcgcagtacaatggcaagttcctcggcgtggtgagggaagctcagaaggcagtgaagctcccaaatgtcaagtacgttgatgccatggggctgcccatcgcgagcgaccacacgcatctcaccacggaggctcaagtccagctcggcaacaaactagccgagtcgtatttagaaacgctgtaattttcaaataccggtatgcctaccaaaaacaaggcattcccccacgatttggaaacggacagagcaagcaatatgtacactcaaattacgatgctgcgttgagattaatattttccgtgctattgatttttttttaaaaaaaagcggcc

SEQ ID NO: 1807 - DNA, 2886 bp, Zea mays
  Clone ID: ZEAMA-23APR03-CLUSTER13300_1
aaaagtctgtcccgttctgttcgtgaacgtgggcctcctcaaccctttcccacaaaaaaatgcggtggcacacacatactgtactgtagcatcggccatggtcgcggccgccgccaccaccacctccaactcggactgacctctccccggtcccagctcccgaacaaaaccctagctaaccctatccgccgatggcgttcgcgacgccgcgcctcctcccgctgccccctcctccggcggcggcatccacgcgggccgtctccgcgcgcaaccacggggggcgcacggcgcccgagctctcgggcccgaccccgcgcgtggtggtcgtcacctccggcaagggcggcgtcggaaagacgaccaccaccgccaacctcgccgcctctctcgcgcgcctcggcctcccagccgtcgccgtcgacgccgatgctggcctccgcaacctcgacctcctgctcggcctcgagaaccgcgtccacctcaccgccgccgacgtcctcgcgggagactgccgactcgaccaggcgctcgtccgccaccgcgcgctccacgacctccacctcctctgcctctccaagccccgctccaagctgcccctcgcgttcggatccaagaccctcacctgggtcgcggacgcgctacgacgctcgaccagcccacccgcattcatcctcatcgactgccccgcaggtgttgatgctgggtttgtcactgccattgcacccgcagaagaggcggtgctcgttaccactcccgacattacggctctccgcgatgctgaccgtgtcgcgggactgctggagtgcgatggcatcaaagacatcaagatcgttgtcaaccgagtgcggccagacctggtgaagggggaggacatgatgtcagcgctggacgtgcaggaaatgctcgggttgcctttactaggcgtggtgccagaggacacggaggtgatccggagtacgaataggggcgtgccgctggtgctgaatgacccgcccacgcctgctggccttgctctggagcaggctacttggagattggtggaaagagatgcgatgacggcggtcatggtcgaagagcaggagaggcccgagaagaaaggaggcggaggcggcttcttctcgttcttcggcggcaggtgatgagtcaagtcagtctttaggctgtagatggtgtacaggctcggagtttatgaatgctttctaggctagtgcccgattcattctgtcgttattgtgttgatgagacttgatactactagtcgcttgcattggacctgaactacaagttgtactaggcggctgatccacatccgaatacactccttgattgagctgctagttggtggccgggatgtcgtatgcgcactgctgcactgtgacctggtcgatgggcagcgtgtcggtcgggaacgggcatgcgccgtcgtgcgcgccctgtagcgggtcgcacggcgcggggctgacgttggccgacactccctcgatgtcggcgcagttccatgggtacttcctggacttggacaggtcggcggtgacgttggcgacgcagatgccccggaacggtgcgccctggatgccctggaggcgcgccgcctccttgtagacccccgtggccaccacgtcctggtagctgatgttggcgacaacggggacggcgttggggtcgtacttgtcgtccgggtgggacttgtagtcgcccgtcatccagaacacccgcttcatggtggtgagcgtcatccggcgcgcgaacacgtccctgacgtaggcgccgcggccgacggcggtcttgatgcgcacggcggactcggtgttgatcgccgtgatgtcctcggcgcgcacgtcctggatgccgcccgacatctcgctgcccagcgcgatgacggcgctggtcggggacacgcacgtgaggcggcggatgacgatgtgctggctgggcatcccgtacgagatgccgtactcgtcccagccgctcttgatggccacgcagtcgtcgcccgacacgatgtagcagtcctcgatgcggacgtgagagcaggagtctgggttgatgccgtcggtgttgggcgagttggtcggcgccaggatggtgatgccttgcaccacgatgttgctgctgtagactgggtggatgttccacgccggcgagttgagcagcgtcaggttggagatgtagatggtgtccgagtgcatcagctcgatgaggtagccgcgcgtgtacttgagctggttcttgtggaacttggaccaccacatggcgccctgcccatcgatcgtcccgttgctgccagtgatgactacgtcggtcaggttcgatccgccgatgaggctagcgaacctccctccgaccttgtccctccctcttccgtaagaaggcaggggatccacgattggccactcgcctacgtcctgggagccgaggatgacggcgtcttggtggaggtagagggtgaagtggctggtcaggttgaaggggcccgtcagccacttgcccgcgggcacgtacagcatgccaccgccgccgccctcgcccgagtactgcgacaggtggtccaccgcggaccggaacgccgcggtgttggaagtggtgccgtcgcccacgccgccgaagtccgccaccgacgccgtgtgcgcccggcaggccggcgccaggtacatgctctgcccgctgccgcgcgccggggaggccccgtggcgccgcccggacaccgccgccgccgcggcgagggccaggaggcacagggaccgcagaatctggaggagcggggccgcgttgaggccgagcgttcgcggcgccattgctgctcagcctggacctggagtgactcgtgactcgtgaggcacgggatgatggagtggagttcctgcccgcctcgttcgagtccgccca

SEQ ID NO: 1808 - DNA, 1445 bp, Zea mays
  Clone ID: ZEAMA-23APR03-CLUSTER13314_3
atgtacgaactgttaggaattttctatttttggtacttctgttttgagccacaattggtgtagtggccactgccaacactcttaagtacactgatatgttttctctcgctgaaaacaaaaaaaacttccaatactcactagcttaatgtacacacattccattttacatgtatttgggccagtcctgtgaagcttttcttttatgtgttgtagtctttaatgatggttttccttcctaatctagaaccctatcagaaaaccatgggctctgatggaataatgttctcttcattgctgttgttttaatcaggcaaggatcttgatgcagtccttaaagctacaccaattcttccagaaaaagaaggaaggatcataattgttcaaatatttcagggcctggtttatctaaacaagaggggccaaaagatcattcactatgatctaaagccgggcaatgttctctttgatgaggttggtgttgcaaaagttaccgactttggcctcagcaagatagtggagaatgatgttgggtctcaggggatggagctcacttctcagggagctggaacctattggtatcttcctccagaatgctttgacctgagcaaaacaccatttatttcatctaaggtggatgtttggtcagctggtgtaatgttttaccagatgctcttcggaaagcgtccttttggtcatgaccagacccaggagagaatacttcgggaagatacgattatcaatgcacggagagtggagttcccttcaaagccagctgtatcaaatgaggcaaaggatctgatacgccggtgcttgacatacaaccaatcagagagaccagatgtactaaccatagctcaagatccttatctctcatacgcaaagagatagccgctatgccggagaacactaaggcaagggtagctgatcatttatgagattatttatgtatggggatggataatcttgcgaaggagcaaagtgttccacaagctcaagaagaccacaaagggtgtaactgtatatgttgtaaattttagtctttcccatcgcagcaatgacctgaaatccagaagccatcagttcaacggtcagcttctttgtaacatagagaaaacaggcattagttggaacgggcccatttaccctttgactgagatctcttatggcatgccccccaccccaccccatgcggaacgcgacggttactgttgatggttactttctgtttgctgatactgtcgataaggtctgccaaatcaggaacaacgagtgacaagaaagcgagcacatgcccacctataaaaaactatcgactggtgtctctccagaatcacgatagcttgcattcctgagtaactcccatcgctggtgccgttttttttagacgcgccacagccacagctcatcattgtacaagttgaaatctgttcttggtcgctaatttg

SEQ ID NO: 1809 - DNA, 816 bp, Zea mays
  Clone ID: ZEAMA-23APR03-CLUSTER13320_115
gcacgagaccattacctagaacatcctaatcgaaaagattatggagggggacataggtgaggtcccctcggtcgtagttcctcttggattggaggtctccgcaactggtggcgctccagcggtggggccgtccattggctcaatggccccgccgcccctagcccctcgctattgagtgcgacgaaggcaggctactcgagcaaggtagcatcggtgatggtggtggtcgtcccgactggctcatccagtggcgctgcagtaatggagacagccaaggttctacctcctccacctcctaccacgcaaatggtggtgctccccacgctgcttgccccaagggaaggatctagggatccccctcttttactattgagggctcaaaggcagaggagcagaggttggtcaagggggcctccgtccgggctaccaaaagcttggagataatcgagggctccctcgtcgctattggggaggcggtggcgattgcccgtgcgtcaattacatgggagatgctccccttcggcacggttgcctctggtgcaatctatgctcaggtaaagaagaagacgtcgaggcggatctccaggagttccaggacgtcgatgagttcgaggattaggctagcgacctcccccagtcagctgcctgtggtgggttgtttacgttgggctacgtttcgattctgtgtactttgatttatattatgtaaatggctctagtctgtaatattattacttactctttattgttattcgaagcattgtgctatgatgagtcatttatgtaatcgttgtgtacgcaaaaaaaaaaaaaaaa

SEQ ID NO: 1810 - DNA, 1268 bp, Zea mays
  Clone ID: ZEAMA-23APR03-CLUSTER13377_2
agggagaaaaatagcaggccgccttgagctggcataggatgcgacggtccggcaggggcagggctcggcggtcgacggaggccaattctttaacttccttcctccgtcgatcatccagcaccagcaggagaatcccgtcgaatccccctccccaacccaagggagcgcgcgcgtatgcctcctccagatccaaagcaacaagcaacagacagcgaggggcaccggggtccgccgcatgtgtgtggttcatggaggatcatgctttcctgcttactgcattagctcctgacgcgccaccctcccctcgcgttcattgatttctgttataattactcacattattattggtaaagaaagatagggcaccgcttctaatttgatgggcattccgttaccgtctcaacgtcaacaacaggtcttttcagcggctcgggcaaaaggcgacaagtcagtgcagagaagatagtgtttgatctaaccccactacaggaacagaggctgcaaagtctgaaggaaaggctaaatgtgccatatgacgaaactcggacagatcatcaagaatcgcttagggctctatggaatgcctcctttcccgatacggagctcactagcttagtttcagaacagtggaaagacatggggtggcagggcgtgaacccagcaactgatttcaggggctgtgggtttgtttcgctcgagaaccttttgttttttgcaagaacatacccggcttctttcaagaggctgatgctgaagcagcaaggaatgcgaactacatgggagtacccatttgcggtcgcgggtgtaaacatctcatacatgctgattcaactgctggagctcaactcagggcgcccgaagtctttgccagggattaacttcatcaaagtgttgacagaacacgaggatgcgttcgacgtgctgtactgcatagcgttcgagatgatggacgcccagtggctagcaatgcgagcctcgtacatgcagttcaaagaggtgctggaggccacaaggcagcagctcgagagggagctctccctggaggatctcaatggcatccatgacctccctgcctgcaacctcttgtacaaatagtgctactggtagttagattatattactgggatgcagtcaaaggaaaatttgatcaggttacatcgtaaccagcatcatcagcctgtaaaaaagaaaaaggaaaagaaaaggagagaagggagacacacatctctggttgtcagtaattcacgtacgccacagttttgcccagg

SEQ ID NO: 1811 - DNA, 1846 bp, Zea mays
  Clone ID: ZEAMA-23APR03-CLUSTER133909_1
aaatatacgattgtgtcgactaattatcgcgtcggggcctcgggggcacggcgtgtcttccatcgctccccttcctcgtgtgcggtgagcgtcgtggggtcgtgcgtcgtggccttgtagacgatttcgagggagagaggcaaagaaacggagcgcgtgcggcgttcgtcggcaacgttggcgtccatggctttccacaaaatctgtggagattattcgaaaccatctcgtcgctcacgaacgcgtcagaggttttgcagaaacggagcgcgtgcggcgttcgtcggcaacgttggcgtccatggagagcaccgcggtccgaggaagaggcagaaggccgcctcggcctctggatccgtggccccgtacttgccccaggagctcgtacggaacatcctcctccgcctgccttccaggtccgtcctccgcttccgcgccgtttgcaaggactggctccggatcgtctccgaccgcgagttcgcgccgaccacaaccgccaccagccggcgatgcccctcgtctccttcctccgcagcgccgccggtagcaagagggggcagacggactgctgcgtcgacgcatttgacctcagcgccgacagtttccggtccgtcgtccggttcgccgacaaggggacgcggtgcagcagcttcgacatccacggctcctgcgacggtctcctccttctcagcttcgatgcccgcttctacgtttgcaacccggcaacgcaccagtggacgcgcctcccggcgcccctccgcgcctcgtggctcgccggcttctaccgccacgagcccaccggagagtaccgggccttgttctaccggggccagtggcccgggacggactactacatcatggtggcggactccaggaaagggaggggaattggcctgccgtcggagaaatatgggtacaagttcaggagacaaccgtatagcctgccggtcctgctccgcggccacctccactggatggcagccattgaaggctacgactacgagatgttggcgttcaacacgacgactgaaaagttcacggttatgtgccctcctgtggttcggtggcacatgtcgctagctgaggtgggcaacgagctcgcgttgttgagctgcggccaccaggtcccgatgctcgagctctggattctgaaggattacgagaacaagagctgggtctgcacgcactggattcggctgccggagttgaagatgagcaccttcgcgttcgatgacttctcgcgaatgattttcgtgtcagaaaagggagttctgatagccaccccggagcagaagctgttgcgctatgacctgaatgggactctgctggaaagcttcccttgcaataatggcagccatctcaagattactccgtacaccttcaaggagagcctcgttcggcatgcattctttgagacaccggattgcaatgccgatggtcatgaagatgaagatgaaccagaaccaccacctttcttcctggggctgtagacccggacccggtggtgatggatctcatgggaacccttggttggagttgatcagcggttcatgcttcagatcggtattacagcctcggtagatgaactgagagtaagctacatttttcttttgtctctcttttatacccatcattccatcaataatgtcactatgtttgtccccttgatgggatgcgggccatgcggcattgtgcaaactgactcccatctctcattagttcgatgttctgaaactatttctgttgcagttttgagtactcctgaacaattgttactgtaaatggctgagttcgtgcttcttgcaataatgcaataccatacaaaaaaaaaaaaaaaaaagcggcc

SEQ ID NO: 1812 - DNA, 2807 bp, Zea mays
  Clone ID: ZEAMA-23APR03-CLUSTER133_47
cctctaagtcgcatagttccgatatctccaaacgagcttaacctttatcggatcgtgattgttctccggcttatcatcctatgtttcttctttcaatatcgtataactcatccagtggaagatgcttatgggttgtggcttgtatctgttatttgtgaagtttggtttgccttgtcttggcttctagatcagttcccaaagtggtatcctatcaaccgtgaaacttacctcgatagacttgcattgagatatgatagggagggtgagccatcccagttggctccaatcgatgtctttgttagtacagtggatccacttaaggaacctcctctaattactggcaacactgtcctgtccattcttgctgtggattaccctgttgacaaagtatcatgttatgtttctgatgacggttcagctatgttgacttttgaagcgctatctgaaaccgcagagtttgcaaggaaatgggttcccttttgcaagaaacacaatattgaacctagggctccagagttttactttgctcgaaagatagattacctaaaggacaaaatacaaccttcttttgtgaaagaaaggcgggctatgaagagggagtgtgaagagttcaaagtacggatcgatgcccttgttgcaaaagcgcaaaaaatacctgaggagggctggaccatggctgatggcactccttggcctgggaataaccctagagatcatccaggaatgatccaagtattcttgggccacagtggtgggcttgacacggatgggaatgagttgccacggcttgtttatgtttctcgtgaaaagaggccaggcttccagcaccacaagaaggctggtgccatgaatgctttgattcgcgtatcagctgtcctgacgaatggtgcttatcttctaaatgtggattgtgatcactacttcaatagcagcaaagctcttagagaggctatgtgtttcatgatggatccagcactaggaaggaaaacttgctatgttcagtttccacaaagatttgatggtatagacttgcatgatcgatatgcaaaccggaacattgtcttctttgatattaatatgaagggtctagatggcattcaaggacctgtttatgtgggaacaggatgctgtttcaataggcaggccttgtatggctatgatcctgtattgacagaagctgatttggagcctaacattatcattaaaagttgctgtggcggaagaaaaaagaaggacaagagctatattgattccaaaaaccgtgatatgaagagaacagaatcttcggctcccatcttcaacatggaagatatagaagagggatttgaaggttacgaggatgaaaggtcactgcttatgtctcagaagagcttggagaaacgctttggccagtctccaatttttattgcatccacctttatgactcaaggtggcatacccccttcaacaaacccaggttccctgctaaaggaagctatacatgtcattagttgtggatatgaggataaaacagaatgggggaaagagatcggatggatatatggctctgttactgaagatattttaactggtttcaagatgcatgcaagaggttggatatccatctactgcatgccacttcggccttgcttcaagggttctgctccaattaatctttctgatcgtctcaaccaagtgttacgctgggctcttggttcagttgaaattctacttagcagacactgtcctatctggtatggttacaatggaaggctaaagcttctggagagactggcatacatcaacaccattgtttatccaattacatctatcccactagtagcatactgcgtccttcctgctatctgtttactcaccaacaaatttattattcctgcgattagcaattatgctggggcgttcttcatcctgctttttgcttccatcttcgccactggtattttggagcttcgatggagtggtgttggcattgaggattggtggagaaatgagcagttttgggtcattggtggcacctctgcacatctctttgctgtgttccaaggtctcttaaaagtgctagcagggatcgacacaaacttcacggttacgtcaaaggcaaccgatgatgatggtgattttgctgagctgtatgtgttcaagtggacaactcttctgatccctcccaccactgtgcttgtgattaacctggttggtatagtggctggagtgtcgtatgctatcaacagtggctaccaatcatggggtccactattcgggaagctgttctttgcaatctgggtgatcctccacctctaccctttcctgaagggtctcatggggaagcagaaccgcacaccaaccatcgtcatcgtttggtccgtccttcttgcttccatattctcgctgctgtgggtgaagatcgaccccttcatatcccctacccagaaggctctttcccgtgggcagtgtggtgtaaactgctgatatgatccgaactgcctgctgaataacattgctccggcacaatcatgatctaccccttcgtgtaaataccagaggttaggcaagacttttcttggtaggtggcgaagatgtgtcgtttaagttcactctactgcatttggggtgggcagcatgaaactttgtcaacttatgtcgtgctacttatttgtagctacttgcagtcagtagtgcctatttcatgttaactgtcgtgactacctgttcaccgtgggctcatggactgtcatgatgtaatctgtatgttggaacttccaagtactgattgagctgtttggtcaatgacattgagggattctctctct

SEQ ID NO: 1813 - DNA, 1634 bp, Zea mays
  Clone ID: ZEAMA-23APR03-CLUSTER134086_1
ggggacctcttctcatcgtcatctccgccgacggaagctgcgtgcgctcgtcgtctttatgctgttccatccaggcttcagttcacaaataaccgccgcactgctggctgctgttaccagcttccttgacgatcgaccagtccaaagctttcgtcatctctttgatcccacgcggcctcacccggctccggctccggctcagcaatcaattccccatacgaattactaatctctctgatttcctttcagctcatcggcatgccgcaggcagcagcagcagcagcagcagcagccgtgcacggcaaggaccccagcaccgtccgtccggccgcgctgcccctgaagctcctccgccctctcctcctcgtggcggtgctcggcacgggcttcctcgccgccgtggccctgctcgtcggcggccccgcctactcgtccgcgctcccgcgcccgccggtcgccctgccgcccgcgccgccgtcgggcggcgggaagcagcagccgctggagcggtgggcgcgggcgccggcgtcccgcgtggcacaacatgaccgacgacgagctgctgtgggcggcgtcgtggcgccccagcgtccggcgctacccgtaccgccggacgcccaaggtggccttcatgttcctgacccgcggcccgctgccgctggcgccgctgtgggagcgcttcttcgccggcgccgggggcggggacgccggcctcttctccgtctacgtgcacgccacgccggggtaccgccccgacttcgcgccggcgtccgccttctaccgccgccaagtgcccagccaggtggccgagtggggcgagccgagcatgttcgacgcggagcggcggctgctggcgaacgcgctgctggacccgggcaacgagcgcttcgtgctgctgtccgagtcgtgcgtgccgctgtacggcttcccggcggtgtacagctacctgacgcggtcgcgggagagcttcgtgggcgcgttcgacgacccgggcccgggaggccggggccggtaccagggcgggctggccccggaggtggtccgcgagcagttccgcaagggcgcagtggttcgagctggaccgcgccctcgccgtcgacgttgtcgccgacggccgctactaccccaagttccgggagcactgccggccgccgtgctacgcggacgagcactacctgccgacggcgctctccatcctggcccccgcgcggatcgccaaccgcagcgtcacgtgggtggactggtcccgcggcggcgcgcacccggccacgttcggggaggccgacgtcggcgaggcgttcctcaggcggctcacggcgcccgggaagggccagggcaactgcacctacaacggccagccggcgcaggtgtgcttcctgttcgcaaggaagctggcgcccggcacgctgcagccgctgctcaggctcgccccgaagctgctcggatacggctgactgtcactgtcactctgactgctcacctctgaatctgaatctgaatcttctccaaagtgacacaaagacacctctgaatctgatttaacacaaaaaaaaaaaaaaaattgataattgatggtataaatatgtactctagactggacgatcgtcatccatcatcgatgtatagatgtagcg

SEQ ID NO: 1814 - DNA, 1051 bp, Zea mays
  Clone ID: ZEAMA-23APR03-CLUSTER134439_1
tcattctgaattttttttttttttttggaagctagtacaaacttttgatccatcaagccatgcacggcatggaacggaacacggggacggggacgttgacgcgaagggactccaaggtccaaaccctacacctacacctacacctaaaaagctacacgggcccgcgctggttttctccatccatcatcaaatttacacagcacaaacactctgccccccccccctaacaaccaaactttccgctccttccccctaccggccggaaccgcatgcagcgggagactaggctaaaacgccgcggacgggcggcgcgggtggaaggggctcgcggcgggcgccgggcgtggggtgcgcgcggccgttgcggcggtgatgcgctcgcagcgcgggcacatggtgagcgcggacgccgggagcggctgccgggtgtgcggggagagcacggtgggcggggccacccgcatcgcgcgcagctcctccacctcccgctgcagccgccggttctcctcggtcagcgagccgaagcagcgcttcaggtactcgcactccagctccgtctgcttaagcttcgtcctagccctgcggttctggaaccagacctccacctgcctgggccgcagcttgagcttgacagccaaggcctccttttgcttcggtgtgagggtgtggttgaggcggaagctctcctccaggaggcgggactgctccttggacagccggagcttcttggcgcggtgcggcccgccggcgccgccgcgctcgtcctcctcctcctccacgctccccattgggaactcctcctcctcgccgccgctcgccggctggttcatgtccaggtccctcatgttgttcccgttcccgctcccgttgttgttgttgcatccaaacccctctgagccagaggaggagctgaggcccgggacagccatggtgagctccaggcctgaaggagaagtggaccccatcgccagccaatgcacaggcacaggaacaagaaaaggggggagatgaggggggagaaggggggcaagcaaagacaaacacagattgg

SEQ ID NO: 1815 - DNA, 2772 bp, Zea mays
  Clone ID: ZEAMA-23APR03-CLUSTER1344_5
gcggcggctcccgaggcgccgcctggcgagcggctaggcgccggtctacggcgacgatggaggtgtgatttggacgggagagagcgtcgtggtgaggtctcggttttctcgatataggagatggcggcggcagaggcgcggggaggggagttccccgtgggcatgaaggtgctggttgtggacgacgacccgacgtgcctcgttgtgctcaagaggatgctccttgagtgccgatatgacgtgacaacatgtcctcaggctacaagagcactaactatgttgcgagagaataggcgtggttttgatgttataataagtgatgtccacatgccggatatggacggattcaggctacttgaacttgtaggccttgagatggaccttccagttatcatgatgtctgctgattcaagaacggatattgtaatgaacggagttaagcatggagcatgtgactatttaataaaacctgtcagaatggaggagctgaaaaacatctggcaacatgttattaggaaaaaatttaatgaaaacaaggaccatgagcattctggtagcctagatgacaccgatcgtaacagaccaaccaataatgataatgaatacgcttcctccgcgaatgatggaggtgatggcagctggaaatctcagagaaagaaaagagagaaagaagatgatgaaactgacctcgaaaatggtgatccttcttctacatcaaagaaaccaagagttgtttggtcagttgagcttcatcaacaatttgtgaatgcagtcaatcacctcgggatagacaaagctgtcccaaagaaaattttggaattgatgaatgtccctggcttaaccagggaaaatgttgccagccatttgcagaaattcagactctacctgaagagaattgctcagcatcatgcaggaatacctcatccatttgttgcgcctgtatctagtgctaacgttgctccgttaggaggactggaattccaagctttggctgcttctggtcagatccctcctcaagctctggctgctttgcaggatgaactccttggtcgacctacaagcagtttggcgttgcctggaagggaccagtcatctttgcgagtggctgcaaccaaaggaaacaagcaccatgaagaaagagaaatagcatttggtcaacccatatacaagtgtcagaataatgcatatggtgcattccctcaaagcagcccagcagttggaggattgcaaccttttgcagcttggcccaataacaaagttggtatgcctgattcaacaagcacattgggaaatgtgggcaattctcaaaatagcaatatgctattgcatgaattgcagcaacagccagacaccttgctgttaggaacccttcacaatattgatgccaaaccttctggtgtagttatgtcatctcagtcgttaaatacattcccggctagtgagggtatctcacctaatcaaaatcccttgattataccatctcaacccccaagttttgtgtcatcaattcctccatccatgaaacatgaatctcttcttggattaccttcaacgtcaaccagtctgttgggcgggcttgatatggttaatcaagcttcaacaagtcaggctttgattagtagccatggaacaaatcttcctggtctcatgaaccgtagctcaaatgcaatcccttcaccaggaattagtaattttcaaagtggaaatattcattatgttgttaatcagaacgctatgggagttagctctaggccaccaggtgttctaaagaccgagagcactgactcactgagttgtagttatggctatattggtggtagcaccagtgtggactctggcttgttctcttctcagtccaaaaatccacagtatggtctactgcagaatcaaaatgatgttaacggcagctggtcgccttcacaagattttgatagttttggaaattctcttgggcaaggccaccctggtaccacttcatctaacttccagagttccgcccttgggaagttgcctgaccaaggacgagggagaaatcatgggtttgtcgggaaaggcacttgcattccaagccgctttgcagtggatgaggttgaatctccaactaataacttgagccacagcattggaaacagtggagacatagtgaaccccgacatatttggatttagtggacatatgtgaaactttcttgaatttgtaagtagcgttgatcagtgagcactggaaacaaatctagtggtttgatgaatggttgctagtaatttcgtttcttcttttttttcttctgtaattggtttataaagggaataatctatgtggcagcatgtggaatcttactttataagtttgttcagtccgctttgcagtggatgaggttgaatctccaactaacaacttgagccacagcattggaaacagtggagacatagtgaaccacgacatatttggatttagtggacatatgtgaaactttcttgaatttgtaagtagcgttgatcagtgagcactggaaacaaatctagtggtttgatgaatggttgctagtaatttcgtttcttttttttttcttctgtaattggtttataaagggaataatctatgtggcagcatgtggaatcttactttatagaagtttgttcagttcaaaggacttaaaattggtcagtcccttgtcatatagcttcttttctttgttctctttttctgtaattaccaattgtagcattatttttatgaccgtcgtaattcagcctagtcgatttattcccggcc

SEQ ID NO: 1816 - DNA, 2328 bp, Zea mays
  unsure (1)..(2328): unsure at all n locations
  Clone ID: ZEAMA-23APR03-CLUSTER13513_4
aacgtgtcctcctacaattgccgacgtagccgtcgtcttcgccagagcagcgccagcgggcccagttcttgaaagggtgcagtgtatccaaggagacaaaggcatcggtctgcagtttcttggctacaaattcaaacagcactagggtgaaatcagtgggcttgagagtagcatcatccttcaaatgatggtggttatccagctgacggtttctctgggaatggcaacacgctattgccaaaaagcacatccgttcgtggcgaggaccatccggttgctgatcctgtactcccaatggattcaatgatgacgccagaaatcctctctgctaatttggcacttgttatggacaagttctcagatgatgacacagatactgaacttgatttggatagcccgacagagggcttcgcgtcgattgcagatgccattgaggacgtacggcaaggaaaacttgtgattgttgttgatgacgaatcaagggaaaatgaaggagatctgataatggctgcctccttggttaccccagaggcgatggcttttatagtaagacatggaacaggaattgtttgtgtcagcattaaagaagatgatctggaaagactatgccttcctttgatggttaccacaaaagaaaacgaggagaagctatgcactgcttttactgttacagtggatgcaaaagagggcacaactactggagtatctgccaaagacagggcaaaaacagttatgactcttgcatctcctgactctaggcctgaggacttcaaccgccctggtcatattttccctttgaaatacagagaagggggtgttctgaaacgagctggacacacagaggcatcggttgaccttgccatgctggctggattacctcctgttgctgtcctttgtgagattgtggatgatgcagatggttccatggctcgcctgccaaagttgcgtgtctttgctgaaagggaaaatttgaagattatatctattgctgacttgattaggtataggaggaaaagagacaggctagttgaacgtgcttctgttgcacgcttgccttctcaatggggcaatggccatgcatattgctacagatctgctattgatggcatcgagcatcttgccatggtgaaaggtgatattggtgatggccaagacattatggtgagggtgcactctgagtgcctcacaggcgacatttttagatcggcaagatgcgattgcggtgaccagcttgcaatggcaattgagatgattgagaaggccggaaggggcgtaatagtttatctccgtggacacgaaggacggggtatcggtctgggccacaagcttcgtgcttataacttgcaggatgatgggcgtgatactgtggaagctaatgaagaacttggtcttcctgtggactcacgagaatatgggattggcgcacagatactacgggacctaggagtccgttcgatgaagctgatgactaatagccctgcgaaatatagtggtctgaagggttatggactgagcattgcgggcangggtgcccttggttacgccaattaccagcgagaaccgtaagtacctcgagaccaaaagaacaaagatggggcatgtatatggattggctaatgcgcaggttaaccagccaagtggtagccagagcacagaagagaagcattgagcccaaaaaagtgatgcagtcttctttttgggagttcctgaaatcttctccctcgatatttccatatattctttttttctatatttccatatattctttctttcacatagaaggccgttttgttcttcaactgtagctgtaggtttcaagatggttaatgagcctaataaaagcaagtttaataatataagcaactgttcttgtaaggagctttacagtctgtcttatatagccgatatgtataatggttagctttcacaatgaatatatgatcaacaaaatttcgctatgattcttcgtttggggagttcctgaaatcttctcccccgatatttccgtagattctttcgcaaaaaagccgatatttcggtagatcgatttgttcttcaattgtaactgtaggtttcaaggtggctaatgaacggtaggtttcaagatggccagtaatgatatacacggagttagtcgtcatattgtactgtgttgagttttacgacttcatcgccttggtgtggttgtcctgatggagttgtgatcgaacggtgtggcttttcgctgccctttccttcacccactaaaaagcatagaatgtggagaattttaccttgagccattatagaagtttataatactttatgtgccccgaaaaaaaaaagaaa

SEQ ID NO: 1817 - DNA, 1135 bp, Zea mays
  Clone ID: ZEAMA-23APR03-CLUSTER13520_3
gactttgcctttttttcttgaaagcgtcgtcgcacatgtacagcagctgccgggtgacctatgtcctcggcgtccgctccacgatcacttgctggattttctggaagaccagccacgccgcgtccgcgctctccataatcccagaaacccatccgctctctagatatgagagcgtgacccattcgctctacagaattgccgcgtgacccattcgctctacagaattgccgccccagcctcctctcgatccacgtgatccacgtctgcgctgtccagggaatgcgaccgtccgcgctgacgccctagatcgtcgccccagcctccatggaaggggatatgcacgccccagcctctatggaaggggagggtccgatgccccgggtctgcgtcccagcctccatggaaggcgcggatctgcagtttccatcgacgacaccctagccccttcaatccgctaaccttccatggacagcgcggatctgcagtttccatcgacggcatcatcgggtatacgcctataaaatgccaagcgtgtacgcccctacaacccatagacgcttatcggcgcacacaaataatctactactgccaggttatgcatggtgcttttggagttcggttacatgccggaaagcaggcagaggtgctgaatcaaattgtctatgagctgccagagtaacacccattatcagagacaaagccactgcgtgaaatccttggacatactgttcctcaggtcatggccggttgcatccttggaatcctcatggctgtcgttatgcttttggctctcgggaggtcttagtcaagtgttgttcaccctatatctcgctggtgatggctacaaagcataaaaacatgatctccccatggttctggctgtccaagtgttcgatagtacaaagttctaaccgaatttagatctggactgtaggtttcaggttgtagctcgagttggttgctgtaaatctgaaagggtcactttcaattccaaccacggtgtaatggaagctttgttatacaatcagcagcggtaagatcattttgcagatcagtatggtcgataccatgccgtcgcatttgctttatactccgttaattgaaaactgcatttgaatatacattatatctagat

SEQ ID NO: 1818 - DNA, 2004 bp, Zea mays
  Clone ID: ZEAMA-23APR03-CLUSTER13556_3
ccacgaaatggaaatggtcacttccaaattgcacgagctggaattatatactcttctgatcttcttcaccgtctctttatagcgtgatatgcgtttctggcttcttgcttacgtgaaggattattagtaaggcgcgtgatggcgctctcagcttccccggctcaggaagaactgctgcagcctgctgggaggccgttgaggaagcagcttgctgcagccgcgaggagcatcaactggagctatgccctcttctggtccatttcaagcactcaacgacctcgggtgctgacgtggacggacgggttctacaatggcgaggtgaagacgcgtaagatctcccactccgtggagctgacagccgaccagctgctcatgcagaggagcgagcagctccgggagctctacgaggccctccggtccggcgagtgcgaccgccgcggcgcgcggccggtgggctcgctgtcgccggaggacctcggggacaccgagtggtactacgtgatctgcatgacctacgccttcctgccgggccaaggcttgcccggcaggagttccgcgagcaacgagcatgtctggctgtgcaacgcgcacctcgccggcagcaaggacttcccccgcgcgctcctggccaagagcgcgtccattcagacaatcgtctgcatcccgctcatgggtggcgtgcttgagcttggtactactgataaggtgccggaggacccggacttggtcagccgagcaaccgtagcattctgggagccgcaatgtccgacatactcgaaagagccgagctccaacccgtcagcatacgaaaccggggaagccgcatacatagtcgtgttggaggacctcgatcacaatgccatggacatggagacggtgactgccgccgccgggagacacggaaccggacaggagctaggagaagtcgagagcccgtcaaatgcaagcctggagcacatcaccaaggggatcgacgagttctacagcctctgcgaggaaatggacgtgcagccgctagaggatgcctggataatggacgggtctaatttcgaagtcccgtcgtcagcgctcccggtggatggctcaagcgcacccgctgatggttctcgcgcgacaagtttcgtggtttggacgaggtcatcgcactcctgctcgggtgaagcggcggtgccggtcatcgaagagccgcagaaattgctgaagaaagcgttggccggcggcggtgcttgggcgaacacgaactgcggtggcgggggcacgacggtaacagcccaggaaaacggcgccaagaaccacgtcatgtcagagcgaaagcgccgggagaagctcaacgagatgttcctcgttctcaagtcgttggttccctccattcacaaggtggacaaagcatccatcctcgccgaaacgatagcctatctaaaggagcttcaacgaagggtacaagaactggaatccaggaggcaaggtggcagtgggtgtgtcagcaagaaagtctgtgtgggctccaactccaagaggaagagcccagagttcgccggtggcgcgaaggagcacccctgggtcctccccatggacggcaccagcaacgtcaccgtcaccgtctcggacacgaacgtgctcctggaggtgcaatgccggtgggagaagctcctgatgacacgggtgttcgacgccatcaagagcctccatttggacgctctctcggttcaggcttcggcaccagatggcttcatgaggctcaagataggagctcagtttgcaggctccggcgccgtcgtgcccggaatgatcagccaatctcttcgtaaagctatagggaagcgatgaaagggcgctacatgtgaagcttaattaatggaagcaaacttgtatttcttgtgcaaaagcttactatatatttctgcaaaacctggtgtgccttgttttgattttcagtcgccaattgtgcctttgtttttatcaagtgatgatctacaaaatatataaggaatctttgaaaaccga

SEQ ID NO: 1819 - DNA, 1300 bp, Zea mays
  Clone ID: ZEAMA-23APR03-CLUSTER13606_3
cacgagggcaaacaccgagcgcagctagcatcatcgtcctgagctgcttgcatctcccagcggccaatcgagctgatagcctatccatcatatggctgcctctaccacgtcgaggacgaactcgcgggtgaactactcgaacgagatccacgacctttccaccgtgcagggcggctccgcggccgccgccgccgccgccttgttctacccggacagcaaatccatcgccgacatcttcccgccgcaccttgggaagaaggtgatctcggaggtggtggcgacgttcctgctggtgttcgtgacctgcggggcggcgtccatctacggcgaggacaacgcgcgcatctcgcagctggggcagtcggtggcgggcggcctcatcgtcaccgtcatgatctacgccaccggccacatctccggcgcgcacatgaaccccgccgtcacgctctccttcgcgtgcttccgccatttcccctggatccaggtgcccttctactgggcggcgcagttcacgggggccatgtgcgcggcgttcgtgctgaaggcggtgctccagcccatcgccgtgatcggcaccaccacgccgtcggggccgcactggcacgcgctcgccatcgagatcgtcgtcaccttcaacatgatgttcgtcacctgcgccgtcgccaccgactccagggcggtgggtgagttggccgggttagcagtcggttccgcggtttgcattacgtccatcttcgctgggcccgtgtccggcggatcgatgaacccggcgaggacgctggcgcccgccgtggccagcaacgtcttcacgggcctctggatctacttcctcggccccgtcgtcggcacgctctccggagcctgggtctacacctacatccgcttcgaggaggcccccgcagccgccaagcccgacacccagaggctctcctccttcaagctccgacgcatgcagagccagtccgccctcgccgccgacgagttcgacaccgtctgacgcccgcccgcccgcccgcccgaagagatcgagtactactgtgtgtgctccctcgctctgttcaagatctcaggtgggagagagctatagctagctgcgcgcgcgcgtgtgtgctggtaggtacatagtccgtgtacgcgtacctacctacgtgtttgtgttttttgtgtcccgtcggccgtcgcctacaccacgtagcagcggatcggagcagtgtcacatgtttttatgtatcttcggctttgtgccacgtcagagttgcaaaggttaattgatgcaaaaaaaaaaaaaaaaaaaaaaaaa

SEQ ID NO: 1820 - DNA, 930 bp, Zea mays
  unsure (1)..(930): unsure at all n locations
  Clone ID: ZEAMA-23APR03-CLUSTER13616_2
acttgcttcaaaggctatattcttggaagaattagtgtgattcatggcaggttctcagagcgcccaagagaatggcacgcatctgaactgaaatggaaactgtgctgtcaccaccactgcaggagtggaggatgtgatcgccgactccaaggcgcacaaggtgctggtgaaggggaagaaggcggccgccgaccccatgaaggtggtggagcgcgtgcagaagaagactggccgcaaggtcgagctgctgtcgccgatgccgcccccgccggaggtggaggagaagaaggaagatgaggcggagaagaagaaggacgatgagaagaaggcagagcccgagccgccgaagccggaggagaagaaggagccgccggtgatcgctgtggtgctgaaggtgcacatgcactgcgaggggtgcctgatagttgtgatcggcgtggtattcgtgtctctgcacctcagttcgtccaatgccgccaaacccagggcttcctcgtctgaatacagatgatgttttgatatgcaaggtcaagagacttttggtactcctatgttctagtagtctatatatttaaccaaatgagaattcgtgttattgtatgataagaattgttcctactagtatatctcatgatatactgatagtgcaatctcgttttttgttgtctaccttggtgttcctagcccccacaaccatttgtacgttggtttttttttaagtttgtttggtcagcaggtcaggcaacaatccagtccatcgaatttgagtacatgatggtcaagattgtttcctggtcgacaagttgcctgcccggctataaacaaaatatgatgtcctagcatgcaaagctcgtcttgtctacagtagaatgtgtaaaatagaagatgcagacaagtttgaaatagaaaatgagatatannnntannnna

SEQ ID NO: 1821 - DNA, 1515 bp, Zea mays
  Clone ID: ZEAMA-23APR03-CLUSTER136634_1
gccattacagtctgacagcgaccccacaggctcgtcctccgtaagtccgtcctcctgtcgctgtcccgctcatgaaccgggcaacaactacggagcgagcggacgaggagatgctgtttcgattttccacttcctcttcctctacctctacctcgggccggaccgcatggctggggcagcgctgggtcggtaaagtggcggctgctgctgttgtggcgctcttgctcctgtcgaccgctcttcccggaggagcacggagagaacccgatgtcaacaacaatggacggagttttgtttttaactatactctgaccaaagctgttgtggaatatgctgcagctgtatatatgacagatctgacggctctatacacatggacatgctcaagatgcaatgacttgactcgaggctttgagatgacttgtataattgttgatgtccagaattgcttgcaggcattcgtcggtgttgatcacaatctcaatgctatcattgtttccatcagggggactcaagagaacagcatacagaattggattaaggacctgatatggaagcaggttaaacttaattatccaaacatgcccaatgctaagttttacgtccagccatcacgaatgctgttcgcaaggcaaggaagctacatggacacagtgacgtaattgtaacagggcattcgatgggtggagcactagcttctttttgtgcccttgatcttgcaatgagctttggaagtaacaatgttcatctgatgacttttgggcaaccacgcgttggcaatgctgcatttgcctcctactttgcccagtatgtgccatacacagtccgaatgacacatgaacgtgatattgtacctcatctgccgccttatttcttcttcctcccaaaactgacatacaagcacttccccagagaggtgtgggaacatgaagtcgatggcaacacaacctatcaagtctgtgatggcagcggtgaagacccaaactgttgcaggagtgtgtttgcgctgttctggagcgcttctgaccatttgacctacatgggagttgagatagcggccgacgactggagcacctgcaggatcgtccttgggcgaggcgtcgagcagctcaaagggagtcttcccaacaacattgttacgtccggacgctccgtcgacgttgtcatcgcagacgatgatacacttcagattgattgacgcagttcagggtagtcgttggtagtcatgcatatagctagaagataagctgttggctgttggtgcatgcttcagagcaaatcaaagggctttcttcctttaatcctttttttttgcttcgtgtggttctttcagccatatgtactatgcagcttgtgaatgtaaagctgtacggaaggtgacatgtttctagcttcgtatatagttggagctcaatacagtcaaaaagaaaaaaaaaataaagctgtacggaaggtgacatgtttctagcttcgtatatagttggagctcaatacagccgaaaaaaaaaaaaaaaa

SEQ ID NO: 1822 - DNA, 2079 bp, Zea mays
  Clone ID: ZEAMA-23APR03-CLUSTER13679_12
gaaaaaaaaggggaaatcggcttcctactccccgtccttatcgccagccgaaccgacatgttttctccccccttctcgccttctccttctccccctagtctagaggcgtttgctccccaactccttcggcccgtccgcccgcccactcgactgatcccaccggcagccatggatccatacaagcaccgcccgtctagtgggagcaactccagcttctggaccaccaactccggcgcccccgtctggaacaacaactctgccctcaccgtcggacagcgaggtccaatcctccttgaggattatcatctaatcgaaaagcttgctcagttcgacagagaacgtatccctgaacgtgttgtgcatgcacggggagccagtgccaagggtttctttgaggtcactcatgatgtctctcaccttacatgtgctgattttctccgtgctcctggggtccagacacctgttattgtccgtttctctacagttgtgcatgagcgtggaagccctgagaccttgagggatccacgtggttttgctgtcaagttctacaccagagagggtaactttgacctcgtgggtaacaacatgcctgtgtttttcatacgagatgggatgaaattccctgacatggtccacgctttcaagccgaatccaaagaccaatttgcaggagaactggagaatagtagatttcttctctcaccacccagagagcctacacatgttcaccttcctctttgacgatgttggcatcccactcaactacaggcacatggagggctttggtgtcaatacctactccttgatcaacagggatggaaagcctcaccttgtgaaattccattggaagcctacttgtggtgtgaaatgcttgctcgacaatgaagctgtgactgttggaggcacctgccacagccatgcgacgaaggatctatatgattccatcgcagctgggaattaccctgaatggaagctctacatccagactattgatcttgaccatgaggataagtttgactttgacccgctcgatgtcaccaagacctggcctgaggatatcatcccgctgcagcccgttggacggatggtcctgaacaagaacgtcgacaacttctttgcagagaatgaacagattgctttctgcccagcgattagtgttcctggaattcactattctgatgataagctgctccagacgagaatcttctcctatgctgatacccagaggcaccgccttggtccaaactatctgatgcttcctgtgaatgcaccaaaatgtgcccaccacaataaccaccatgatgggttcatgaacttcatgcacagggacgaagaggtgaactacttcccttcgaggtttgatcccgcccgtcacgcggagaaggtccccattcctccccgtgttctaacaggctgtcgtgagaagtgcatcattcagaaggagaacaacttcaagcaggctggcgagagatatcgttccttcgaccctgcaaggcaagaccggttcatccagcgatgggttgacgcactgacagaccctcgcgtgacccatgaacaccgtaccatttggatctcctactggtcccagtgcgacgccgctcttggccagaagctgccttctaggctgaacctgaagccgagcatgtaaggatcgacgaggaagaaagcaggcaccggtggccaaggatgcaacgcaacatggagcgtgtgatgtttacaccaatataattgaataaacaggggatgtgcgcgttgtcgtacttatgctgatgctgatggtcggtggtcgattatatatactggaacttctggtgtatgctcttctcttctggggagacgtaatgtaacgaagaagaatgtgtgtcattgtggcctgtggtacaaaccctgctgtatgggcctgtctataagaaaacacggatggagttgtgacgttatgttctgacagtttatttactaatgagcacatactttgatctaactagaacgaagagaagttgacggaactgtcggacagatgcagcaaggatcctcattataatacgaatcactcttcgtttgcattcaaaaaaaaaaaaaa

SEQ ID NO: 1823 - DNA, 2306 bp, Zea mays
  Clone ID: ZEAMA-23APR03-CLUSTER136994_1
ttttttttttttttttttcttctttttttttttttttttttttttttataataataaatattctataatctttatctagttctggtaaaatcattaaacactacagatatttttttatacgtatagatcattgcactaggtgccatagcccatagccaatctaaccctccaagagatcggacaaatttttagtagtgctactggtactaggtcttccatcagcagaaaaagtcaggggatcagggtctcagctctcactgtcagggacatcgacccaggaaccaatggcacaagggccatcaggcatcaggcccgcctaatgcttcctcttgctcaccttccactgcttcactatgtaggctactgcctcgcccatcggtgctctccggtcctccttgaagttccacagctccggtatggggtacctgccgcttggattgtactcgttcatctcaaggagggccttgacgaccacatcgtgcgcctgcacacccagttcagccttcaaagcttgcagcttctcatcatcctcccgaattatttcctttgcctgtccaccaacatctataactttgaaaggatgccattctggttgcctgatctcatcttcccatttcgagcacagaattgacaatgacaactcgtctgctgttttctctttgcaagaggcaaggaaagctttattgtcaagctcacccatttttttgacaccaacaatggatcgagctgatgacatattaactaggtcagtagtcagttctttcttggcttcttccagctcatcattggttcttcgttgcttaataataagggtctggttcatagaatcaatatgctccatttcttcatctttctctttcagtgcttcatgcaacttatcgagcatttccttcgattttgcatcttcctctcccatatacttccatacctcaagattccccctcaacagttctctttccagttcaagtttttgtttggaagccaactgcatttctaaatcatataccatcttcctgacattttctttctcttgctcttgttcctttacaagttttaagaacttctcatcttcttccttcttctttagggttgctaaatagagaagcctgttctcctttgcaatctcttcttttgccgcttcaagcttttctctgttagtactgttcataaccaacttctcaagttcctcgtgtctcctgccaatttcttttttcttggtttccagttctttatgcaatctaatattgtcgttaattattttccaagaatttcgacgagcatctttctgcatatttagtatccctggtggtgctcctcgccggcgtacgggccgaacaagagctgggcacctggcgtaggcgtagggcggcagcgacctagacacctggcgtagtcgtagtagatttgttgcgtcaatttggcgagcataatgagctacacgctcgccagtttctttcagaccctctcgttccaggtcaccaacacttctaagatttccatttttccttagatactccccaattggctcaggtgagttgtaatcatctgtttttgcaagccatccataaaggtcgtcctttctgcaatttcttttttttccaatcaggcttactgtactgctcgagtacaaaatgattttcaaaagccattgcatccttaaatccactccaatccttagcaaacttgacgatagcgcaaaactgttggttctttccatccctaagggttgtggcttggaggggtctgaaccgcgagaactgtgctgttagcctttcttcactttccctggaacattctttgcctttgaactcacactgcaaattaaccacaatgcccatccatggccacacaaagatctcttcatcctttggagtttttggcttgtagggaacaatttgcaatggttgctccaacgtgctggctatatccttctccaagaacatagcaagccccaggtgtgatgccttcaccttggcgctgcgcttagaagcagcccctattcctgtggcatgctgcagtagatcctttaggttgtagtcctgcctcttcttgccagggcagaaagggcagcggaaggcctcaccacgcttcacgttcaatttccctgctcggagttgggcacaaatctcctccttgtgctcagcaatatctgaatcgctaatgtctgaatcttctgcagagctatgttccattggaactggtggtgctcctcgccggcgtacgggccgaacaagagctgggcacctggcacctgccgtaggcgtagggcggcagcgacctagacacctggcgtagtcgtagtagag

SEQ ID NO: 1824 - DNA, 1564 bp, Zea mays
  Clone ID: ZEAMA-23APR03-CLUSTER136_15
accagctcgatcgcgcggcagaagaggataagaggaagcgagtgctgggactgtgcgtgagttgggaagaaggagggggtggcaatggcgttgcggaatggtggtggtggcggagcctgtcccgcggcggttgtgctggtggctgcggccgtggcggcgctgctgggcgccggggttggcggcgaccaagttcgacgacgtggtgcagcccagctgggccaacgaccacgtggtgtacgacggcgacctcctcaagctccgcctcgactccaactccggcggagggttcgtgtcaaggaccaagttcctgtacggcaaggccagcgccgacctcaagctcgtgccgggggactccgccggcgtcgtcacggctttctatgtgactgtcgtcggccggggacaagcacaacgagttcgacttcgagttcctgggcaacgtgacgggcgagccgtacctggtgcagacgaacctgtacatcgacggcgtgggcaaccgggagcagcgcatcgacctgtggttcgaccccacggccgacttccacacgtacgccgtgctgtggaaccccagccaggtggtgttcatggtggacgacacgcccatccgggtgtacgagaacgccacgctgcaccaaggccacggccacggccacggccaccaccggcacggcggcgcggcggcggaggccaacggcaccaacaccaccaccacgacgttggctgctgccccggcgccgttccccgggccgcagccgatggccgtgtacagctccatctggaacgcggacgactgggcgacgcagggcgggcgcgtgaagacggactggtcgcacgcgccgttcgaggccacgttccgggaggtgcgcgtggacgggtgcgcctgggcggccaacgccacggacggcgacgccgcggaggcgcggcggtgcagcgagtcctcgtggggcaaggagggccgctactggtggaaggagaaggagatgtcggagctgagcgtgcaccagagccaccagctcgtgtgggcgcgcgcccaccacctcgtctacgactactgcgtcgacaccgaccgcttccccgtgcagccgcccgagtgcgccggccgctgagttactgagtcctgaccgaccgacctcgatcggcgcggcgcggcgctgctccatgggtggtgggtggtacgtactagtcttgacaatggatggcatggcaatggatggcgtcgggtggggtggaaatggaactgcttgtttctgtttcagcaatggtgtctgtctgtagttctgtttcagctttgtgaaggtcgcattgttggcgacccatgtgtgggtgaaccggcggtggtgtctcttgtagaaacaagtgtatgggattatgggaacgaatgaacgatgccgcgctccgtttcagggatttgctactccacactgtgttcagtgctttgatctgattcctctgtacagaggcatgatttgtgttccctcgaggcttgcagctgtgcctgtgcgtgggtgtacttgaagctactttctcccttctttttttttttactgcggatgcttttaaccgagcc

SEQ ID NO: 1825 - DNA, 2376 bp, Zea mays
  Clone ID: ZEAMA-23APR03-CLUSTER13715_3
aggttcagtcgctcaccattctgccgttcacacctctctcgctgcctttatttcctgttggcgacgctctcgccaggtcttcggcggcccgttcggcgacgactagcgcctccgtttgccaggtcttcgtcgtccgtttcgccgtcgactggtgcccagcagccaggtacatctggaagaatgggggtttaccttagcacaccgaaaactgacaaggtatccgaagatggggaaaacgataaacttaaattcggactttcatctatgcaagggtggcgtgcaactatggaagacgctcactcggctttgctagatcttgacaatgacactgcattctttggtgtttttgatggacatggaggaaaagtagttgccaaattctgtgcaaaatatctacacagagaagttctccataccgaagcctatgctgctggtgacctgggtgctgctgtccacagagcttacttaagaatggatgaaatgatgcggggtcaaagaggatggcgggaactccaagcacttggagataagataaatcagttcactggcataatagaaggcttgatttggtcccctaaagcaagtgattcaaatgatagacatgatgattgggctttcgaggaggtacttgtggaactggcatggttccataattctatactcatcttcctatgtctaggagagcatgccatctgccttttatttattaatttggcacagtcattggatttcattctgaaagtgtcacgggattatcattaataaggtttctttcttctccttcattttttcgctaaaatcattcaatacagaaacttgtaacagtagacttatggttcttgagtacacgtgcaagtgcaactctgatgttttaagacctaaaagggtatgcctacgaaggaaatttgttcttttaacatttaaaattcatacctatgttgcctagggatgctacctcttgaaaaggatatctatgcataagaaggaagtttattcttgtaacacctaaaattgatggatgtgttgcctaacaatgctaactcttgaagaatgacctccaatttcctgaactggagcctcttcttgttttgctggaaggcaaatcttggcatttctctttgttgccagttcttttgttggaaatgaacattccatccacctaggtagtcttatagaaatttcttttatcagggaccacactctgactttactgggccaaattgtgggagtacagcatgtgtagcattagtgagaaataggcaactcgttgtggcaaatgctggtgactcccgctgcgtcatctcaaggaatggccaggtcagttgttactcctaaaagaaaacaggagggattaccctctagtggcatataaagtttgtgggattgtctcattttgtacttcttccacataaaacaggcatacaatttgtcaagagaccataaaccagagcttgaggcagagagagaaaggatacaaagtgctgggggttacattaaaatggggcatgtaaatggaagtttaaacttgtcaagagctattggtatcatttttttacttgcttctttttgttcatacctctcaccttaactgatgtcttgcatatgcaaaatacctttctaggagacatggagcttaaacaaaacaagttcttgtcccctgataagcaaattttgaccgcaaaccctgacataaacattgtgcgtaaattctgcagttgcctctcgctcttgctatgtagactattaagttagcacttccttcttgttgatagttattgtaacgttattcttttgtacaggtcgagctatgtgacgacgacgaattcattgttttagcatgtgatggcatttgggactgcatgtcaagccagcagttggttgatttcatccgtgaacatataaacacatgcaggaggaaagcctttctgcagtatgtgaaggagtgcttgatagatgcctggctccatcgaccatgggtggcgagggatgcgataacatgacgatgatcttggtgcagttcaagaagccatttgctcaggtaaaggatgccagtgatgcggaacaactaactggagatgcgggatgctctgagacccatggggccgaggagaatgactctgacaagcagatatagcgaagacaggactcttttggagtcttggtacatggcctgacgctgaacctgggtaaaacaggagtacgatgttgcaatgtacataccaaccatgcgctgagttggcgtgaaggatatattcattgttccactgttgtctttaaccaaacgtgctgttttcttccggttgtgatttttggtgacctgatcatctgacaatatctaattatacatttgggaggaaaaaaaaaaaaaaacaccac

SEQ ID NO: 1826 - DNA, 2007 bp, Zea mays
  unsure (1)..(2007): unsure at all n locations
  Clone ID: ZEAMA-23APR03-CLUSTER13731_2
attcctctccagtctccatcacaggagcacgcgacgcgcgccacaggaaggaagggaaaaaacatggcggcggcgaacggggacgcgtgccgcagcgtcggcggggtgccgcgcccgacgaaccccatggtgacgccgctgctcaccgacctgtaccagttcaccatggcctacgcctactggaaggccggcaagcacctcgaccgcgcagtctttgatctctacttccggaaaaatccatttggcggggagttcaccatcttcggtggcctcgaggaatgtataaggttcattgctaacttcaagttcacggaggaggaaatcaaatttcttcgatctgtcatgcctgcatgtgaggatgacttctttgagtacctccgttcgatttactgctcagacgtggaggtttatgccataccagagggttatgctgtgttccctaaagttccactgatgagaattgaaggacctgttgctgttgtccagcttcttgaaactccatttctaagtcttgtcaactatgcttctctggttaccacgaatgcggcacggcaccgacttgtagctgggaagtcaaagaatttacttgaatttggacttcgacgggctcaagggcctgatggaggaatcagtgcatcaagatattgttatatgggaggctttgatgcaacaagcaatgttgcagcaggaagattgtttgggataccaatacgtgggactcattcacatgcatttgtgagctccttcatgggtcttgatgaaattactgacaaaacacttactagttctgatggttcaaacacatgtgaagattttatctctctggtgcagaactggctgatcaggattcaggattctagttcattgcatggcacctttggagaaacgagccaaagtgagttggctgcattcacgtcatatgcactggcatttccaaattccttcctggccttggttgacacatatgatgtataaggcagtcggaattaggttggactctggtgatttagcatacctatccgttgaggcccgcaagttcttccatgcagttgaaaaagaatttgtagttgttggctttgggaaaacaagtatcacagcaagcaatgatcttaatgaagaaactatagatgctctgaacaagcaggtaacctacatagtatccattcaaaatatttgacgttgtagcatgtagatttctcttgcagaacaggtttggaaattatgtatattgtaatttctaacattttaaagtttgtgctaatgatatgtgtgatccagtgtttagatataatgaccggagaagatgagccaggtncaaagattggtgaaaggctcntatgtcgtcaccctttcaatgaatcaaagagagcgtacgttgttccacagcatgttgaggaattattgaagtgctactggcctggaaattcatcgaattcacgggaggagcttccatccatccatgagattaggactcggtgtattcaccatctggaccgaatgaggccagaccatatgaggcggctgaacccgacgccttacaaggtaagcgtgagtgctaagctgtatgacttcatccatttcttgtggctcaacgaagcgcctgtcggagaactgcaatgatgaaatgaagtggcggtagggtcggatcccaaacctaactctaataagctgctccgcttatgggtgccgtcggagcaaataacaaactgttgccgccggtgcaatttctgcagtagttttaccatcgcctgcgctctagtaaaatgtgagtatgtgctggtgcatctgtcaaaacagaccatagctgaagtgttacgtcctgcgaacaagaggatacccataccgagttagatctatatgactgaactaattgcaatgaggagcaatcactaaatttgagacaaatttacttgtcttgtcatttatcctaccattctcctctactgaattttatgctttttactgaaccccagttagactgtaaaaaaaaaaaaaaaaaaagcggcc

SEQ ID NO: 1827 - DNA, 1557 bp, Zea mays
  Clone ID: ZEAMA-23APR03-CLUSTER13739_1
gcacgagaccattacctagaacatcctaatcgaaaactcactccctcatcagagctgctgcctcacccccgctaccctgcaaaacgagggttactagggttccggagggatcatagccgcgctgctacatcgaaaataagagttaccatgctcagccagcagaatccgggcggcgagagcgccggcacgcctcctctgtacctcgggatagacttcggcacttccggagcaagatacgccctcatcgacgagcacggggccatccattcggaagggaagcgagcttactgtgcgcctgtcggcgacgccgcgggctgggcgagctcgtggcgagcggcgctcttccagctcctcgccgacgtcccgcctgcccaccgcccgtccgtctcctccatctccatagacggcacctccgccaccgcgctaatcgtcgacagcgagaccggggagcctcctgggcgggccgttcctctacaacgaaggcttcccggacgctctgcccgccgtggagtcggtggcgccggcgaaccacaccgtgtgctcccccacctccacgctctgcaagctggtgtcgtggtgggcggcctcgggcggcgcagccgcgggcgcggcggtgctgatgcaccagtccgactggctcctgtggctgctgcacggccggcccggcggcgtctccgactacaacagcgcgctcaaggtgggctacgacccggagctcggcgcctacccgggctggctgacctcgcagccctactcgcgcatgctgccggccgccgtcagacctcctggggctcccgtcgctgcgctcagagacgacgtgcgctcacagtacggattttctgaggactgcgttgtgtgcgctggaaccactgacagcatcgcggcgtttcttgctgcccgcagaagtgaaccaggaacagcttaactgtgaccaggttacgtcgctggggtcaactctggcgatcaagctggtgagcagagtccacgtggccgacgcgaggttcggcgtctacagccaccgcctggacgacgtgtggctcgtcggcggggcgtccaacaccgggggagccgtgctccggcagctcttcacggacgaccagctcgcggcgctgagcgagcacatcgacccggccgtcccttcccctctcgactactaccccctgccgaagaaaggcgagaggttcccggtctccgacccagacatgatgccaaggctgcagccacgccctgggagcgacgcggagtacctgcacggcatactggaatcgatcgcgcgaatcgaggccaaggggtacagcctgctgaaggagctcggcgcgacggcggtggaggaggtgttcacagcggggggaggagcgcagaacgacaggtggacggccatccgggagagggtgctcggcgtgccggtccggaaggcccagcagactgaggcggcctatggagctgcactgctagcactcaagggcgccaagagcttggctggctagtgtgtcttgttgtgcttggaaattttttaaaaagccagatggtttcatggcttcgtccaaaaaaaaaaaa

SEQ ID NO: 1828 - DNA, 1439 bp, Zea mays
  Clone ID: ZEAMA-23APR03-CLUSTER13742_2
gcacgagaccattacctagaacatcctaatcgaaaaacgctagatcgatgatcaggaacgtacaaagggttcagttcagttttcagtgagtcggcatatgggcaactgcagcagcttcttctctcttccgaaacggggaagcaagctactcaaactcaactcacgaagggataaagaccattccggtgcagagagcctgcgagttcaccacgaactccgtgctctgcgtctgcatcgtcacttggaacatgaacagcaagatgtccgcggaagatgtggcgaagctggtgagctccgacaggaagttcgatctgctggtcgtcgggctgcaggaggcgccgaagccagacgtttcgcgggtcctgcaggaggcgttggcggggacacacgtgctgttgggtcagaagagcatgcagtctctccggatgcttcttttcggttcaaggagctcggagaagtacatcagagagatgaaggtggacaaacacgcggttgggggctgcgggggtatcatcgggaggaagaaaggagcggtggccatgtacatcaacttcagcgggatccggatggtcttcgtgtcctgccatcttgcaggttaattagttttcaatcgccaggccatgctttttccgatcgtcagggggggtatcttgcaggttagttgccatctcgaagtaacaaaggtgtaataaaaaacccgcagctcacgagcacaaggtggagaagaggaacgcggagttccagcacatctcgcagtcgctcttcgccaggtacggcgcgccgacgccgtacgcgcagtctgccgacataacggtgtggctgggcgacctcaactacaggctccaagggataagctcgacaccggcgaggaagatgatcgaggagaaccgccagagcaagctaagaggcagagaccagctgctgcaagaggccgagaagggccaggtgttcagcggctactgcgaggggacgctgtcgtttaagcccacgtacaagtacgacgtcgggagcagcgtctacgacaccagctacaaggtacgagtgccttcgtggacggacaggatactgttcaaggttggccagtcttcaggcctggatgcagtgctgagctcgtacgaatcactcgactgtgtccggagctccgaccacaagcctgtgaaggcgcatctctgtctcaaagtacgcagtgatggtgatgctgactgatatccagctggcgcaggagggtgtcaactggcggttacttctgcagattaacatacatgctacgatgaaaatgttctagtttggaatggtgattatactctagtatattttataacatggcgctcgatcttagcttgtgggccaattgtttcagaacgtgccattctttcttattctttttctccccttttgtttctccttgtacaactaaacccctttttcaaattgggttc

SEQ ID NO: 1829 - DNA, 1657 bp, Zea mays
  Clone ID: ZEAMA-23APR03-CLUSTER137878_1
tttttagctagaataaagctcgctgttttttttttccttatcacccagcatatatttatttgtcaaactcatgctccctcgaatctctttgggagaaatcaaccgaacaaacccggaaatatctcacatagatcatagtccaagctaacattagaacagatcaggtaacaggatcagccatgatgctcactttagtgcatgatcatttggcgagcatgatatccttcaagaactcctcaaacgccatccgcgacggcccgccatcagccagcgcctctgccgccttctcctttgccaacgccagcctctccctgagcttctccccttcctcagactccatcaccagcctcaccttcttctccacctccgccgcgctcaccagctcctcgtcgtagccgtccatcaccaccccggccttgatctcgtccactacgaacaccttgttcaccctctgctcggcgtacatcggccagcacagcatggggacgccggccgacgccgcctccagcaccgagttccacccgcagtgggtcatgaacgcgcccgtggctgcgtgccgcagcacctccacctgcggcgcccacatcttcaccaccatccccctgtcactcgtgcgctccagaaacccctccgggagcagcgagtccaggtccggctcaggacgcgcgaggaagaacttggtcgggtcctccggcgggctccgcacgacccacaggaaccgatgcccggagctctccagcccgcgagcgatctccttcacctgcgccgcggagacggcgcccaggctgccgaagcagaggaacaccacgctccgttccggctgtgcgtccagccacgacaggcacgcgtgccgctcccctttctccgccgcctcctggcccctgacgataatcgggccgatggggtaaaccggcggcgtggggcgaccagggacgcagacgccgtccctgagtgccctgacggcccgcgcctccagccactcgtaggtgttgatcagcaagccccgagcctcggggcacgcggccgtagtgcacgatccgcgaggcgcaggtccgggccgcgcggtcgagcacggtgtgaggcatgtccgaagccgggatcggcgggacgccggggaagtggaggagcgccttgcccatgtctttgaagctgggcccgccctccgtcgtggcgaagtagtggggaaggtggaggaacgcggcgaggtcgccagcgcaggaggtgtagtagaagtaggccgggatgccggcggatgcggccgcgtcgagcgcgtcgccgcagaagaggtcgagcacgagccccggcgacggagggaagggagcggaggaaggcggtgagggaggggactgtgaggcggagcgcgtccagcatccggaggaaggggtccgggtccgggacagggtagtccggcggcgggaggtggtggaaggatacggcggggttggcggcctcgagcgtggcgacggcggatgcggaggaggcgaagaagtcggcagtggacgacggcggggtcgggacggcgattatgacagccaggtcgcggcggaggaggagcttggcgagctccaccatggggatcaggtggcccacgccgaggcaagcgtgcagcaccacggtcgggtgaggactgggctccgccatcagcgtcagcgatgag

SEQ ID NO: 1830 - DNA, 1217 bp, Zea mays
  Clone ID: ZEAMA-23APR03-CLUSTER138232_1
gaggtcgacggtatcgataagcttttttttttttttttttgttgatcatctccttttggattaaattgctgctgaaattgcttaacttgataacaaaaggtacaaggtttagatcttcaaggtctcaatcattcttattcctttagagaagtgttctttgaccccctccaagaagtccgcctctgtaatcctcctgtaccttgccggacgcttctcatccagtaaaccggccgccggctgaagcacattgtcgcgttccaccgcatagagcatggccaacgagatcctctccttctctgcattcgtcacaaccctgtgcactgggctcttgaatatcccgttgctcattatctccaaggagtctcccaggttgatgaccagagtgtgaggaacgaacggaacattgaaccacgtgttctctctctgaacctgcagtccaccgacctcacgatcgaccagaagaaccgtgagaacggggccgtcagagtgagccttgatgcccaagacgagctccggcctcggacaaggagggtagtagttgaatctggcataggcttgagggctagcaccaagctgcttgatgaactcttcctcatcaagctccaagatcttggccatcgctcgcaagattctgtccctcatactcttggtttttgatgcgtactcgtgcagaagatccctgaaggattcagggtatttgggccactgagcaaggcttctttcgtcttcaggctccaccttcagctgcagacggtcgttccagtcaaggatatgatcctgcgccaccactgggtcactgccgtacccttcgagctggaagcgcgtgccttccctcaggttgctgtacttctgcctctcctggagcggctggtggaagaactcccgtgacgcctccatcagatcctccattagagacgcgtctatgccgtggttggtagccagaaaaagcccccaggtctgtagcgccgagcggagcttggctgcctcgtcggcggtcgacagcttgttgaggtcgacgatagggaggggatccggcatgtcagccgcgagcatcaggctgccagggcggtgctcctcccgctgcacgaaccggctcggcggctcgtccacgagggcggccagatctttcactggagtcggcaccgtccatgattcaacagccatcggtgcttgcttattactaccacacacgaagatgtgcccacgggaggtcccaa

SEQ ID NO: 1831 - DNA, 1065 bp, Zea mays
  Clone ID: ZEAMA-23APR03-CLUSTER1382_3
gttttcttgcccctgatggtggatccactggccgccggttttctccagctggagagccattcgtgggcgtaggacgagagagaggatcggcggcggcgtgtgggagatggcgcgcgagaggcgggagatacggcggatagagagcgcggcggcgcggcaggtgaccttctccaagcgccggcgcgggctgttcaagaaggcggaggagctcgccgtgctgtgcgacgccgacgtcgcgctcgtcgtgttctccgccaccggcaggctctcgcagttcgcgagctccagtgtgaatgacatcgttgacaagtacagtacacattctaagaatctggggaaatcacatcagcagccttctattgatttgaatgtagagcagagcaaatacagcggcttgaacgagcaacttgctgaagaaactaatggacttagacagatgagaggtgaagaccttgagggattgagtgtagaggaattgcaccgaatggaaaggaaacttgaagcaggactgcatagagtgattagtacaaaggaccagctattcatgcaacaaatcggcgaattactgcaaaagggcacacagctagaagatgagaacaggcgtctaaaagaacaaatgccccaggtgctaacgggtggcacaatggtggttgctgctgctgcagaaaatatcctcactgaagacgggcagtcgtctgaatctgtaatgactgcattgcattcaggaagctcgctcgactgtgatgatggttccgatatatccttgaagttgtcgttgccttgaaaggaaggaccatcgcatcgcatgttatctgcatgagtggggctgacaccagtgcttctaagaagacaaagactgggatagtcccattcgcggcattatattggtttaaccagatgtgctgtccttgtgcatgtctgtacttcaaagtggctaacgcgaaatttgtatatataatagtgtatgcgctgcgttatcttcgttctaaaaatctgtattgtttaaaaaaaaaaaaaaaaaaaaaaaaaaaaaaaaaaaaaaaaaaaaaaaaaaaaaaccccccc

SEQ ID NO: 1832 - DNA, 1491 bp, Zea mays
  Clone ID: ZEAMA-23APR03-CLUSTER1388_3
cgagaccattacctagaacatcctaatcgaaaaggttccattactggtccctagcaggaagcaggatggagttggcgctcagcttgggggagaccatggcggatgccggaagggacctcatgctggggcttgggatgggggtcggggtgcggagggaggaggaagcgcagagagggaggagggacagggaggtgaggcgggagctggagttcacggcgaggagcgcccggtcgtcgccggagccggcggtgcgactcaccctcctgcacggcctcggcctcccgtggccgccgccgccgtcgtccgagaccaaccggcacctggaggcgtcggcgcgtggcttcgacgtgaaccgggcgccgtcgctgtccgcggccggtggcgccgcggaggaggacgaggagcaggacgaggcggcggcggcggcggcatcgtcgtcgcccaacaacagcgcgagctccttcccgacggacttctccgcgcacgggccaggtggcgcccggcgccgaccgcgcgtgctcccgcgccagcgacgaggacgacggcggctccgcgcgcaagaagctgcgcctctccaaggagcagtccgcgttcctggaggatagcttcaaggagcacgccacgctgaacccgaagcagaagctcgcgctggcgaagcagctcaacctccggccgcgccaggtggaggtgtggttccagaaccgcagagccaggacgaagctgaagcagacggaggtggactgcgagtacctcaagcgatgctgcgagacgctgacggaggagaaccggcggctgcagaaggagctatccgagctccgcgcgctcaagacggtgcaccccttctacatgcacctcccggccaccaccctttccatgtgcccctcctgcgagcgcgtcgcctccaactccgcgccggcgcccgcgtcatcgccgtcccccgctactggcattgcggccccggcaccggagcagaggccctcgtcgttcgcggctctgttctcgtcccctctgaaccgcccgctggccgcccaggcgcaaccgcaaccgcaggcgccggccaactcgtgaggcgctctctactctatctccggcgacgcgaacggaggtggatctggctgtaaatacgatcacctttttttggcttcctttttcttttgttttcacttgatgcggttcttgagattttttttttgtggattgccgatgggttggtttaccggtttattagagcgcatcatctggccgtcggattggactgcggacggccgggtgcagaaaggaagtgctgcgatagagtttattaacctcagtagcatcgatcatgttttgttaccttgctatctatcttggcgtcaatataggccttgaaatccgaagttaccctgatgatgatgaaatgggtggtgtcaccaaaaaaaaaaaaaaaaaaaaaaaaaaaaaaaaaaaaaattggtctaattgccttttaacggatacaagcatatatacatt

SEQ ID NO: 1833 - DNA, 1221 bp, Zea mays
  unsure (1)..(1221): unsure at all n locations
  Clone ID: ZEAMA-23APR03-CLUSTER13898_3
agctcgcccaccctccccgcggatcacagacagcctgtgcccgccttccagtccacaatctccctgcctctcctctcccaccctccgaaaagcaagctccggccggaccgccccaccgcgcgcgcgcatacacacacacgagcatggcgcagcgcgacaagaaggaggagcccacggagctgcttctcggcgtcgaggtcgtcgtcgtcgtcttcgcagccgtcccctacctcctctccctcagcttccgcgccggccgccgcggtgccgcagccgaggccggcgctcctggacgcggcgctgcagctggcgcctccggccgcggccgcgggccagcctgtggaggcctcggccaggacttctgccaaccggtgctccagctgccggaagcgcgtggggctgacggggttccggtgccgctgcggcgacctgttctgcggcgcgcaccggtactcggaccgccacggctgccgctacgactacaggggcgccgcccgggacgccatcgcccgggagaacccggtggtgcgcgcggccaagatcgttaggttctgattcgaccggcgggcggaggaaggaattgcagagaggaaaccgaagattccaagggcggaaggggggaaaggcatgcgaaatcagagaggtcttcagtgttactactatgatgttcttggacgtgtttgatttttaatctccttttatatatatatatatatataattttcctacggaggtgggaggaggagaggtggacgaagaatagtgtaacgatgataatggtggtggttgagggcccgaaacgatgaacacatggggttgggttgggtgtatgtatctgtcacacgcagcttttgtgcaagactattatactacatcgctggtccctccaatttgctcaaaaaaaaaaaaaaaaaaatccgaggggaggaaggtacccaacccaaaggcttgcagtcgcagggcggagaaggggagaaggaaggggttcggacaaggttttcggtgttaatattaatacgcctcctttgattttaatccccttttttaaaaaaatatttgtcctatgggaatgggattgggagaanaggtggacgaaaaaaagtggactaataataatggtggtggtcaagtggcggtggtttaggccccgaaaaaaaaaaaaaaaaaaaaaaaaaaaaaaaaaaaaaaaaaaaaaaaaaaaaaaaaaaaaaaaaagggcgg

SEQ ID NO: 1834 - DNA, 1495 bp, Zea mays
  Clone ID: ZEAMA-23APR03-CLUSTER13909_3
aggtttgcttggtgcccccgatttgcctgctactcgtggcgcgccgctcctaggcgaagggaaggatccgactcaacatggccgccgccgcttctaccatgtccctgctcccgatctcccagcccaggaagcagcagcagcaaggcgcgggcgccgtggtcgtgttccagcggcggccctgggacgcgcggcggaggcgatacgtcgtcccgacggcgaggttgttcgggccggcgatcttcgaggcgtccaagctgaaggtgctgttcctgggcgtggacgagggcgaggggagcagcaagcatctgcatgcgcaccacccggcgccggcgccggcgctgctgccgcggacgtacacgctgacgcacagcgacgtgacggccagcctgacgctcgccgtctcccacaccatcaaccgcgcgcagctgcagggctggtacaaccgcctgcagcgcgacgaggtggtggccgagtggaagaaggtgcgcggccggatgtcgctgcacgtgcactgccacatctccggcggacacttgctcctggacctcatcgccggcctccgctactacatcttccgcaaggagctccccgtggtgctcgaggcgttcgtgcacggcgacggcgacctgttcagccgtcacccggagctggaggaggccacggtgtgggtctatttccactccaacctggcccgcttcaaccgcgtcgagtgctggggtccgctccgcgacgccgccgcccccgcgcccgccgaggacgactccaccgcgccggccgccgcctccatcgccatggagggccagatgcccgtgggcgagtggccgcaccggtgtccccagcagtgcgactgctgcttcccgccgcacagcctcataccctggccgaacgagcaagacatggccaccgccgccggccaggtccgacagcagtagtgaagctgcacctgtacctgtacgtacggaggaagagcctttgccgcagctaataatacactactagcgcgttgtttggtttgctattgctagatgcaagcgtgtgcgtgcaccgtgcagtgcaggtgtggagtggcgtcaacaccttgcatgcacgcgctattctttaattggtagcttagctcagctcagctcagttccacttctacaccttcgtatttggaagtagcttggttgaggttgggggatgaacgtggtcttgttatggaaacaaaagtactcccgccgtttcttcgtttctttttagatgtggctggatagttcaattttgcactatccagcgacagctaaaacaaaacgaaacaagtagtagcttggtcgaggtcggaaatcaacatggtcttgtacatatagctagaacacttgatctctagatggaaaacctgcacgtacacacatatgttgcaggcaaagtatcatccgaagtattcttgaactggaagtcctagatttgtgtagtggtgtacaaaattgcatatggttaattgtttgttcgaccgtaa

SEQ ID NO: 1835 - DNA, 3471 bp, Zea mays
  unsure (1)..(3471): unsure at all n locations
  Clone ID: ZEAMA-23APR03-CLUSTER13911_2
gaatcccccgtcgacgcgcacgcgcagagctccgcatccgcaccggccgccggcggcgtggatggggaagctctccgccctgaagcgggaagcggtcggagtggactaggcgctcggtgacttcctagtttagaagcggtaggtggaggcgatgcggggcggggcgatgaaggccctgcggcgatccagcacctcctcggcgccatcgccaagggtgccgtcttccccgcggtcttattcgtggatccaccgccggtcgcttctcgttacctcgccggcctcgccggcgacgtcctctgtgtctgaatcggcgaatttgcccgcggagggttcggattcagcgccagcgtcagtggtggcagcttcctcgtcgccctcgctggctgcttcgtctccgaacatggaatgactcgggcataggggcacccgaacgccgggccgaaccccgcctccaggtacgcatccccgcggtccggccgcctccagccacctccggccccgcccggctgcacgctgttcccgcaggtcctgcgcgctgcggcgtctttcccggcgccgggtggctgtctggccggcattccgtcgctggcttgggcagccagagctggtgcgggtcggtatagccgaacaggaacttgctctcgaggatggagaatatctcgtagctgagcttgtccgtgtcggctccccccgcatcggcctcctcgtgcagcctctccacctgcatctcctctgcctcgtccatgcccccacccaccgagagcgagaggcagtgcggttaaccgcgtgggagaattataccgctgccggcgggctggtaggtgataagcagcacttcataggacacaatcccgcgcggattcgcaacgattgctgccgccacgacctgctcgcctctcctttgtctctcgctcccttttgagagcagtgtatctggtgctcttttacatgcgacttaatcggctctagtggccggcgccttttgaccttgcgcgcgccagagcacgcgaggaaaggaaggaggcggcgcggaaaggtgcgcgggcgagggagagtcggagtgtgtccaagccatccttgctttagtctcttagattaaaaaaaagctgaatttgtttgctgttcaagtgctctgcaccagttactaggtgattctgtacgctttgatctagttaagtcttgcgcagcagctcgcagtatcaggcgcaaagttctggctcacgtgcagtgctatttgtgtgaaatgtagatggaatgtttgttcaattcattgtaagaactataggagcattttagcctatggggagttgtatctgcgtacgtaattgcatggcagaagttttcaggcgtttccattgtatctccgacatgatttaagcaaaagctctaccgacactgaagtccaaacacctaataacgaaactagattgcataaaggacagcaaaaaaaaactgcatcaagaaaaaactaatatatctcctaagctgaactgaagattagaatttttatatcggcaacgttcgttcctttcatattccatcctcccttgaaacgatttcacagcggcaaatgctccatcacagagcaatgccatattgatatgccatgctgccgcgtcaaaaatatgcagcaggaattccagccgccagcccaagcaagaagaaagagaggcctacatgcccttaacgccacggtcttacggccaccagctcagtccagcgcctacggcttctgcggcgcctgcttgaacgcaacggtgggtgcgatccgggaggctctgctgcggtgctcggcgacgagctctgccgcgaaccagtccagcttctccgcgttcgtctgctccccgactcgcctcccctcgaacagcaccgactccacgttccgctgcttgagcatctcgtccgccgccgcgagcagcgcgcgcacgttgcctggggtcgggtcgtactccccgtccgtaccgcacggcggcatgctctcccgcttcgcctggatgcgcaggtagttggatgcgcggcattggccgaaggcgcgcgccacggcgtggtcgacaaggtcggcggcgccgtcggccgcaatacgggcgatggggcgtgcccactccttgggaccccaccgacgcatgcgccggagttccgcctcgccagcggcgccagagcctccgccagagcagccgccgatggagagcacgaggaggtcctcgaccccgcgcacgaacgggaactcgtgcttgttgtgtagcacgtgcgtgatggcggcggccgccgggctgcccatggtggggccgccgtctacagcggcgcaggacgtggcgccgtccaccgacgccacctcggcgggctcgaagcgtccggcctcggaccacgcggcgcgcccgacctcgcagaggcggaagtcgtagctcccgttctccagtgcgtcggcgcgagagaacaccagcggcgcggacgtcttgaggtcgtagcaagagatgagcacgggcttgatggtgtcccgcagggtgagctcctggccgaacgccggcttcattgccgcctccagcgccgccgttggcgcggccaggggccgcttcttgccgcggcagaagagggaagtggacgaggaggccgcgggcctgcggaacatgcgcggcgcgtggtccgcgacgagccgccacgtgtcgtnggcgtggaacagcggngcgccgcgcgagtgcgtggagaagagcatcgcggcgaacacgccgccggcgccggtgcccgcagcgaggtcgaagtagtcggcgacccgggcgtcggggtccccagacgcgcggcgcagcgcggcctccaggtgcgcaagcgcgcggccgggcagcagcgcccgcaggccgcccccgccgccgtccacgcagagcacgcagaccttcccgcgctgcgccgccttacccggcgccgccgcggacgcctgcgccggcagttccgccgctggcttgggcagccagagctggtgcgggtcggtatagccgaacaggaacttgctctcgaggatggagaatatctcgtagctgagcttgtccgtgtcggctccccccgcatcggcctcctcgtgcagcctctccacctgcatctcctctgcctcgtccatgcccccacccaccgagagcgagaggcaatacagtcaaccgcgttggagaattataccacttccgccgggcaggaaagcgggaagcagtggtgcagaggacagaatcccgcgcggattcgcaacgattgctgccgccacgacctgctcgcctctcctttgtctctcgctcccttttgagatcacagcagctggtggtcgtttacatgcgactcactcgcctctagtggccggcgccttttgatccttgcgcgcgccagagcacgcgaggaaaggaaggaggcggcgcggaaaggtgcgcgggcgagggagagtcggagagagacgaagatttttcgattaggatgttctaggtaatggtctcgtgc

SEQ ID NO: 1836 - DNA, 1106 bp, Zea mays
  Clone ID: ZEAMA-23APR03-CLUSTER1394_4
ggctgtcccgagttccgaccaccgtcctccgcggctccgctccccgccgtgaatccttcctcctcccgcgatggagaccttcccgttggtgaagaacatcctcctactggactccgaggggaagcgcgtcgccgtgaagtactacagcgatggctggcctactctctccgcgaagctggccttcgagaagtcggtcttcgccaaaacccagaaagcgaatgctggaacggatgcagagattgtaatgtttgatggtcaaattgtggtatacaagttcatccaagacctgcacttttttgttactggaggagaagaggagaatgagcttattttagcatcagttcttcagggattctctgatgctgtcgaacgacttctcaagttatctttcctctattgaagtttatcttttcaaacattgtttgttctgttacatgttattgtgttaatgttgattgtatatgaatgtgtttccaaccttggtggtttcaggaacatggttgacaaaaggacagcactcgagaatttggacctgatcctattgtgtcttgatgaaattgttgatggagggattgtacttgaaacagaaggaagagagatagctgaaaaggtgtctggtcacggatcggagggtgcttcatcggctgagcagactttagtcaatgccctaacgcaagcaagagagcatctggcgaagtctcttctcatgtgatgttgtgctttacattttgggggtgacgacggagtatctattattgtgtctggatgacacaattctttttgttagcaacggaaaaaaatgtctgaagcatttgaatgtgtagagtggcacattaattccaaaattctcatggtcatctgtaagccttcaaagttatgcagcttgattgttcttatattgactggttcagttatttgtcgttacttgttttgtttaaccttttccctttggaaacgttaaaatagcaagcttatggagataatttttgtaacttaacaaattagggctacactttgtttaagatggtaatgtctccctgaaaccaaaacattattggaatctgccaaaaattcaccttacaaaaaaaaaaaaaaaaaaagcggcc

SEQ ID NO: 1837 - DNA, 1722 bp, Zea mays
  Clone ID: ZEAMA-23APR03-CLUSTER13992_1
acagttgttgaaccttgactactagctagagagacaaatatccaggccgaaggcgagagaggtctgagcggggagacgacgcccgcgccatggcaggcgccagcgccaccaacggcggaggcaacggcggaggcgggaaggtggtcagcatgccgctgcagtacttctgcgtgctggcggcggtggtggtggccgtgatggtgctgtcgctgtcgttcatgtcgccggcggccatggtggccgtccgccagaacctcagctctgtggcggccgcccccggtggcagcagcaacagcaccgccggcggcgccggagcgggaggcgccgccggcctggccgaggcgtcaccgccggcgggctggaaggagaaggagcaggagcaggcgcggcggccgcccgtggtgctgttcaacttcggcgactccaactccgacaccggaggcgtggcggcggccggcgggatacggatcatgccgccggagggccgcacctacttccaccaccccacgggccggctctccgacggccgcgtcatcatcgactttatctgtgagagtctgggcacgcgtgaactgaacccatacctcaggggaattggttcggactacagcaacggcgtcaacttcgccatggcaggctcgacggtgacccacggcgtctctccctactccttgaacgtccaggtcgaccagttcgtctacttcaggcacagatcccttgagatgttcgaacgaggactggaaggcccggtgagcaaggaggggtttgagagcgctctgtacatgatggacatcggccacaacgacatggttggtgtggcgcacacaccgtccgatcagtgggacaagaagatcacagagatcgtcggcgaggtcagacaagccatctcgatcctgtacgacaacggagcgaggaagttctggatccacggcacgggcgccctggggtgcctgccggcgctggtggtgcaggagacgaagggcgagcaggacaagcacggctgcctcgccggcgtcaacagggccgccaaggcgttcaacaggaagctcagccagctctgcgacgacctccgcttccacctcaagggcgccaccgtcgtctacaccgacatgttcgccatcaagtacgacttcgtcgccaaccacaccaaatacgggatcgagtggccgttcatggtgtgctgtggcaacggcgggccgccgtacaacatgaagcagggaagacccggctgtggcgacctgtgcccaccggaggcgaaggtggtcagctgggatggcgtgcacttcacggatttcggcagcggccttgctgccaagcttgcgatgagcggggagtactccaagcccagggtgaagctggcaagcttgatccatggcggatccaagaaaacgtcagactcttgatgcggaccattgaccgagtcgtgacctttggatccacatctatggaatggaagatgggtagcggtgaagaattggagggatatcttgcaccaggctgtttcttgacgaagattgactccttgtacacactacacagaactactacagaaggcaaagtagcactgggaatgctcagttacaagcttaagttaatttgctgtctttttattttgggattttgtgctgcagagtacagagattttgtaccttgatgtacgtgtaactatttatgatagttcttacaagctccaaaaggaaaaaaaaaaaaaaaaaataaaga

SEQ ID NO: 1838 - DNA, 2961 bp, Zea mays
  Clone ID: ZEAMA-23APR03-CLUSTER1399_46
gcacgagaccattacctagaacatcctaatcgaaaaagagatttgccggctgctggcccctgcctgctgtgcgcccgtgcgccgcgcctccctgcctgttctaagcaactgcaagcagcaatctgcttaacgcacgtcggcgcctcgccggcgcgacgggcacaacagcccgcctggcatttggcccgtgaccgtgagccacccaccctacgcctttggcaccgcgacatgccttgccggcacaccccatcgaggcgtcgaccatccccgccgccgatcacccaaacttcgcacggcaccccgcccaccttcgccgatggagccccacctgcccgctcacctcacgcgcctcctcaagacccaaccgctgcacgccctcctgtccgacgcgtccacctaccgcgccgcacgccacctgttcgacgcggtgccccgcccgacagccgccctgtgctgcgsstttcgtctccgttctctcaaagctctcgctgcaccaggagctcatcgaggccgtctcctcgctacaccgcaggggtggcgccattccgtcgggctgcatcccgcttgtcctaaagtcctgtgcgctgtcggcagcgtcctgccagggcacccagacgcattgtcatgcccttgtgcgtgggatgctaggagatgtgttcgtgcagactgctctggtcgatttctacgccaagaatggcaacatggactcagctgtgatggccttcgaggaaatgccgatcaaggatccgataccgatgaactgcttgatcattgggtattccagatcaggggatgtggaggaggcaaggaggcttttcgacagtatgccgagaaagacgtctgcttcatggaattcgatgattgcttgctatgcacatggcggagagttccaggaagcattgacattgtttgatcagatgttgcgcgagggtgcaagtccgaatgctatcactatcacgacggtgttctccatctgcgccaaaaccggtgatcttgagactggaaggcgggcaaaggcgtgggttagcgaggaagacttgcagaacgtgatagtccacaccgctctgatggagatgtacgtcaagtgccgtgctatcgacgaggcacgtcgcgagttcgatcggatgccacgaagggatgttgtagcatggagcaccatgattgctggttattcacacaatgggagaccacatgaatctcttgagctgttcgagaggatgaaggcgaccaattgcaagccaaatgaggttactctcgttggtgtgttgtctgcatgtgcacagctgggttctgatgaacttggggaacagatcgggagctacatcgagagtcagacactgccacttaccagctaccttggatctgctctgattgatatgtacaccaagtgcgggcatgttgccagagctcgcgatgtcttccaccggatggaacagaaggtggttattgcttggaactccatgatcagaggccttgcactgaacggctttgcagaagatgcaatcgccttgtacggggaaatggtaggagatggggttcagcccaacgagatcacctttctcgcgctgttgacagcgtgtacccatgctggcttggtagacaaaggcatggcattcttccaagagatgaagaagaacaagcagcatgcctctcctcaagttgagcactgcgcttgcatagtggacctcctctgcaagtctggcaggctgtgggaagcctacaagttcatctgcgacatggaagtcgagccaaacgcggtgatctggaccacgctgctcagcgcctgcagagcccacgcggacgtcgagcttgccaagctcgccgcgggcaagcttgtagtactggagcccaatagctcgtcgatctacgttctcctctccaacatctacgctgacgcagggctctggggcgatgtgagggagatcagagacctgatgaggagcaagaacttgcagaagctgtccgcctacagctggatcgagctagacggtgaggtgcacaggttcctggtacaggatacgtatcacccgaggtcagctgagatttacaacgtcgtcgatggcctgggcttgcagctggagaggactagtcctgatcatgagttaatttcagaggtttgctgattaaaattactgtcatgtcagttacaatactttctcgccaaatgtcatgcaatttgtgctctgtaggagtacagttgtagaagcataaaaggtgaaatgcgtcggatattcatgttttttttgtttcagcagctgctgcgttgcgcgcgtgcgtgagatttggtttggtttcgttcccctgcaatgtaatcatgtcgtgactctcaagggattattccgctctgctcttatggtctctgttttctatttaatgattgttattaccatgtagcagtaaccatcgtcatcagtgagaaccttgttgcttctgtctaaaaaaaaaaaaaaaaaaaaaaaaaaaaaaaaaaaaaaaaaaaaaaaaaaaaaaaaaaaaaaaaaaaaaaaaaaaaaaaaaaaaaaaaaaaaaaaaaaaaaaaaaaaaaccccctttcaaaattaaaggtttttgttgttccccaacccaaattccaaaaggccaaaaaataagggcccccccccccccggggaaacaaaaagggccttccaaaaaaaggaaacctttaataacccaatttaaaatttctaattctcgggaaaggggaaaatggaaaaaaaaaattttgaaaaaaggattcccctggaaaattttaaaaaaaaaaataacccaccattggggggaaaattcaacccgtggaattcccccaaaaatggggaaaaaaaaaggttcaacggtggaaaaccccaaggaaaaaaaaattttggggcccccgggaaggaaaaaaaaaccctggccaagggggaaacattaaggtttaaggaaccccaagggttaattaaaaaaaaggtcccaacgggaaaa

SEQ ID NO: 1839 - DNA, 1349 bp, Zea mays
  Clone ID: ZEAMA-23APR03-CLUSTER14001_4
cgtctttgtatccatttgtttggttcttacttcttagttgtgtgccatagagattctaccatccccacgtccagctccccgcctcttccctgctgcatctgcacttgcacgccgctcacacatgctatttttgttcacttgttcttgcttcttgctgtggttgttaaactgacttggtcctgataatcctccgcgttctaatgatgtgctgtcgctgcaccatgcgcgtgttgtcgtcagagcctagggctggtgaagcccatggaggagatgctgatggcggccagcgcgggcgctgcaaatccgagccaaggctcgaatccgaacccgccgccgccggcggcgcccctgacgggcgcgggtagcaccgagcggcgcgcgcggccgcagaaggagaaggcgctcaactgcccgcggtgcaactccaccaacaccaaattctgctactacaacaactacagcctccagcagccacgctacttctgcaagacgtgccgccgctactggacggagggcggatccctccgcagcgtccccgtgggcggcggctcccgcaagaacaagcgctcctcgtcctcgtcatcgtcgtcggcggcggcggcgtccgcttccacctcctcctcggccacgagctcgtccatggccagcacactgggggcggcgtccaagagtccggagctggcgcacgacctcaacctagcgttcccgcaccatggtggccagcacgccgccgagttcccggcgttcccgagcctgcagagcagcaacgacatgtgcgaccccggtggcgggatgacgagcaacggccggggcggcggcgcggggcccgcggtcggcgcgctctcggcaacggagctctggcggagctccggctgctacatgccgctgcagatgccaggagattacacggcagcagggttcgcgctcggggagttccgcacgccgctgctgcctgacgcgcacgggccggggtcgtccggtgctgccgcagcggcggggtacggttgcagcgcggggctgccgcagggcgtgccggacaacgcgggcaggttattgttccctttcgaggacttgaagccgccggttagccctggaggtggtggtgtggccggaggtggtgcaagtgcaaccggtggcgccggcgacggaaatagcagccacgatcagtttgaccacaacaaggagcaaggcggaggcggcagccccggtgccggtgccgggcacgacacggcggggttctggagcagggtttacaatttcggacggaaatttccgaaattttcttgatttgggtggtatccgaaaaatatatgtttttgaaattgacattttaatataaatttttgttt

SEQ ID NO: 1840 - DNA, 1715 bp, Zea mays
  Clone ID: ZEAMA-23APR03-CLUSTER1403_24
agagcagagctgagctgcctccaactccgacccacacccacggcacggcagtcggcagcagccagcgttgagcgcagtgccctcttgtctgctgcctcctacctccccgcccagtctcactcacacgctcccacttccgagtctcgctcgcagcctgttctcctggggtccgatcggaggggggtgaggagatggagccagattcggcgacgacgaggctcgcattgctgggcgctgcttctcctggcggcgcccgcccgcccggcctcggcggctccggtggaggatggcctgctcagcaatggtgactttgagacggcaccagccggcggttttgtaagatctgcgtctgttgctgagggtgcatcgtcaatccctggttggacaatcaatggcacagtcgagctcatttcagcaggccagcaccagggtggcatgatcctgattgttccacagggagaccatgctgtaaggctagggaatgatgctagcgttgggcaggtggtggacgtcgagaagggctcggactacgctgtcacattcagcgctgcccggacatgtgcacaactggaggcactgaaacgtctccgtgctaggtggcgtgtcgcagacagtagatttacagacgttgtacaacatagaagggtggracgcgtacgcgctggcttttcaggcgacggaagagcaggcgcatcttcagttcatgaaccctggcatggaggacgatccaacttgtggccccatcctagacaacgttgctgtcaagaagctcttcactccggacaaaccaaaggataacgtggtgctgaatggagactttgaggagggcccttggatgttcccgaacaccagctttggcgtgctgctcccaactaaccttgatgagcagacatctgccatacctggctggatgatcgagtcaaaccgcgctgtccgctacatcgattctgatcagtacaaggttccccaggggaagcgtgccattgagcttctgtcaggcaaggagggtatcatctcccagatggtcgagacgacccctgagaaggtttacagcctgacggccatgctgggcgcggcgggggactcgtgccaaccaccaatggccatcatggcgttcgccggggaccaggcccagaacttccattactcaccattgggcaacgccacgagccaggctgtgaacgtgacgttcactgcgcgtgctgagaggacacgcgtggcgttctacagcgtgtactacaacacgaggagtgacgaccacagctcgctgtgcgggccggtgatcgacgacgtccgcgtatggggcttgaacaccgcggctgggttgaaggcgagtgctggactggttcttggcattgttggcgtcgttggcatggtgctgttctgaaatctggatctctcagtggctgtagcctgtagtcttgggaagcatggatgtgtaatctcatctgttagttcgaggaggggcagggcttactggttttggtagtaagcttgaagtttgtcgagtaatatgagcttaggctaaaaaaaaaagctaccagaacccacatgttattgcctgtgttacttcatttgtgattcctgaagtaacatgcaattctatgggattgtgtggtttgtttgccctagcttgtactgtaatatgagatgttagaactgttacaagttcatctcctcacaatatgaaaatattgttattgtaaaaaaaaaaa

SEQ ID NO: 1841 - DNA, 1747 bp, Zea mays
  Clone ID: ZEAMA-23APR03-CLUSTER1403_30
agagcagagctgcctccagacgagacgaggaggacgcggcgccgctcgggcttggcagcaaccagcgtcgagcgcagtgcccttctgtctcctatctccccgctgcccagccgggtctcactttccagtctccgagactctgagtctcgctcgcaccccgtcccccgcagcctgtgctctgggttggagggaggtgagctgcgagggagcgcggagggggcgaggagatggaggcagattcggcgaggaagagacttgcattgctggccctgcttctcctggcggcgcccgtccgcccggcctcggcggctccggtggaggatggcctgctcagcaatggtgactttgagacagcaccaagtggtggttttgtaaaatctgcgtctgttgctgagggtgcatcgtcaatccctggttggacgatcaacggcacggttgaactcatttcagcaggccaacactagggtggcatgatcctgattgttccacagggggaccatgcagtaaggctagggaatgatgctagcgttgggcaggtggtggacgttgagaagggttcggagtatgctatcacattcagtgctgcccggacatgtgcacaactggaggcactgaatgtttccgtgctaggtggcgtatctcagacagtagacttgcagacgttgtacaacatagaaggctgggatgcgtacgcgttggcttttcaggcgacggaagagcaggcacatcttcaattcatgaaccctggcatggaggatgatccaacttgtggtcctatcctagacaacgttgcagtcaagaagctcttcaccccagacaaaccaaaggataacgtggtgctgaatggagactttgaggagggtccatggatgttcccgaacacgagcttcggcgtgctgctcccaactaaccttgacgagcagacgtctgccatacctgggtggatgatcgagtcaaaccgcgccgtccgctacatagactctgatgagtacaaggttccccagggaaagcgtgccattgagcttctgtcaggcaaggagggtatcatctcccagatggttgagaccacccctcagaaggtttacagcctgacgttcacactgggcacggcgggggactcgtgccaaccaccaatggccgtcatggcgttcgcgggggatcaggcccagaacttccactactccccaatgagcaatgccaccagccaggctgcgaatgtgacgttcactgcacgcgctgagagaacacgtgtggcgttctatagcgtgtactacaacacgaggagtgacgaccacagctcgctgtgtggcccagtgattgacgatgtccgggtatgggcattgaacgccgcggctgggttgaaggcaagtattggactggttcttggcgttgttggtgtcgttggcatggtgctgttctgaaatctgaatctctcggtggcagtggtcttgggaagtatggatgtataacttcttctgttagttggaggcttactagttttggtagtaagcttgaagtttgttgagtgatatgagcttaggttaaaaagctacgagaacctacatggtattgcttgtgttacttcattggtgacatgcagttgtatggtattgtgtggcttgtttgccctagcttgtaatatgagatgtcagaattattcgaagatcatctcttcaatatattagaaaagagtaaagtgtaaaataaaaaaaaaaaaactcgagactagttctctctctcctcgtgc

SEQ ID NO: 1842 - DNA, 1731 bp, Zea mays
  unsure (1)..(1731): unsure at all n locations
  Clone ID: ZEAMA-23APR03-CLUSTER1403_37
tccccttttttttcccccaaggcccccaaaattccccccccttaaaaggggacaaaaaaggggggggttcccccccgggtggggggcccttttaaaatttaggggttccccccgggctccaggaatttcccccggagccctttccttggaccttcttattggaaaccaattgcagcacgccgacctcccccgtatccccgcttctccgccgccttcccgtcctgcgcaacaacacgcgcagcacaattgcagcacggccgtcacgccgacctcgcccatatccatccctgcttccccgccgccctcccatcctgcacatccatcccgccgccctgccgctttctttcaccgattaatttattctctttaaaccccataggcctccagcaaaggtcccaatctcgtgctgaggatggagaactgtaacaacggacaggcggccgccgtatccatggacgatttcaaggtggtggtgccggtgcatccgctgatcagccactgggtctcagtactccgcgatcgctccaccccttcccacgccttcaggagtgcaatgggggagctagggagattgctaatctatgaggcaacacgagattggttgccgacagtaacacggcagatccagtcacctgtgggcactgaggttgttgaatctgtcagtgagatggagccaataatgattgtacctattcttagagcagggcttgcacttgcagatctcgcaacatcaattttgccttcaactagaactttccatttaggtatggcccgggatgagacaacactgatggcctctgtttacttaaataagctacctgatagattcccgaaaggatgtaaaatcctcattgtggatcctatgctagcaactggtggaacagtcactgcagcagttgatctggttatggaacgtggagctgaaatcagtcagataaaaattatatcagctgttgctgcccctcctgccctcaagaagctcaatcaaagattcccaaggatttgtgtgtatacaggagccatggatcaaattgtaaacgagaaaggtttcataatcccaggccttggggatgctggagatcgcagctatggaacatgactccggcccttcggtgatggccatcgttaggaatttcagcaaaacccagatttagttgatgcctgcttattttcgtagatgagatttgtggttccactgaacacaaatctgtagttttgagggtctggacataatattttgacaatgtgatgtcaaatttcgcccttctattgtggcgatgtcctgataatggttatgagcttcatggagtgtttattttgagaagtgggatagcctgcaatcaccgtagctctaaacaaaaaagaaaaaaaaaaaaaaaaaagcttatcgaattcccgtccaaccccaaggggggggcccggaacccaaatttccccccaaaaagggggggggatttagcgggggttccttgggccggggtttttaaacacgccgggggtgggggaaaaaacccgggggggtaacccaaaatttaatcccccttttgggaaaaatccccccctttttttcccaagggggggggaaataaaaaaaaaaaagggcccccgccaaagatttctccccttttcccacaaaaagtgtggcccccccctttggggtgggggaggaaggaaaaaatttttntncccccccccctaaaaaaaattatttttttttgtaaaaaaaaaacc

SEQ ID NO: 1843 - DNA, 1486 bp, Zea mays
  Clone ID: ZEAMA-23APR03-CLUSTER140567_1
ccggcaccggaagccgcttcatagtttcagggcttttttttttgtttttgaagccggagaagacattatttcatcgcagagctgacgagtcaaatcagaaatactactacatgatataccatcataaggtaacagtaccagcacaactgttttaactggaacctcagaactgttactgtctataggaacctacatccgagtttcaaccaagagagctggtcaggaagtcgagcacgcatcggttcagctcctgaaattctgtttcagaaagagctgcttcaaccaaaaacctgcgtatgtttgcttcagaggcctcctcgtagtccttcctccgcttcagtaccagatgaccactgagctcccagattgctggattgattctcatgtcgaggaactcttggctcgcctttccgagaagctgcttctccgcatagcactgtggtagaaggaaaattctcttgccagattcagagatgaggacattgaaaggtctgttgttctcttgcaggaagatgcagactttggagaccacatctgacaaatcttccaggctcgcaccaccttcgaacacaaagccattgactgggtaatccaccaggtgaaaaatgctcacgctattccctagggtcttgagcttctccgtgattgccttttcaactggatactgtactttcaggtagtatgcctggaagtgaaggtggttgatagttgcaaagccgcccaggctgttataaccaactctgaagaagggagtccttgcttctcttgcaacatacatggctattaagaagctctcttgatcaatcctttgcggcaaacagtcctggatcttgggagtcaatagcacatggcagtagccaattgggctcacattaatcaagatggcactagaagaagctgaaacagtatcaggaacaccatcaaaatattgtgcagggtctttctcagtgtcattgaatctaaagatcacctccaacgggctgacttttgtgaaattgaacttctcactaacaaatggctggagaacttggttcattgtgaactcagttggccgcttcttttggtcacgtccttcaattaatgttgccacaaaattatgtactccaggtagcacctttgtttcacaggaactgatgtcatggtgaaacaagccccttgtcttgcgatcatcccactcattaaaaagtttgagtagaaacggagacagatttgaaccttcgtgctctgtcagatcaaagctagtgccatccatggttagttttgttgcagctgaaagcaatgccaaaataaatatacaggaatcagacagcgcctttcctagcacaaaaaacaggcggcaatggcgcccaaggattggagtctcactaaagcaggttcccgaacgaggtttcctactttcctctgagatttcggttggatttcagagcaaagacagcagtagaaactgcaaaactgagacgaaagggatagacgaagatggcagatt

SEQ ID NO: 1844 - DNA, 1743 bp, Zea mays
  Clone ID: ZEAMA-23APR03-CLUSTER14073_1
aaattagaaaacctgaaaacctatcctacaagatacactcttcatccaccccttacgctcagacgtcactagctagccatcatcacacaggcagcatggtgatgaaagaagcagccgaagagcacgatggccgccgcgacgtgaccgtcacggtggagccggcgctgccggtgcagcaacaccgcctgccgctgtccaacctggacctcctcctgccgccgctcgacgtcagcctcttcttctgctacctccacccggcgcccaccgcgatcgctctcaaggaggcactggccaagacgctggtggcgtactacccgttggccggggaggtggtggccaacggcgatggggagccggagctgctctgcagcggccgcggcgtggacttcacggagacggccgcggccggagtcgagctgcgggaggtccggctgggcgccgtggacgaaggcgttgagaagctggtccctgtcaagaagaccggcgtgacgatggcggtcaagctgagcaagttcacgtgcggcggcgccgtcgtcggctgcaccttcgaccaccgcgtctgcgacgcctactccttcaacatgttcctcgtcgcgtgggccgcagccgcccgtggcagctctgcgccaccaccgccggacccgtgcttccgccgctccctagtcgccccacgcgacacaccacatcggcgcgcgccgtccaccgacgccctcatcaaccgcctcttctctcctcgaagcgccgcgccaccgcctccacccgccgccgcaggctccgtcaaccggatctaccgcatagccgccgaggacatcgccgcgctgaaggcctcggcggggccggggcgcacgaagatggaggcgttcacggcgctcctgtggcagctctgcgcaagggcggcctccccgcgccagagccagtgctgcatgggcgtggtcgtggacgggcgcacccggatgttcccggacggcgccatgaaggcctacttcggaaacgtgctcaccatcccgtacggcgtcatcggctccgaagacctgcgctgcatggccctcgctgacgtggccgacgacgtgcaccggtgggtggcggaggccgccaccggcgaccatttccgcgggctcgtggactgggtggaggcgctgcggcctaagccggccgcggcgagggcgtacctgggagggaccggcggcaacgaggcgatggcgtgcatcgtgtcgtccggtatgagcttcccggtgggcaaggccgacttcgggactggcctccccgcgttcgcgtcgtaccatttcccgtggcccgccggcgccgggtacgtgatgccgatgccgagcgcgcgcgggaacggcgattgggtggtgtacgtgcacgtggcgccggaggtggcgaaggtgatggaggagtccaccgtgttccaagccctggtgaacagctatgcgtttgaatgatgatggagatgggccggcatattcgtggatgcgcgcgcgttgccgtccacgcgtgtgtctagagctagtgttgatgtgcatacggcatggagttctcactactcagcagtgctaccaatttgcctcgttggttactatgtttgccagaaaataataatagtaactccatgcatatatgtcacgtgacatatgtgtaattaacaaaaaaaaaaaaaaaatgcctagttaaattatgtggagaaatgtatatttggtgcctccttttggaaacccggtgggaagttagtcctatcttttgggc

SEQ ID NO: 1845 - DNA, 2664 bp, Zea mays
  Clone ID: ZEAMA-23APR03-CLUSTER14075_2
atataacagacccaaaaggttgtcccattgcaagaccaataaatgacggactttccaattttagcccatgtttctgacaataaagcacgattccagaagataatatgaatttccagtctgaagcagactggatttgaaatccaaatatacgattttttttatatgcttccagaggtattatcttgatggtacactgcctctgcttcacaatccttgtcagactgtaaaatcatattaccaaagcattcttcataagcctattatgcaatggaaatgcaagctacacggtcagccatgtgctgcttgctcacgagcaagagctcagacggagacataacgtaccgatacacacttgagttatagggcaagcctaatttacatgtacttcttattggaaggatttttatccattctgcttctcgtacactacgctcttctgccttcagctgtttcagtaactgatgacgatgagcaaaccaatcgccgtgacgatgatggtcgacgggaccccgaaccggaggtggctccagaaggtgaggttgtagccaaagaactgggcccgcctggcctgctcgcagacaatcagattcgccgcagagcctaggagggtgaggttcccagccacggtgctgacccatgcaaggatgagccaggctttcctctctgaaccatgagaaatcgaagccgctgatgcagccactcttgtaccgagcaataggactgtaggaacattagaggccacgtttgaaaggataagaatcaccacagcaagaagtgcaacacctttagcgctatcgattcgtgaatatggttccactaactcccatagtgtgttcggtatgcccgttttgttgaagccatcaacagtgataaacatcccgcagaaaaagatcagcagtgaatatgacaccttctcgagacaagcttgtgcgtccgtaaaatcgagtgccagaagaacaagagctgcagtgattgcagtccaggacatgttcagtcccattagaagtgcaatgagcataccgagagtgataagataaacagcagtcttccacacaagtactttccatctcttctctgcaacttcagtttctttctccttttccccattaatctctggggagggtgctaaatcctctattatcacgctcctttgctggctggcagtccttgtgaacttccttgaggatgcaccttcatctctccgatcaggaaccgtcgagacctctaccatctcatgcgacatgcttgatgcccgcagagacttgatcgcaagctgaatgtcagcctcagaattgatgcttctgcttctcaggttctcattcccagtagtactgacactgttgctcctgatgatcggttcgcttacgcaatccatgtcatctggattcagagaagaaacatgtgacattctagccggtgtgaaccgatgggaagtaacctcatcgtcggcaaccacctctggtcctgtgggctgcccaccctcctgatccttctccaccgacaagtatttccagaagtacaaaaggaggatagcagcgtttgtgagaaccccaacgatcatagctgggaaaactcccagcaagaactggccaaatgagatcccactctcgacagctatgacaaggttctgagggttgccgatcggcgtggcagcagagccgatgttcgaactagtggcaagggccagaaggaaaggctgtggtggcaggttgttttgcctagcaaccttgaggatgaactctgtgaggacaacacagcatgtgtcattggtgaaaagcgcgctggcaaacgcggacacgatgcagactcggaagagcaggtccttgctgcctctgctcttccacgagagcaggttcccgaggtacttaaacatgtcagccctctcaaggaagatgctgacgaccattgtcccgaagagcaggccgatgatcgggaggtcaatcgcggcgtacgcgtcctccggggagatgacgcggaacaggaccattagcatagcaccaaggagggacccagccgtccgcccaacaggcatgaacgggacggtggggaagacggccatcacccagaaaatcccaaaggcgatacatcccagcactactttggaggtccctgccaacgccatattagcaaatccttctcttcctctacaactaaaactcttaacaattgcacttcaagaacctgtcacgactcacaaattaaagagagagtacagaacaacccccccagataccaaggacggtcagatcgactgggctcacgagaaggatccctgctggaatgaaccacctctcctcgcccaacttaactcgaggtcagcaatgcccggctcgatcgcgcgtaggcgtagcgacgaaggggcgcgctagcttgctcgctcgcgccttcaactgctttttggccggtccaaggattggactgtggcaagccggccgccgccgccgccgccgacgccaccagacttttcttgtgctgctagctgggtgcggtggcgagcgcgcgctggcggtggacgacggacggatggatggatggatgcacgcgcgcgcggcctaccggcggctgcctccgtatatgctgagcgagcgaggcggccttagctagcttgttatgtttgatacgcccgtccggctgctggtccggtacgtgtctccggtcggccgg

SEQ ID NO: 1846 - DNA, 2507 bp, Zea mays
  Clone ID: ZEAMA-23APR03-CLUSTER14075_3
gccaaagcattcttcataagcctattatgcaatggaaatgcaagctacacggtcagccatgtgctgcttgctcacgagcaagagctcagacggagacataacgtaccgatacacacttgagttatagggcaagcctaatttacatgtacttcttattggaaggatttttatccattctgcttctcgtacactacgctcttctgccttcagctgtttcagtaactgatgacgatgagcaaaccaatcgccgtgacgatgatggtcgacgggaccccgaaccggaggtggctccagaaggtgaggttgtagccaaagaactgggcccgcctggcctgctcgcagacaatcagattcgccgcagagcctaggagggtgaggttcccagccacggtgctgacccatgcaaggatgagccaggctttcctctctgaaccatgagaaatcgaagccgctgatgcagccactcttgtaccgagcaataggactgtaggaacattagaggccacgtttgaaaggataagaatcaccacagcaagaagtgcaacacctttagcgctatcgattcgtgaatatggttccactaactcccatagtgtgttcggtatgcccgttttgttgaagccatcaacagtgataaacatcccgcagaaaaagatcagcagtgaatatgacaccttctcgagacaagcttgtgcgtccgtaaaatcgagtgccagaagaacaagagctgcagtgattgcagtccaggacatgttcagtcccattagaagtgcaatgagcataccgagagtgataagataaacagcagtcttccacacaagtactttccatctcttctctgcaacttcagtttctttctccttttccccattaatctctggggagggtgctaaatcctctattatcacgctcctttgctggctggcagtccttgtgaacttccttgaggatgcaccttcatctctccgatcaggaaccgtcgagacctctaccatctcatgcgacatgcttgatgcccgcagagacttgatcgcaagctgaatgtcagcctcagaattgatgcttctgcttctcaggttctcattcccagtagtactgacactgttgctcctgatgatcggttcgcttacgcaatccatgtcatctggattcagagaagaaacatgtgacattctagccggtgtgaaccgatgggaagtaacctcatcgtcggcaaccacctctggtcctgtgggctgcccaccctcctgatccttctccaccgacaagtatttccagaagtacaaaaggaggatagcagcgtttgtgagaaccccaacgatcatagctgggaaaactcccagcaagaactggccaaatgagatcccactctcgacagctatgacaaggttctgagggttgccgatcggcgtggcagcagagccgatgttcgaactagtggcaagggccagaaggaaaggctgtggtggcaggttgttttgcctagcaaccttgaggatgaactctgtgaggacaacacagcatgtgtcattggtgaaaagcgcgctggcaaacgcggacacgatgcagactcggaagagcaggtccttgctgcctctgctcttccacgagagcaggttcccgaggtacttaaacatgtcagccctctcaaggaagatgctgacgaccattgtcccgaagagcaggccgatgatcgggaggtcaatcgcggcgtacgcgtcctccggggagatgacgcggaacaggaccattagcatagcaccaaggagggacccagccgtccgcccaaaaggcatgaacgggacggtggggaagacggccatcacccagaaaatcccaaaggcgatacatcccagcactactttggaggtccctgccaacgccatattagcaaatccttctcttcctctacaactaaaactcttaacaattgcacttcaagaacctgtcacgactcacaaattaaagagagagtacagaacaacccccccagataccaaggacggtcagatcgactgggctcacgagaaggatccctgctggaatgaaccacctctcctcgcccaacttaactcgaggtccttcgagtaggggatggagtatggggcgggtagtccacactgctgcctgcgagcgcgcggacgaggcggcggatcggtgtggaaggctttgcaaggcagaggtggtggagtgaggtgtgaggacgagacgaagtggtggtagactggtagtcctggagtctggactctggactgcaggcatggagaccccgccgcgatgtgagtgggggcggctaaataggcgggccgcggggggtgtcgccatggcccgtggccgtggctgtgcaccatgggagccgcgtgagcgtgtttttcgattaggatgttctaggtaatggtctcgtgcataggcttatgaagaatgctttggtaatatgattttccagtctgacaaggattgtgaagcaaaggcagtgtcccatcaagataatacttctggaagcatat

SEQ ID NO: 1847 - DNA, 2473 bp, Zea mays
  Clone ID: ZEAMA-23APR03-CLUSTER14079_1
aggtctaccttccgatattccactgtcttgtttccattctcccctcctctccctcccccgacagctgcccccgcatggtgtgatcaggccatctggtgcgggaagaaaaggcgcgacacagcgagccatgctcccgccgcgcgccgccgccgtgccgctgctgctgctggccctggcggccggcgcggccgggggcgccgacgacctggcatcggacgccgcggcgctgcaggccttcctcgcgcccttcggatccgcgaccgtgtcgtggaactcgtcccagccgacatgctcctggacgggtgtcgtctgcaccggcggccgcgtcacggagatccacctgcccggggaaggtctccggggcgcgctccccgtcggcgcgctaggcgggctcaacaagctcgccgtgctgtcgctgcggtacaacgcgctctccggcccgctgcctcgggacctcgccacctgcgtcgagctccgggtgatcaacttgcagtccaacctcctctcgggggagctcccggcggaggtgctggcgctaccggcgttgacgcagctcaacctcgcgcagaaccgcttgtcggggaggatatcgccggccattgccaagaacgggcggctgcagctgctcttcctgaacggcaaccgccttaccggagagctacccaacgtcagcatgccgtcactcaccacgctaaacgtctcgttcaacaacctcagcggcgagatacccaagagcttcggcggcatgccggccacgtctttcctcggcatgccgttgtgcggcaagcccctcccgccgtgccgagcgccgggttcggaagcatcgccgtctcagtctcccacgctccggcccgaggcaccggccccgactgacaaccgcggacggggcaggcatcacctcgccggcggcgccatcgctggcattgtggttggctgcgcgtttggcttcctcctgatcgcggccgtcctcgtcctcgtgtgtggcgcgctgcggcgggagccgagaccgacataccgcagccgtgacgccgttgcggcggagctggccctgcacagcaaagaggcaatgagccccaacggctacactccacgtgtctcagacgcgcgaccgccgcccccgccttcagtcccgccaccgccagccgtctccgccgcagccgcggggcggaagaagctcttcttcttcggtaggattccccggccctacgacctcgaggacctgctccgcgcgtccgccgaggttcttggcaagggcacgcacgggaccacgtacaaggccgcgatcgagtctgggccggtcatggcggtgaagcgcctcaaggagacctcgttgcccgaacgcgagttccgggacaaggtcgcggccatcggcgggatcgaccacccaaatgtcgtgcccctgcaggcctattacttcagcaaggacgagaagcttatggtgtacgagttcgtggccatgggcagcctttcctccatgcttcacggcaatcgcggctccggccggtcgccactgagctgggagtcgaggaggcgcatcgctttggcctcggcgcgcggtctcgagtacatccacgccacgggctccatggtgacgcacggcaacatcaagtcgtccaacatcctcctgagccgcaccgtggacgcgcgcgtggccgaccacgggctcgcgcacctcgtgaaccccgcgggcgcggcgacgacgacccgcgtcgcggggtaccgcgcgcccgaggtggtggcggacccgcggcgggcgtcgcagaaggcggacgcgtacagcttcggcgtgctgctcctggagctgctgacggggaaggccccggcgcacgcggtgctgcacgacgagggcgtggacctcccgcgctgggcgcggtccgtggtgaaggaggagtggacgtccgaggtgttcgacacggagctgctcaggcacccgggcgccgaggacgagatggtggagatgctgcggctggccatggactgcaccgagcccgctccggaccagcggccggccatgcccgagatcgtggcgcgcatcgaggggctcggcggcacggcgtcggcgtcgacggcgacggcgcggtccggccggagtgcgtccgtggacgaggcggacgaccggccgctgaggaccaccggatcgatccgtcagagctgaggtccgtccgcgtccgatcacttgtgttattgtcactgacggaaggttctgaacaagggggaaaaaaagaagagatctttctgttctgtcttcttgcgcttgtcgtaggggcgttgtcgtgtgctgtttattctttcatgcgtctcttgacgcttgttcgccctcagatgaattctttcgttttagcagcggtgatgagtgtgcgctgatggtgtgtgaattggtggtgatagtaatgcaatgtgtaattgcttctagtaaaaaaaaaaaaaaaagaaaaaaatcaactacaacttaaagatcctttaacgaggatta

SEQ ID NO: 1848 - DNA, 2449 bp, Zea mays
  Clone ID: ZEAMA-23APR03-CLUSTER140979_1
ttttttttttttttttgtcagctcagctgattctgacgacgctcatagaaacaaaaaaacatggcagccatggcctacgcattccccttttccatccatggaaatgatacgatacgagagcgatgcagaggcttcatgggccaacagctttaaaataaaactatacagtaagtatatgcagaaggactgcttgttgttactgtcctagttcaacctcaacgtctcctgggcttatgattcagtatcgtactgtctgtccgtccaagggaaagaagaagaagaagaaaaagaaaaaaaaaacgaaccaaccgtctgctgtaaagtaagtgggcatcttgttgcttattattattattctcttcaaagtaagtgaagcacgcccttgttgccagtatgtgactttggtcagagagaacatatggcccttggcttatctcggagtagttaaaatcttgagcatactatgtacccaagaagatgtacaatgcgcaggccgggctatctatcagaagctgaagctttggcccaacaaatttcggatctttccatcaactgcacttgcacttgcacttgcacttgcattgaatcaacattcgaaggacgctgaatccctcaaaccctgtttcagtagaagttcaggtccgtgtatccgtacgggttgatgtcggtgtatccatatgagtaaggcagcagttcttggatgtccagctgagagctggagcagctcatcttctggatccggctatgattgatcgattccacttccgcgctgaagacgctgtagacaggtcgatggtccgaaaagcgagactcacctcgtacgtatgacagttgaccgaggcctgctccgtaccataggatacggtcgcaccatgcaggggttctcctcttctccttctggttcatgtcgtctccggcgtacttgtccgaattgttcgagtacttgtatgttggggggaaatatatgttcccctcagtccacccaacaaatactcttccacctctttgctcgatccttagctgatctttctctagcaatgctttccaattgcgcatctcgaccagggccttcactgaccgataggaaagcgcgatccggtaatttaggtccccgagccagatgattcgatcgtgccctaagattgtctctggcgaacgctcatactgcccatagaccattgggaacctggtctttctcaggatttccagcacatccgagttcctacgcagttcgtcaccttccttctgtcctgaagtcaggtggctgcagacgaagcagaagcttgtttggtgcaataacatgctaatcgaaattgaacccttattcccaaggtagcccatcagtcctctcccaacacaagaaactttcagatttcttatgtcatctcttatgtccttccgagcccaaatcatcagaaacaaccctaccatttgcttgcttgccaccagacagtatctagtttggccaggccgtctttgaccatcttccagagatgatgcattgccgtaaccgtacgacactggtgaatacacagtgctcggtgactctccagtattattctcatcatctgacgatccaccccatcggtagttgttctcatagtcgctaggcctacggccatagattgctcggtcacagacactgtaccgacgttccagccttggctgaggagcaagaatgtcaccctccatcctcaaactccgactaagcccagcctggaaagaccggcgatggaagaaacttgcactgttctgcttcgatgacaaaccctcaaaatcatcgtcgatctccaccacagggttaggagccggagatggtgtccggaagctcccgttgccactagtacctggcaaattgttcagtgtcctcctgaccagtgacacccacctcttcgctggaacattgtcctctgtcccaaggacgttaccggcattgagtggaacaatttcttgaaacccgaggacatagatgtcagcaggaggtgcagcgtggagccagtcctcgaggctcatgttatttggcggggaacggccgcccacattccatgtagcaacaaatatcctatagtccaatgtcactgtggcttcggcggcatcaaggtcaatctttccccgcctcgagtgcccattgctcctcctcgaggacctctctgtcttgctcttcttcactgtgctcggctccctacgggtgaagctgctgcccctcctccactcgtcatcgccccctcctgcaactgtcctaccaatcgcggccacatcgtcggcgtggaagtcgtgggccttgctcctgatgttgaaccacttcctcaccaagctcttggaccacgacagcttgctcttcttggtggtgttgctgccatctctcatccttgctgctagctaacactcatgcagccgtagcgtagagactgctttttcgattaggatgttctaggtaatggtctcgtgc

SEQ ID NO: 1849 - DNA, 1835 bp, Zea mays
  Clone ID: ZEAMA-23APR03-CLUSTER14128_2
ccatttcttctcccgttccgttcaccccccccgcgagctctatctttcgtggcgcagctcggcagctgggcggccgccccccgccggcgccacgccctaagctacgccaggttcccagttcttcgtccgtccttttgctaggtcttcgttggacacttaaacggcgacgagcaccgccagacgcgctggtgcctggatccggcgggagtgcttcaggttttgacggttcgtctctctcgttgtttccggcggggttatgaaggcggtgggatacagcccctacgacagcagcgggactgatgacgatctccctccagcacaaaatagaggactaagagggcgatctttcagtgggaatgtcgtagcatctgctggggcatttccttacatgagggcaaataatgatctggagagtgaaatacatcgggttgagcaagatgcatatactggtattcttagggcatttaaagtgcaatctgatgcaatatcctgggaaaaggagagcttgattactgaactcaggaaagaactgagggtttctgatgaggagcatagggagctattaaataaagtcaatgaagatgggaccatccgtcgaatgagggagttaagacaggcaggtggatccccaagtggtttgcatcatggcaacatggttttatatggtgcagaacctgggtccactaccaagaggcaaagggcatctcattcgattcctttgcaatcagcaggcctccagtcccctatgatgccctcccactcagtttcatctgcaaaatggggtcctttgcaagcaagaggcacgaaagcgaggacgcccattcctttggcgttaccatctgtggatccaagttcactaataaaccataaagtttatacaaggtggccagaagacaacaacttctatgaggccaccataacacgatataaccctgtgacgggtgagcatggacttgtctatgacatgggcacacaagccgagagttgggaatcagttagactttgtgatatggcacctgaagatataagatggggatttgatggacacctttcaaatcgtgatgtctggagcccttctggccctatgttgatgaggcacatgaccaacaatggtgctatggcaggttcaatcaagggaagagggaggttatcaataaatgagactataaaggactatgctccacctgaaaatggcaccaataggaattttgatcatgtcgacataccaaataccggaagtgttgttatggaggtgaagagggtattgttcaacccaaatatgcctgaaatcgagaaggcaaggaaacttttgaaagatcaggagcagtcattacttgatgcaattgccagacttgatgaagcatctgatagcgataatgaagatatggccatggaaggccgaatgggttctgctggggaaaggaatggcatcactacgtagttgcttctggcatgttggaattttggtagattaacatgcatttgtgtagcacctacctcgaccgcagaacaaggaaaccacattatggcaaaactgcatgccagaaaatggtgtcctggaaacggttgacgcctgaaatgggattttttggctacacaaaattgagcgcacgagcggcagagatgcaaatgttaaagaactgtttaagcgccattgcatggtgtttcctatgtagcaaactagaggcaactaaatgttctagttgatcattagcatggagcacttagcattcctgattcagtacaggtagatgtctaacactccagcataatatccaacttggctgttcttgtactctaatgtgaaaaaggattgttgtgcacgcttttcatgt

SEQ ID NO: 1850 - DNA, 1528 bp, Zea mays
  Clone ID: ZEAMA-23APR03-CLUSTER141498_1
gtaccgggcccccccgcgaccgggccccccctcttgttttttttttttttttttgggataaacgaagcataaactattgatgatattgcctcattacatgcggaactggatccacccttcgattaggggtggattgagaagaatttgcaagttacaagtgcacgcactggcactgcgaagaaatgtggaaacaactaaccaagtcaagaactactaaggttcatcaacaaatccaactctccacaagttattctttccttgcagttacaactacacgcaagatttagacgaaagcatctcagcaatagacagttagcttctgattctaaactcaggcactgcttcgatgaacagacttgttgatcctctgcaacaatttttttaaacgcaacatccacggtgtttagataccgagaaagaaaattgttggctggtataccatctgaaccctgaagctgacactagatgaatctttggtcatcattttgtttggctgcagcctgcagctatggcagcaaccctcatgcactctgctggccgttgctgctacattctgaactttctccggtgcctcgtgccatggactaagctgtaggctccaacaaacagcagagctgatggaacggtgcttccttacacgcagatgtacgcaaacatttcagtcactggcttctgaacgcattatgaagctcggaaatgacatggtgatgtcctgcagataggggagagtcatgttccttaacgttgccgggttcttcttcacgaactcctcccattcttcaggatctatcctgccatctccgttcgagtccgcttggctgaacgtgttatcgacgatcgtctcgacggtgctgtctgaaaggcagaggtcggactcatcaagcagcgccaagaccatctctctgagctcttctttctcgatgtagcctgttcccctcagatcatacagcttgaaagcgaacgccgtcttctccgacgtatctgctttagggtggaacacactgagcgaccgcacgaactcctcgaaatcgatgactccgttccgcttgagatcgaacagatcgaagaccctgtctgcaaagaggttcgctctcctgctgttcctgaacaaggcgagctggaactcctccttgtggatgagcccgtctttgacgatggagcagctcagcttcttgtacagctcgtacagcgcctccacctcgttcaccgtgaatgaggtctgggtcgccagcacggccggatccgcgtgcgccggcgcgctcctgctgaactgcttggacgtcgcgcagcccatcgcccccctgccctgtgtcgtgcgagtgaacgaggctatgcggccgccgaccgcgagagagacaggagatccggcacgccggcgaggagtcaggagacagactttgcagtttggtgagcccccctctccgctctccctctcgcgccacgtcacgccgggcgctgtctacctcgcgtcccgtgtccacgcctctccttttgtccgtctccctgcccggccggcctcgaggtaccc

SEQ ID NO: 1851 - DNA, 2002 bp, Zea mays
  Clone ID: ZEAMA-23APR03-CLUSTER141562_1
ttttttttttttttttgcctctgaacaacctgatcttgcaactccggtctctccccagtttttccatagtgtaggtggctggtacaaagcgtcctcggacgctgcctatttctagtataaattaaaaggtacagaaaatgtctggctttacactacgatcagcctcgagtgactgaaatgaacttgagcaattacatattgtacaccaacaaatttacatataattagctactactatgtctgtaaggaaaataataccctagcatgtgacaccacctgttgcggttagcaaacctcgaccaggctttctacgagcagtgatttggcagatggactcaagagcatatgttagcatgtctgtgcaaaactggtcgtctggtttcaaccatagagccttatggtaataatttatggcagcctcaaaatcatccataagatgataagtgtaagcaagaccagcaaatgcactcaaacttttggttggaaaagtgagtgcctttgcataatatgatactgctttctggtattcctccttcatattatatgcaacgacccccaactcattgtgaataagtggatcagatgggcagatggattttgcttgtgtgaagaactgctctgcaagtttgaaattgtgcattcgcacatactgcatgcccatgtataaagttggcagatggcatccaggaaataaccgagctgccgtccgaaacgcagccattgcttggtcaccctcctcttgagcagcataggcaatgcctgtaccaatccaagcaggaggaaatgccccatctaaacctgtagctttgccgaagtatcttcgcgcttgatcatacttcttgatacagtagtaatagcaaccaacagcaaaccatgaaagagctttttgaggataatccttcactaagttgcatgccaaaagataaagatcattgcaatgaccaagctccattgcagttgccaaatgaactaatgtgcactttaaatggaaagggtctctctcaagtaacgaggatgtgagtttaaaacatttttggtactctccactctggtggtagtattcagctttgcaaaccaaaacatcaatgttatttttcattgtttcaccagaactcgaggacgaaatactacaagcttcttgctcaagttccttgaattttgcttcaactaaatattctttttcatgcttcgtgaccaaacatgaatagaatgctgatagccacccatcttcttcaccgaattgcagagaggacaataactcaacttcttcctcacatgtcaacatataattatcaacaagacattcaatagcctcataacacagaggatcggctttaacagctgccttgtaccattggcgagcaagatcacggttatccagtgcttcatacgccttgccacgtaagaaacatagagctgatttgatattgatctcatgatcttcagcgtccttgtcaaaatatatatcactgccaacatcatgatcaaggacatttccatgctcatccacttttgcatccccaagcatcaacaaacactgatgccactctttcaactcctcgaggcacttggcggcgaggaatctgaaccggaggtcgcggagcagacgagaattgttgaggaggtggagcgcgcggcggaattggcggccgagaaagagtgcctgcgcgagcatgtagacgtcgccaggatcccccgtggccgcagccaccttgtcagcgaggaagatggccgacgtgtagaggtgcttcccggcgctgtcccgtaccaccccgcgcagccgctccagtgcctcctccctcatctccggcggcggatcggtggcctctcctattctcctccgcttggagctcggctaggctcggcggatgcggacgatgtgggcaggacgcgagggaaaccgaaatttgagttccgcattcgaatttagggttcgggatcgtttcgaagggaaaagaagcagcagtgccatgtctcgtcagggtgggtcacccccggccgg

SEQ ID NO: 1852 - DNA, 1856 bp, Zea mays
  Clone ID: ZEAMA-23APR03-CLUSTER14167_2
gtcggccatcgtccacggatcctatcggtctctcctgtgtcctcttcagtctccacgccgttccagaagtcgccaaccttccctcgccgccgcgccgcaacagccgcctcccctccaaggtagcccaatcgaaaccactcgcccggccaccatggcctttgccagctcgctgcttcccgtgccgccctaccgcgtctgcgcgacccccgcgtcggaggtcgccgccttctcgccggccaagaagagcgtctcgctcgccgctgcgcgccagcgccgaggatcccgtcacggagtgagggcagaagtaaatgaatctggaagtgttttggctgttgatgcactctcgcaagttaaacatgttctgcttccagtccttgatcgcaatccttacctttctgaaggcacaagacaggctgcagcaacaacagcttccctcgcaaagaagtatggagcagatattactgtagttgttattgacgataaaccaaaggagtctgtcccagagcatgatactcaaatgtcaagcattagatggcatctctcagaaggcggattttcggagtttagattgatggagcgtcttggggaagggcagaaaccaacagctatcatcggggaagttgctgatgagtgggacttagacctggttgtgctaagcatggaggcaatccactccaagcatgtcgatgggaatttgctcgctgaattctttgattgggtgcaaattggccgtctgcattgcctacttccctggtgggaggatgctacagtagattttatgattagagggggttataatgtcataaaccaaataaaacaggtgaagcataaatgcctgatcctgtggggagaggatgatggaataataagcagcaaactagcatataggttgcatcaggaactcccagacgcgattctgaggcaggtccggcagtgtggccatatcccccacgtggagaagccaagggaggccgcaaaacatgttcttgaattcctcgcaagaaacacgtcaaacaagtcagaccagtctccttccgagccgtcagtagtcgtgaaccgctgagcagatcacagatccttgaagggtgggctgtacaaagtggaatgtttggccatggatgatggatacagtcgctaactcgctatgctcagccaagctgctgctgcggaaggctgaagctgaactcggcgatggttctcagcgacactagaagataggttgttggtcagttaggactaactgtactgtacggtagcactgcaatgcaagggacgtagtggatgggagcatgacaatttcggctgttgccagtactgtaaattatgcaatgtaaaattatttggagtttgcaagggcattgcccttttccctcaaaaaaaaaaaaaaaagtcgtgtaagctaccatgattactattctgttggatgcactgttcgtgcattcagtcgtgaacactgtaccgatttaattgctcaatgttcatgcccggaagcgtgggcggacgcgtgggtggttcaggaaccgctgagcagatcacagatccttgaagggtaggctgtacaaagtggaatgtttggccatggatgatggacagtcgctaactcgctatgctcagccaagctgctgctgctgaaggctgaagctgaactcggcgatgtttctcagcgacactagaagataggttgttggtcatttaggactaactgtactgtacggtagcactgtaatgcaagggacttagtggatgggagcgtgccaatttcggccgttgccagtactgtaaattagcccccctattttattttattttagtctctaaattgataaattcagaaactaaaatatgtcgcatttagc

SEQ ID NO: 1853 - DNA, 1714 bp, Zea mays
  Clone ID: ZEAMA-23APR03-CLUSTER141772_1
tgggtaccgggccccccctcgtgtttttttttttttttttttgtgcacaaacttggcttccacagcacggtctcggtcgtacagccagccgctgcgcgcgttggcaaccaaaatggcacgctgcgacgacgccaccaatcgcggcgcgtccacagctcgacaccagacaccacgacaactcacgcatgatgtacactgacacgtcgtctcgccaccgcgggctatttggcggcggcggcggccgccgcctcgagcctacgccaccgggcgtcgcgcacggcggcggcggcctcggcctcggaccgccgcgtggcgaggtcggcggcgcaccgcgcgtacaggtcgggcgcgacctgctccagcagggacttcacgctggccgtcacctgctgcacgcacttgctccagtgccgctccaggttgctctccacgctggccacgaacgccggcaggatcctctccgccacgtccggcgacgccgtcgccagctccaggaagcgctcgttgttccacacgtacagcgccctctccgccacctgagagctgtagctactgacacagcgggcgatccgggagcagatgggcacggcgagcctctggaactgcaccggctcgagcagctcgacaatctcctcgagctcctcaatgaggagcacctccttctggcagttggtgacgggccagtggcgcaggatgtccgtgaccaccgcgtcggcgagccccggctccttgcgcacgaactggagcacgcagtaggcgagctggcggtggtacgtgtgcgcccagcgcgtgcggtgcagcggcagcagcacgcgcgccaggaacatacggtgctcctccttgagcggaaacggcgaagccgttgacgatgctgccgcagatctccagaagctcggcggcgccgcagtggcgctcggcggcgggcgcctcgtaggcgagccgcaggaacgcggcggccatggagcgccgcatgaaggcgcgctcgcaggtgagcttggagtagagctggtggtacacggtcttgagccggtcgcgctcgcgggggtcctcggaggcgaacagcgccaggagggcggagaggaaggcgcggtccacgtggttgcgcagcgtcctggcgtccgacgcggccaccacggagaggaggatgtcgtagaccacctgcaggtgcggccacgacggggccagagccaccgccggcgcctcctcgtcggcgccgtcggggggcagcgccgggtacgccggcggcggcattgcgcggaacaggttggcgccgaccatctccaccagcgccaccatcacgcggtggtccagcggctgccgcttgcccccgctcgaccgcacggcgcccagcacctccacgagccggtcccgcttcgcgtcccgctcctcctcgcgctccgccgcgtcgacgaacgtgaacgcgcggttgcacgacgcgatcttgtcgatcaggctgtccgcctcgggctccggcgacggcggcggcagcttggccgtgccggggagcaggccaccgtccggcttctcgagctcgaacaggaacttgagcgtggtcgacttcctcttggccgacggcggcctcggtgccacgacctctgccgcggcagcgcccatagcttggccttggctgctggtggtggtgttggggccttcacgggagaacagctcgctggctggctcaagtcaagtgcggccggcctcgaggtacccaatg

SEQ ID NO: 1854 - DNA, 1543 bp, Zea mays
  Clone ID: ZEAMA-23APR03-CLUSTER14187_2
atggatggctacgagtcagacggaaccaggagtagagttccatacaggctgtcgagatctcctcgtcacagcctactcccatgctatggtgatggagaaggatgtcgccgcaacactgatctcaccacggtcaggatggagaacgaccggtcttggttctatagcagcgaagccaccactcctagagagacgagcagcgtatgtcgtcgtcgtccgacctcgagcagcaggtggccaccgccctccgccgtgtgacccccgtcgccgccgcgcctgctgtagaccgtggaggcgcgccggatctggcggcggcgattcagcgccgaatggcctcgcaacgcgccaggggtgccgacgcgttctacgcgaagttcgcgtcggcccggtcgctcgccgaccagaccttctcacgccgacgagtacagctgaagggactcaaggatcagctccgggacctccagtcgcagctcagggagtctcttacacttcagtcgtgcaaggaatggaaatacaggattgccacggagccgatgtcggaggccacagctacgaatgagcggctccgtagctgggttgcggatttcagggacaagaggaacaagggtgctgcaatcgtatttgagcaacttcaagctgtcgaatcacttgaggcaaacagtaatgaagatgcagagatggcggagaaggtaccaaaagctgttctctggtacaataagttccttggcttccgggtgatcggaggagaaagaggtgtgaagttcgtgttcgacaagattgacccacagcgtccggagaaggaatactcgtttcgcgtaagtccgagatcacaattcatcgatagtgatcctcatgtcaaggacattgatgaattggcgaaggatttggatttgaacgaacatctattcgagtttgtaagaatggccagagagaaattccagtctcccttcatgaacgagacacttcctgtaagcccagatgcctctgccgcaccactcccgtctcccatggtggtgtcagttaacagcagaagcggggaagctcacagtcaaacccaatctctaagcaagaacagtgcacggttacttcctgctaagagaggcgccacagccctgccaggagcttctcctggtgttttgcgtcgttccccacgtctcgagggaatgcggtgagctagttagtagccgtagcaggttccgacccctggatcttgaaccaagcgatcatcatcagctcatataaaccgtggtgattcagctgcccttgcttatgggtggtgcttttttctcccttctaatctaactggaacttatagaagtgtatggttggcaattggccgggtacagtgattaaccctaacctggcctgtaatatattgttatactctggtcattagatgatgagttcgtgagtcgtgtcctggtctgttgtatggtgtcaaatatatagcaggtgttgtttttgtgtgacacccggatttaagggtaaatccggacgtgaattaaatgtgtgctatgatcaagttttacacatatgatgatttatg

SEQ ID NO: 1855 - DNA, 998 bp, Zea mays
  Clone ID: ZEAMA-23APR03-CLUSTER14200_1
aagtcaggttgttcagggggccatggacagctggtacgcgtggctgtcgcggacggggctggcgccgtcgctggcgcacgagtacgggcgcctcttcagccggaacgagctggagccccgggacgcgccgcacttcgaccacgacctgctcaagagcatgggcatcgccgtcgccaagcaccgcctcgagatcctcaagctggccaggaagcaggacgccggcgcctcgtcgtccgcggcctcgcggctcgggcgcagggccaccaggtgcctgtcccggtgcgcgcgccggctggcaggaggcggcgcgtggagggccgcgtcgtcatcggtcaccgtcgtcccgaggatctgcggcggcgaagacgccgtccgcgtcggagcagtgcagcggaagggcactggtagcggcaccaccaagaagatggtgctcatgatcaccgacggcggcgtcgccggaggagggtatggctacggcctcagaggccgtggcggcgcgaggctgtcgtcggcgtcgtcgcagaaggcgagcctgatgtttcatgactggtaccaagacgaggaggaggagatggcagacgacgaggacgagcacggcggcgccggtgacggcgacatcaagtgggactccatgtttcaggacctcaaacccacgtgaggatgaagttctccgatctccggactccggctgctggagtttgatgttgctgcgtgagtgagtcggtcgtcatggctttgcttgtggtgtgagagaattttaacaactctcctcatgctgtctgtcgttctcccttccctgagaagagaacgtaatgtcgaaaatgtgtattttcctccactggttttgcggtgttaaagcttgagcaagaaccataggtgcctgatcacttcaattgcaagaccatatttaaatgttgtcgggtttttttttacttagttagtacagctagatcaacgtgcaaaatagattatgaccgaaggcaaaaaaaaaaaaaaaa

SEQ ID NO: 1856 - DNA, 969 bp, Zea mays
  Clone ID: ZEAMA-23APR03-CLUSTER14293_3
atagcagcagcccattgcctgcctttcggcttaccctctctctctctctctcacacacacacacaaccactcacactgccggttggtttcccttccgttgtggttggtgcgtacttagtggcggccggccatggcgcggaggaggggcttctcggcggtggtgccgccggcgtggctgccggcggtgctcctgtgcctggcaggcgcggcgtcgggcgagccgctgccgcagtactacaatgccatcttcagcttcggcgactccttctccgacacgggcaacctccccgccggatgcatccccatcacgctcaccatgtacccgtccgaggaccgctccgagtacgacccgcgcaccggctgcctcaagaagtacaacagcgtcgcgctctaccacaacgccatgctccgcgtcgcgctcgaccgcctgcagcgccgccgcccggagttccgcgtcgtctacgccgactactacacgccctacatacagttcgcgcgcacaccgcacctctacggctacaagcgcggcgctctgcgggcgtgctgcggcggcggcgggccgtacaactacaacgtgagcgcgtcgtgcgggctccctggcgccaccacctgcgaggaccccgacgcgcacgtcagctgggacggcatccacctcaccgaggcgccctaccgcttcatcgccaacacctgggtcaagggcccctacgcgcacccgccgctcgccaccgtcgtgctcgaggacatggtcgactgatccctcttgcttctgcaggattggtttgccacaagggagtagctgatatgtaacgtgaattccattcgttcatgtccatgtatattgggtactaccggagcggagtaacaaaaaaaaaatgttagtcttttctgttttttttttcgtcgtgcacctgtgtgccgtgcagtcgcatagatcaatgaagaaaccactccagctgtttttgatgattg

SEQ ID NO: 1857 - DNA, 1663 bp, Zea mays
  Clone ID: ZEAMA-23APR03-CLUSTER1429_8
aatccattaaagatcacaacagctagcgttctcccgctagcttccctctctcctctgccgatctttttcgaccaccagcatggaggagaagaggaagctgcagtggcggcgagggcgtgatggcatcgtgcagtaccctcacctcttcttcgcggccctggcgctggccctcctagtcgcggacccgttcggcctcagtccgctggccgaggtcgactaccggccggtgaagcacgagctcgcgccgtacggggaggtcatgggcagctggcccagagacaatgccagccggctcaggcgcgggaggctggagttcgtcggcgaggtgttcgggccggagtccatcgagttcgatctccagggccgcgggccgtacgccggcctcgccgacggccgcgtcgtgcggtggatgggcgaggaggccgggtgggatacgttcgccgtcatgaatcctgactggtcagaagaagtctgtgccaatggagtgaactcaacgacgaggaagcagcacgagaaggaggagttctgcggccggccgctcggcctgaggttccacggggagaccggcgagctctacgtcgccgacgcgtactacggtctcatggtcgttggccagagcggcggcgtggcgtcctccgtcgcgagggaagccgacggggaccccatccggttcgcgaacgacctcgatgtgcacaggaatggatccgtattcttcactgacacgagcatgagatacagcagaaaggaccatctgaacatcctgttagaaggagaaggcaccgggaggctgctcaggtatgatccagaaacaagtggtgtccatgtcgtgctcaaggggctggtgttcccaaacggcgtgcagatctcagaggaccatcagtttcttctcttctccgagacaacaaactgcagaataatgaggtactggctggaaggcccaagagcgggcgaggtagaggtgttcgcgaacctgcccggggcttccccgacaacgtgcgctccaacggcaggggccagttctgggtggcgatcgactgctgccggacgccggcgcaggaggtgttcgccaagagaccgtggctccggaccctgtacttcaagttcccgctgtcgctcaaggtgctcacttggaaggccgccaggaggatgcacacggtgctcgcgctcctcgacggcgaagggcgcgtcgtggaggtgctcgaggaccggggccacgaggtgatgaagctggtgagtgaggtgcgggaggtgggcagcaagctgtggatcggaaccgtggcgcacaaccacatcgccaccatcccctaccctttagaagactaagggcctgtttggttcactgcctcagttgccacactttgcctaacttttctgcctaaggttagttattcaattcgaacgactaaccttacgcaaagtgtggcacatttagccacaaaccaaacaggccttaaccatgatctatgctgtttcaatgcctcctaatctgtgtacgtctaaatgtctaatggatcctagtatgtgtacgtctataaatgtctaatgcagtcactggttgtaatcttgtttgtgtttggcaaattggcataacaatggacagattcaatgggcattggtgctgtagtcgcatcacactaattgaatgggatcatgttgagctctc

SEQ ID NO: 1858 - DNA, 1729 bp, Zea mays
  Clone ID: ZEAMA-23APR03-CLUSTER143128_1
tagatattgcaacttaagtactttgggaattgggaggcacagaagagttgacctggacttttaggttatttgctaatgacataaaagatttaatatgtgcaaggttgttcagttagagagatctttttttttgggccatgaagctgtataaaatttagacgtcatatacttgtaatgcttccagtgctaggaaatttcttgtggcgtagacctctgaactctgtccttttgcgttggccctagcggccaaaaagaagaaacctcacctcaatttccaggaatttctgaaacacttacacatagttccacatataacgtgcgatatcacctgtccatgctgaagcaagagcaggaagactcttccagtaatcatgggtgcatgtgcctcttcatctcgtggtaacaccgacttggttttcttttctgctgatattactctcttggtatggtcactcgctatacggattgcactttcctcccaggtcgacccaaccatggcaagaaccagaaatcagcaaaggtcgcggcaattccatgtactccggcagcgcaggtaggtcgtggtgctgcctcttctgaaatggaagagaagagcagcttcatttggcaaatcgatggcttctcctcgcttcttgacaagcaagaaggatggaccaactccggatattttaagatcaaggaccttaattggtacttgcagttgaacctgaaggaccggaagagtggcgacgaaagagaatacgtctctcttatcctcgtgctgtcaaaaacttctggtctggaacccgacaccattgtcgaagcatcgttcaagctcttgatatacgatcaagcatacggacgacatagcgaacatgaatttagccacagattccagactacagagagcagcaggagctccgggatctcatgcatgatcctcgtctacacactcaaggaaccctcctccggtttcatcgttggtgacagctgtgtcttcggagtggagctcatcaagttcaccactgctaaagtcaaggacggttcaggaacgctgcatgttcagaagagaattggcttctgtagtgcccgggaggcctacacctggatcatcaatgacttcttaagcctgaaggggcggtgctactcaccggagtttgagatcggtggacacaaatggtacctgaccatgtacccttctggcactggcatcgacggtgataaggaaattctctccctctacctgcatatggccaagccaaacggagacgcttccctccagaactctggggtgcttgtagaagtcagtctgtccatcaaagacaaggtgaccagcaatcgcaaaacaatgacaggccggtgccagctccaagcgacggagggcgaaggctggggatggtcaaatttcatggcgacgaagtctgtgaaggactggtaccttgtgaagggcagctgcttaatcgaggcagatgttgccattcttggatcgtccaagatgaattagggatcatacgactctctacttttgtgcgtgtgccgagccaataatggaattgtgcagcgttagaccttatctgtttcatccctaaatcatagtgattaggaaggattggagaggattgaggagaattttgactgttaggaaatttaatccccttaatccctcctaacacccttgctttagggggtaacaaaaaggatttgactactatacttttagggtataatataccagtaactattttatgtg

SEQ ID NO: 1859 - DNA, 1267 bp, Zea mays
  Clone ID: ZEAMA-23APR03-CLUSTER14338_1
atccgctcagccatccgttccaaagtcaaggctaccaccctcttccatatttcatcaatatgccgtgccatgacatcctgatccttcgccacttgctccgccatagatgatgatagacttgctgacccatcaactgttggtgattggtctccaacttttgcaaccgtccactgatggagtccagcgctgcaaacatcttatcccaccgagtctcatccgaacgattcgtctccgccattgcttccaagacgaagcgcgtctgcaccgaaggtcgagcagacggagccatgatgccaccccgacgaacgacgtccctgaaccacccaccaagcacagaaagatgcctcccaggacaatgaatctggtaccagttgtaatgcccctggccgccgaggagagttcctcgcagacgtgagccgcatacatgagtaggagaactgtctccagtacgcgagaggaaaaaggaagcagcgaagaaacctatgcaaacaaggttatccaagctgctaaagaaccagggctacgtccttaccataatccatatccgagagactctcgcgaagcgcgaacaatctactcgttcaaataaaaaccaatatgatatgtgtgggaggcaatgcaactcaataggtaacataattgcatttaaagttctgttctaccagttctgtgatggtatggatgattctatttaagcctcaatgtctcagcattagttatattggtggattcctcaaagtatgattgttcacatttattcattaccatggcagcaccgcttacagacattttaatgattggtgcagctgattttgatcttactggacatttagtgtggccaagggcagtcctgatgaacaactaactatctcaacaccctgaaactcttaagggatgttcagtaatcgagctacgatctgggattggtgagaaaattcactgccagactccctgctgcctttggttgtatgaaagctaaatatattatgacctgttgtatgcatttctggcgtattgtgtagccgtttctgcaagggtggtagagcataaatgatgcagttaccttctatacttgcatcattccttattattcagttgaagtgccacacatattgttagataaatgctgcacttcagatatccattgtgtatcgtgttacctgtttaattgcaacacatttgaatgtctttacttacctggtaaagaaaaaaaaaaaaaaaagtaatattaacattgtttatattcatttctattttatggaatata

SEQ ID NO: 1860 - DNA, 2542 bp, Zea mays
  Clone ID: ZEAMA-23APR03-CLUSTER14348_1
gcacgagaccattacctagaacatcctaatcgaaaaaccagaccagtcagtccacacagcctacggcctgctctggctctgcctgtagagggctagagctacaagctacaactctgaaagtctgaacagtgcgccgcccaaccagagatggcgccgcataccaccgcagccgccggcggcggcggcggcgaggaggcgctggaggaggccagcactctccggcaccgccacagcgctgccaaggacggcggcgaggagggccaggccaacaacggggtcgccgccgccgccgacgacgacggggaggggaacgcgctgtcggtggagcgcgcgttcgcggaccaggcggttccgtcgtggcgggagcagctgacggtgcgcgccttcgtggtcagcttcttcctggccatcatgttcagcgtcatcgtgatgaagctcaacctcaccacggggatcatcccctcgctcaacgtctccgccggggctcctcggcttcttcttcgcaacagaggctgacaatcctcagaatgtcaaaaaccctcacatcggatggatgatagggtttctcttccttgtcagtttcattggcctatttgctcttgtgcctctgagaaaggttatgatcgtcgactacaaacttacgtatcctagtggcacggcgactgcttatctcatcaacggtttccacacgccagagggtgccaagcttgcaaagaaacaagtgaagactctggggaaattcttcttgatgagcttcctctggggcttcttccagtggttctacactggtggagataattgtggattccagaacttccctacattaggccttcaagcttataagaacaagttttacttcgatttctctcctacctatgttggagttgggatgatctgcccccacattgtgaacgtttctgttctactgggaggcatactttcctggggaataatgtggcctctaattggcaaccagaaggggaattggtacgacgccagtctcccagaaagcagtctccatggactgcagggttacagggtttttatatccatcgcaataattcttggagacggcctgtacaacttcgtgaaggtgctcattcgcaccaccgcggggttcatatcgatgatgaagaaaaacagcacgcttccggtttcaaacaatggcagccccatcactgaaggtgtttccttcgatgacgaacgccgcagggacctgttcctgaaagaccagatccccagatcagttgcctacggagggtacgtggctgtcgctgccatctcaatcggcacccttcctcaggtcttcccgcagctcaagtggtactacatcctggtggcgtacatcttcgcgcctgtgctggccttctgcaacgcgtacgggactggccttaccgactggtccctcgcgtccacctacggcaagctcgccatcttcatcttcggcgcgtgggccggcgcgtcgaacggcggcgtcctcgtcgggctagctgcctgcggcgtgatgatgagcatcgtgtcgacggccgccgacctgatgcaggacctgaagaccgggtacctgacgctggcgtcgcccaggtccatgttcatcagccaggtgatcggcacggcgatgggctgcgtcatcgcgccctgcgtcttctggctcttctacaaggccttcgccgacatcggcctcagcggcagcgagtacccggcgccctacgccatcgtgtaccggaacatggccatcctcggcgtggacggcttctcgtcgctccccaagaactgcctcaccctctgctacatcttcttcgcggcggccatcgtcgtcaacctggtcagggacctggtgccgaagaaggtcgccaggttcatcccgctcccgatggccatggcgatcccgttctacctcgggtcattcttcgccatcgacatgttcatcggcaccgtgatcctcttcgcgtgggagacgatcaacaaggccaaagccaacgccttcgcgccagcggttgcgtcggggctgatctgcggcgacggcatctggaccctgccgcagtccattcttgcgcttgccaaggtgaagccgcccatctgcatgaagttcttgtccaggtcggtgaatgcccaggtggacggcttcctcggaagttgaactgttgaaatcgtgacgtgcatgtatattgtgttgatgcaccatgcgtgctgtaaaacgtaccgggtaatgttgtgtcgacacgttctggttttgatgtacatgagtaagtacactagtcgtagggattgctaaattaatgtttggcgtatacgcgtcagcattagtaatgtacatgagtaagtaccaacatctgtatgttacctgggttcaaatttcataactactttcccgtgaaaaaaaaaaaaattgatgtacatgagtaagtacactagtcgtagggattgctaaattaatgtttggcgtatacgcgtcagcattagtaatgtacatgagtaagtaccaacatctgtatgttacctgggttcaaatttcataactactttcccaaaaaaaaaaaaaaaa

SEQ ID NO: 1861 - DNA, 732 bp, Zea mays
  Clone ID: ZEAMA-23APR03-CLUSTER1437_44
ttttttttttttttttgtcaaggctaaagaatctttagatcaatccagctgcaactacaagcctccaatactattcacgcggcagactgcctcaaggttacaaatgaaaagaaaaaaggagaccaaaagatggtccgactggatcgaagaaatgtgatggacggactgcaggacggcctcggccaccatcgccagatggtgtagcgcggcgacggtggacacggggacgctggccagcaccagggcggcgacggcgatggcgacgccgggcctggtgcccatgagcagcagctgcagcgcgccgacgaggctagacacgtcggagacgtaggcggggtagtaccgcttctcccacggcgcccactcggcgggcgcctcgtagttggtctccaccatccacgcctcccggatccgccgccgcagcacgggcatgccctcgtccaccagcgcgcctccgtactggtcccggccgccgctcgcgtcccggcgtagcgcggcgcatcgcgttgccgccgacggcggcaaactcctcggtagcgccagccccagcccgtggcacgccccgtgccggagcgcggccggcgttgctggacgggagagggaagaagcagccatgggatcggctcaggggctgatcttcgtatcgtatctcaggcaagaaagagaacactgcacgaccacactggagaatggagatcgagggaaagggaagacgaatcaatcgaggctgat

SEQ ID NO: 1862 - DNA, 1737 bp, Zea mays
  Clone ID: ZEAMA-23APR03-CLUSTER14437_1
aattcgtaggatccaaacaggccttacacatctttctttacggcttcgacccctgccttctgggtccgcctctggccgcatcgcgtacaaaagtagtcacagacatatctcccctctgttccgagaagcaaacagaggccgaagccaaagatgacgaggactacgcagctcgtcgccgccatcgcggtttccttcctgtcagcggcggccgcgtccaacaccaccacgtcactccaaagcctcgtcgccgaagtgtcgcagtggcgggaaatccacctgggcggcggcgcggcggcggcgcatggcgtccggccgagcaccgtcgtggcgtgggcgctctccttcctggccgcgtccgtgtcgagcgccggcggcgtgggcggcgggtcgctgttcctgcccatcctgaacctggtggcggggctgagcctgaagcgcgccactgcctactcgtccttcatggtcaccggcggcgcggcctcgaacgtgctctacaacctcgcctgcacgggcggcggcgggagagggaggctgatcgactacgacatcgcgctactgttccagccgtgcctgctcctgggcgtgagcatcggggtggtgtgcaacgtcatgttcccggagtggctcatcaccctgctcttctccctgttcctcgccttctgcacagccaagacgtgccgcgcgggggtcaagatctggcggtccgagagcagcgggtgcgggtccggggctaggtcctcgcgcggtggacacagccacagcaaggagcccctgctgccccgcggcaccagcgacggcgacgccgagggcggcggcggaaatggcgcggggttcccgtggggagacgtggctctgcttgtcatcatctggctctgcttcttcgccctccatgtcctcattggcgataagcacgggaagggcgtgatcaggattaggccctgcggcgtcgcgtactggctgatcaccttcttccagctacctgccgctgtggctttcacagggtatattgtatacgccaagaggaagaaacgcgctgttcatagcgaaagccaagaggacggcagcaaggcagaccttgcggacgcaggagtggaagccttgccactacctacactacctctcgccgctttcgtcaccggggctctgagcggcctcttcggcatcggaggagggctgcttctgaaccctgtccttcttcagatcggaattcccccgcagaccgcggcagcgacgtcttcgttcatggtcctgttctgtgcgtccatgtccatggtccagttcatcctgctgggcgtggaaggcgtcgggcaggcctgcgtttacgccggggtatgcttcgccggctcggtcgcgggggtcgtcgtgatcgagcgagccgtcagcaagtctggccgggtctcgctcatcgtgttcctcgtcaccgccatcatggcgctcagcgctgtcatcgtcacctgcttcggagcgttagacgtctggatgcagtacaccaccggggaatacatgggcttcaagctaccttgctgacatcttgctcggtgttatgggcttcgttttggttttgcgtttgtgctcttcaccttgtaatgtctggaaagagaggccggagtaggactggttgtgcatgggcactcattgtaatttccaattttcaggttttatatagtgtgaattgtcatcttcacttgtttatttactcccacggggaaaaatatatatgttcatgagtgcatccac

SEQ ID NO: 1863 - DNA, 1560 bp, Zea mays
  Clone ID: ZEAMA-23APR03-CLUSTER14445_1
gcacgagaccattacctagaacatcctaatcgaaaatctcactcagcttctcgcccgtaaaccaaattcgtttcatttggtcaacaaacaaggaagcccttagccctcccaccgtgtccatctccactcgccagtctcagcccgccggccaccccccacatctcgccatgtgcggtgggtgccgccgccgccaatgtggccccgacgggacgcccgacggcggccgccggggctgcggaaccgtgatcgccgtgctggccctggcggccgccgcggcggtcgcgttcctggagagcgcggccggcgggatctcctacgcgggggacgggtggctgcacgagtgcgccaagtgggacgccgagggcggccaggttcctggcgtccaccttcttcggcggcggcgtggcggaggtgcgcgccggcgagggcggaggccgaggagccgggtggtcgtggccgaccccgtcgcggccggccgggtcgcgctggggctcgcggtcgacgcgcccaggcggcgcctgctcctggtctacgccgaccggccgccgcgcctcggctacgccgcgctgggcgcctacgacctcggatcgtggcgccgtctcttcctcacgcgcctcgacgtgccaggcgagtctacatttcccgacgacgtcgccgccgacgaggaaggcaacgcctacgtgaccgacgccaagggaagcaagatctggaaggtcgggccggacggcgcgctgctcggcgtcatcaagaacgccacgttcgtgcagcggccgggcctgcgccacaacctcgtcggcctcaatggcattgtctaccaccctaacggctacctcctcgtcgtccacacctccggcggtgacttcttcaaggtcgacccgaagacagagaccgtgcgcgtcgtcaaggtgcgggggtcgctgaggcgaggggacggccttgagctgctctccccgacgaggctggttgtcgccggcctgccgaaccggctggtggagagctccgacgactgggagacggcgagtgtcaccgggcagtacgtcgggccggtccaccggatcgggtcgtcggctacggtgaaggacggggacgtgtacgtcaaccatattgtcgggttcgggctcggcaggaagaagacgcacgtccttgcaagggcggtgttctcgccgttggcagtgacgagttgacgggccggcgcctccgcgcgcgctccgtcgtgggatcaacagttgctttttgctaagcggcagttcatacttatggactagaactaataattagttgctaaaattagttgagatatttaaacaatctaggtaataattcaactactagctacttttcgcaaattagctatttgttaggtaactaattcgactaacaattttagtcaattaattattagatctagttcattcaaacaccccatagatgctcgtagtacttttgttcctacacttgacacgttgcccaaagatacaagattgtattgtttggtacatgcatggcggaggacccaataaaataccaatagcaaaaaaaaaaaaaaaaaaagggcggccg

SEQ ID NO: 1864 - DNA, 1369 bp, Zea mays
  Clone ID: ZEAMA-23APR03-CLUSTER14445_2
gttttcattttggtcaaaacaaaccaaggaagccctctgctctgcctcgcactcgcacacaccgtgcaccaccggccggccgggtcgtctcgtctcgtctccactgtccagcctccgccccccgcacctcgccatgtgctgccgccgccaacgcggccccgacgggacgcccgtcgacggcggccgccgccgccgccggggctgcggggccgtgctcgccgtgctggccctggcggccgccgcggcggtcgcgttcctggagagcacggccggcggggtctcgtacacgggggacgggtggctgcacgagtgcgccaagtgggacgccgagggcggccggttcctggcgtccaccttcttcggcggcggcgtggcggaggtgcgcgccggcgagggcgaggagcgggtggtcgtggcggaccctgacgcggccggccgggtcgcgctggggctcgcggtcgacgcgcccaggcgccgcctgctcctggtgtactgcgatcgcccgccgcgcttcggatacgccgcgctcgccgcctacgacctcggatcgtggcgccgcctcttcctcacacgcctcgacgtgccaggcgagtcaacgttccccgacgacgtcgccgccgacgaggaaggcaacgcctacgtgaccgacgccagtggaaacaagatctggaaggtcagcccgagcggcgtgctgctgggcgtcatcaagaactccacgttcgtgcagcgaccagggctgcggcacaacctcgtcggcctcaacggcatcgtgtaccacccgaacggctacctcctcgtcgtccacaccttcggcggcgacctcttcaaggtcgacccgaagacggaggccgtgcacgccgtcaaggtgcaggggtcgctgggccgaggggacgggatggagctgctctccccgacgaggctggtcgtcgccggcacgccgagtagccggctggtggagagctccgacgactgggagaccgcgcgcgtcaccgggcagtacgtcgggccggtccaccgggtcgggtcgtcggcgacggtgaaggacggggacgtgtacatcaaccacattgtcgggtttgggctcggcaagaagaagacgcatgtccttgcgagggcggtgttctcgccgttggccgcagagagttgacggcggccggccggaccctccgtcgcgggatcaccaatcgctttttgcttaaacggcagttcatagttccactcaactccatgagagttacaggctatatatacgtatttcggtgtgattctgtgatatatagatgcttatgcttttgtattgacacgttgctcgaagctgcacgcttcttctgtttgatgcaagcaaaacatgtactacatggtttcgatc

SEQ ID NO: 1865 - DNA, 1833 bp, Zea mays
  Clone ID: ZEAMA-23APR03-CLUSTER14448_1
gcaaaatcgaccgcctcccaccgctcctccatcccgccgccgtgagacgctccgtcgtcgtgcatcaacttaggtgactccaccgccacctcttctccatgtgcctcttcttgctctcacgatccacggcgagtttcctggccaagaccagatccactcctccttcgcctttctttccacgacctaatcgaaaaaaaaaaaaaacgaattcgccttcttcaaaaacctcttcgacgtcgcacccgcaacgcacgctggcgggcggcggccatggcgtacctccctccccacaagcgccaacccagcaccacagcctccacgcccatccccgcacccaacccgccacctccgtccctctcctcctccctccgctccctctccctctcctccccgcgcggccgcggccgcggccgcggcgcagtcggacgccacccgctcgcttctacaaagattttccgcgctgccggctgcatctcacgttggttccctctacctcccttctcccctgccggcgacggcgaggagtacatcctacgcctcgagcccttcccttgtccccccatcgagcacaggaccggtgccaaaccccttgcccttgtcgtcgcctccaccccaggacaaggctcttccggctccactgcggcggcagtcacctccatcgccgagcagtttcttcccgatctccttgccgccgcggagagggtcaaggcagaaggcgcgcctaaggatgagttggtgaaactgagtctcgttgcaagactgggaacggtgctcttcgagtgccagcccggtggatcgcccgtttcactggacgaactccgtcaggccgctaaagcaggggaagatggttccaggagccagttgcgtaaaacgttctacaccagtttgtctagtgagtgtctggatgatatggagcgaaccatggtaaagaggattgggctggattttgattcgtccaagaagcactatcatgtgaaggtttctgacaagaatcgaagtgattctacaatatcttgcaaatgcaccgtggaggaagatgggagtcttgctatccataaggttgaattgaatcaggtacggcacttggtggaagacatatcctgtcttttcaaaggtcttgatctaaggttgatgttgagtaagaaaaggatcctgaaaaacctagattctgaagtggaaaatgcagtaaagagcttggtgtctactgctattattgatcctaatgtgaaagggggagttagatggccacttggaaaggaatcaattggcgagaggttcagcatagttggggtgtggcacacggactacaaagctttcagaaacgagaccatgaggctcaagctaaggcatgctgacagattcgatcaccgtacctcgactgggggagtttctgatgaagttacattcaaactaactgctatatcttgcaaactggaggaagatgatctggcggagagcgctgtgaaagagatgctggagtctgcggtccaaatgctatgggacaatgcgctcaactaccgggtcgtgccttgagctccggttatgcagacaatagttcttccttgaagatgcaaagcgacatgatttctttgagcccctcctgtcctgtactagtactgaacaagagaactcctaaacacaactgacgctggggctgcccacgcacgccatcaaaaaaataaaaataaagtagcgttgggaaaaaaaaaaaaaaaaaagcatatcgataccgtcgacctcgagggggggccccggtacccattcgcctatatagtgagtcgtattagcggctccccggggggcgcggtttttaaaagcgtcggggactggaaa

SEQ ID NO: 1866 - DNA, 1502 bp, Zea mays
  Clone ID: ZEAMA-23APR03-CLUSTER14448_2
gcaaaatcgaccgcctcccactgctcctccatcccgccgccgtgagacgctccgtcgtcgtgcatcaacttaggtgaatccaccgccacctcttctccatgtgcctcttcttgctctcacgatccacggcgagtttcctggccaagaccagatccactcctccttcgccttcctggccgagaccagatccacggtgggttttcgctctggtctgcagagtaggaataggctcagatccactcgtcccatttgcccacggtcttcgcagctgccggaaaccactcgcgactctgcagagtaggaataggctcagatccacaatgctcgtccatccaatccgtcctcgaaatggggacgcacctcggcaccactcgcgctcgtccatccagccggcgcaccgagcagagccgcgacgcgggggaggaagaaggaaggtgtggtgagcagagctgccgagcagaggaaggtgtgtggagagacatgtgtattcctcctatgacgaataattcaggctccataaagatgagttccaggcatcaagaggtcaagattccaggaggcctaaaataggtaaacttgttgttctataaacacctgttctccagattttatgttttctttgagcaatgtagactttgttatgccactatttatttcctattatttttatgtgtggcaccaaaattgtagcacctctacaaaacctgattgctatgtactgttactactcttccttaccttatctcaagatccatgtattgtaccacaaaattcacatcaggtggatgtgaattttgtggtacaatacatgggtcttgatctaaggttgatgttgagtaagaaaaggatcctgaaaaacctagattctgaagtggaaaatgctgtaaagagcttggtgtctactgctattattgatcctaatgtgaaagggggagttagatggccacttggaaaggaatcaattggcgagaggttcagcatagttggggtgtggcacacgggctacaaagctttcagaaacgagaccatgaggctcaagctaaggcatgctgacagattcgatcaccgtacctcgactgggggagtttctgatgaagttacattcaaactaactgctatatcttgcaaactggaggaagatgatctggcggagagcgctgtgaaagagatgctggagtctgcggtccaaatgctatgggacaatgcgctcaattaccgggtcgtgccttgagctccggttatgcagacaatatttcttccttgaagatgcaaagcgacatgatttctttgagcccctcctgtcctgtatatacatctgcgatggtgagactcaagttgtacttcaagtgtggcaacaattactagtttgagcccctcctgtcctgtatatacatctgcgatggtgagactcaagttgtacttcaagtgtggcaacaattactagtactaaacaagagaactcctagacacaactgacgctggggctgcccacgcacgccatc

SEQ ID NO: 1867 - DNA, 1245 bp, Zea mays
  Clone ID: ZEAMA-23APR03-CLUSTER1445_2
gcccacgaaattcgccgcgagcaaaatataaacccactcctgcccttcctccaactcctccgttccccgttccctcctctaccactggccccggcaccgcgggagcgccgaccgcctgctcgtctcgccgcagcccgtccctgagccggaaccctagcggccgccattgcccacgcgctgcgcgcccgatggacggcgggggctccgggccggcgcccaacgccgcgcacaccgcggaagaggtcttccgcgactacaaagcccgccgcgccggcatgatcaaggcactcaccaccgatgtggagaggttcttcaagctctgtgaccccgaaaaggagaacttgtgcctctatggctatcccgatgagacatgggaggttaccttgccagctgaggaagtgcccccagagatccctgaaccagcattaggaatcaactttgctagggatggcatgatgagaaggactggctggcgctagttgcagtccacagtgattcctggttactatctgtcgcattctactttggtgcacggtttggatttgacagagaagctaggaggcggctctttagcctgataaacaacatgcccacgatatttgaggtggtgacgggagcagtcaagaagcagcaggcaaaggagaagacacctaacagtagcagcaagagcaacaagcctagttcaaaagtgcagtcaagagcagagtctcgatcgaaggctaaggtccccaaagacgaagaagagagcggtgacgacgacggggacgaggaggcggaggagcacgacaacaccctgtgtggaacctgcgggaccaacgacggcaaggaccagttctggatctgctgcgataactgcgagaagtggtaccacgggaagtgtgtcaagatcacgcccgcacgggccgagcatatcaagcagtacaagtgcccagactgcaccaacaagagggtcagggcgtgagcaaccgatgcgaccttgctaggaaggaaaggaagaaacgacctccttggcgccaagatatggcgtgtagttccctagtctgtaagcctgcatttttcatttatggttgttttatctgttgattagctgttcgacctagcattgtctaatgcgtggcatgtctcatgtgctgagtgttgacattggcatgggccccgccctctagtctgtaaacgttgtcactgaaggtacctctcggctgaccatttctccaaaaaaaaaaaaaaaggccggccggcgccgtt

SEQ ID NO: 1868 - DNA, 1747 bp, Zea mays
  Clone ID: ZEAMA-23APR03-CLUSTER14515_1
aagcgacatgttcacgcctgttggttcggttcggtttcggcatggaggtagctgagagaccgatggcctcgtcccacctggcagctctcgtctccctgctgatcccctgcctccttgcgcttctgctgctccgcctcgccgccgtgctggacccggaccccgacgccgccgtgccccgcatcaaggcggccgcgcccctccctctccggttccgccacgatggcgccttcaagatcctccaggtggcggacatgcacttcggcaacggcgccaccacgcgctgccgggacgtgggccccgaaggcggcggcgcgcgctgctccgacctcaacaccacgcggttcctgcgccgtgtcatcgaggccgagaagcccgacctcatcgccttcaccggggacaacatatttgggggcagtgcaactgacgcagcagaatcactactcagagcaatcagccctgctatcgaatacagggtgccatgggctgccatcttaggtaatcatgaccaagagtcgacaatgacccgggaggagctgatgaccttcatgtctctaatggactactcggtatctcaagtaaacccacctggttttttggtacatgggtttgggaattatcatgttggcatccatgggccattcggatccgagctggtcaatactagcctgcttaacctttacttcctggatagcggtgatcgtgaaatggtgaatggagttaaaacatatggatggatcagagagtctcaactcgcctggcttcgttctacttccctggagcttcagaaaaaaatacatgccccagcattagcgttcttccacataccaatcccagaggtccgagggctctggtactcaggcttcaagggtcagtaccaggaaggggtggcttgctcatctgtacattctggtgtccttgggacccttgtctccatgggagatgtaaaatctgtctttttgggtcacgaccatcttaatgatttttgtggcaatctcaatgggatctggttctgttatggtggtggctttggttatcatgcctatggaagaccccattggccaaggagagctcggataatttacagtgaactcaaaaaggggcagaggtcgtggttggaagttgactcgatctcgacttggaagctgctagatgatgaaaagctctcaaaaattgatgaacaggttatctggagacatagcacagatgattctgaccacagagtctacttgtgaagaccatgaacctaaaactacttcctgtatgtgtcatgtgtataatgtttgtcgcaaagattcctccaattttataggtcgattgattattggtagtatgatgtggcacggacctattttagatttcacatttggttcaatgttgatatgctaaccctggtttgggtcgctgacctgttttcgaccttcttgagaagctgccaattggtccccttgttttgggagcatcaccacatcataatctgtttcacaacagatgattcttattattttttttttttgtaattcacggcagatgatcctgaccacaatgtttacttgtcaaggccagagccataagacaacttccagcttgtgtcatctgttccatgtataatatctgtaaacaagtatggtccagttttgtttgtgggctcgttgaattattcttggcaatatgtgtctgctaagatccgaaaatagacataacatgccatgacgatactgatatgccaattcaatttccctgattgctg

SEQ ID NO: 1869 - DNA, 1465 bp, Zea mays
  Clone ID: ZEAMA-23APR03-CLUSTER14527_1
tttttttttgttttttgcatctcattaattcatttatatttgcattccataaaacatggatgaatatttaacagtattaatattacattcatacctacgacttgctcgagggcgtgaatgcgagatagcaattacaatccagcgtgaacagtatagtgctactgtcactacaccaaaaatataaacttcctacaacttttataacaaaccgtaggaaataaataacttccgagaggcaactggtagctctaggaaataaacataactttctacggttttttataaaagctgtaggaagttagctttcacatgctgaccaacgtgtgtggtcaaacgagccgctaacttcctacggcctgctctaggaagttagccgcccctgctaccttcctacggcctactctagaaagttagctttcagctttgaccagtcaaacaagccactaactacctacggactcctctaggaagttaagtaacttcctagagtacatgtacagcctctaggaagttaagtaacttgctacggctttactctaggaagtaatattttttatcttaatccgtgaatctacccttatctttccatcattcatcctttcttctccaactcgaagacgccggtcgcgcgccgccggccgcccccgccccacccgtcgcacccccgattcagctcccaatcagacacaagctcacgacatagccgaccggcgggctacgcatccatgtcttaggaggatgcaggcgatgaaggataagatcgccgcgaggcagttcgccgcgtctcaaggatcgtggaacgacctgctggccttcatagacaccaagagcggcagcatggcaagtgccactaaccctttccacccttaactagtctcttggccctctatcctggctgctagtgtggtaattaacctctctatttttctctcccatgacgtgtacaacttccttcttgacagcggcatggacccagtgtcccgcaaattcctcgccgttgtcgcccagcagcgtgctacaggcgttgaggtactcgacgtacctcggcagccaggaggactcgtccgccgactcctccaataccatcgacggcatcatgaacggggtcatcaaggagaagctcaagatcatccccaaggacgtcaggtgagatgggagttgctgtgagtgctattatcatgccaatcaattatcgatgcgctaaacagctgcctgcaggtgggtggaggtctccaatgccatctactacacgctggtcaacgacttcatgaagccacgaattgacgatgcaagcaagctactctatatgaattaagctgatgtacgtggagtttttgttaaccaaatgctcctctccttttttttggtgtgtgtgtgttcattttcgcaaattgatgagatgctatcgtatggtgtgaatgttactgtatttttgattaggatgttctaggtaatggtctcgtgc

SEQ ID NO: 1870 - DNA, 1568 bp, Zea mays
  Clone ID: ZEAMA-23APR03-CLUSTER14545_1
aactgagcgttgcactgcttccttcctctgactcgccccctccgcgaccactacgccgccgcctccaccctagtcctctcttagtcgccccacgctgcggcttaatgcagcgtggcgtacgcgagatctggtgttggtactgtcgctcggtccccacccctttggctcttcaaagatattaagcttcggtgcttgcctgggttggtattatatagtgggttggtcaaaggcttagtgaatggtaggagtagtacaaccggggaattggcagcaagctaggaagaaacagcaattgagatcagcaaataatagtgcgattgattcatagcttggctcttagcgactccagtcgcgtcagtgaagcccagcacgatagtaatcgatcaggttaagattttgaaaagaacaggtcttgcacacagactgcagctttttcaaatgcctcaataatatgacatgaaagaatgaaaaacaagtcaattgagggatagattagttgcccgaggagattttgtttactggggtgttgaatcttatcaactttttcaagtaagggaggagctcaagtgtctcacttggagagtcaaggtatgtgaattgttttgtttttgttgtcgtgtcaagttaaagtaagaagatgttgttagctagtctgttctccctgttcattctgttgtgttagttgaaggggtgctcagtaagatggagattgagaatgatggatgtctggtcagctaggctatgttgttctgagattgtgtggtcctgttctgcagcactagatatgtaggctgcatccggtctgtagcaccaacaacaggcttgtaaactagaagcagtaagcactgaacctgtaactgtttgagcatccaagccggtaggtgctgcattcagcaccggcttaggaaaccatatgtttcttctctggttagaacaaatctgggggaaaagatagagaggtgtaggaagaagaggcagagagtagcatccttatttgttgcatttccagtgtggtcatgataggtatttttgtacgtagagaacactcttcattaggtcgcatagaagatttaacaattgttgggttgttattggagtaacaattttactgaatgttcctccggggaggagaaaaagagagagatggtggaatctgcgttcggcgaggagggttccaagaggcactgctacgaagttgacggtggaagatctcatatacctcttcatcgtgtgatggcagcttgtaatcatccatagggctgatgactattgttgtgacaatcctaatggacaggctagggtacagttgttgatcacagtccaccacagtttatgcagtagtaggcattttggagctgaggtagcagtgtatgtttatggtcctaataagtcctaaccatgactggcctgactatcttgtagctattctcatgagttggagcttgtcctcagactttcgccgcaactcggcaaacagttaaatctgggaactgaaggaactgttaatatgtaatttcaaaaaaaaaaaaaaaacctataatcgacgctcatgtaatttggttgcccat

SEQ ID NO: 1871 - DNA, 1496 bp, Zea mays
  Clone ID: ZEAMA-23APR03-CLUSTER14584_1
accactatccattttcattcaatgcgtccgcgccgcgcgcctccattcctctcgattcccttcctccttccttgttcgaggacctccgtgaccgtggccgagggattgaggacggaaagcgaaaatgatgctgacgcgggcgtcgatgggggtgatggatgcggcggcggtggacgaggtggtgcgtcgcctcgtcgagggcggccgcgggggccggcaggtgcagatgtccgaggccgagatccgccagctctgcgtcgaggccaaacaggtgctgctgtcgcagcccaacctcctccgcatccacgcgcccgtcaagatctgcggtgatatccatggacaatttgttgatctcttgaggctctttgatttgggtggttatcctccaacttcaacttatattttccttggagactatgtggatagaggcaaacaaagcttagaaaccatatgtctgcttctggcatacaagttgaagtaccctgataatatataccttttaaggggaaaccatgaagatgcaaaaattaacagagtttatggtttctatgatgaatgtaaaaggagattcaatgttcgactatggaagatattctgtgattgcttcaactgcttgcctatggcagcacttattgatgacaaaatattatgcatgcatggtggcctctcacctgaattgactagcttggatcaaataaaagatattgagaggcctaccgaaattccagactatggtcttctgtgcgatctcctttggtctgatcccagtcatgatacagaaggttggggggagagtgatagaggtgtttcttgcacttttggcgcagataagcttgttgaatttttggagaagaatgatcttgaccttgtgtgcagagctcatcaggtggtagaagatggctacgagttctttgcagagagaagactagtgaccatcttttcagctccaaactactgtggcgaatttgataatgcaggtgctctattgagcatagatgaaagcttgatgtgttcttttcagatcttgaaaccaaatgaaacaggtgcaccacattcaaggaaacctcttccaagcaaggcaccaaaaggagagaacgtctaatttgtatccagtgacctaatcacaatcgatgtcagctcgaagggggcgatctcgttgtctcggatccaccagggcatggcattagcgttctacacttgctgaatttgtgtggactcaatcggcagcgcttacattcttctgtacagcagcagtgtttctaacttggcatatcgtccgttctgatagtgacattgccacagctgcaatattttagtcgggtggacaaggcattttgttgggtacagtagctgttgttttgttagcctttttttggtaatgtttgtttggttgattgaacgctgtgagttttgtttgccgcgtatcttcgtcaggctcgggtatttacatcctgcaactgtgtaaatgattttgtctaacgaatgtctgttgacat

SEQ ID NO: 1872 - DNA, 1076 bp, Zea mays
  Clone ID: ZEAMA-23APR03-CLUSTER146634_1
ttttttttttttttttataaaaagaagaatattctatttgagtaccatcatcaaaggatgctaaatcatcatcgtcaaagcaaaggatgttatgcatagtaaggacatgtgcagaacaaaattaaagtagaacggcgtagcgttgcttgctgcttgctggctcaattactgagtagtcaagtagaattgattaagaatcgaggtagtagatggctcagtcagtgcgtgtgtgtcgctgccatgtaggcggcggcgagcatgttgccgagcttgacctgcgccggcgttgtcagatgcgtgtagtcgttggcgacgggcaggcccttggcgtccacgtacctgacgttgcggaggctgaccctcctctgcgcctccctgacgatgtccacgaacctgccctgccccgtggccagccccacctggatgaccagcaggtccggcatgcccaggtcccggcggacgtcgcggaccaaggcctccatgcggggcgtgtaggcgtcggcgtcctggcgcctgatggtgtcggcctcgccctggtaccagagcagcgcggccagcctggtggcgggcccgcgggcgacggcggcccttgcgcgcgcgagcatgcggtcgtacagcggcgtgccgcgggaccagctggcgatgggcgtggcgccctgcgcgcaggggaccagccccaccacggcggggcggcggccggagcggcgccaggagcggaggagcgcgtgcgcgaagggcatcccggggcccacgccgagcacgttgtgcaggtcaatgccggcgtgcagcggctccctggcctcctcccagcgcagggacggggagaggcggaggatgcgcggggaaggcgcgcacgcgggcggcaccacgccgtcccaggtgccgttggtggcgccgccgcggccgcccatgttggactgcccggccaggaggaacacgagcgtcggagtggaggcggtggctgctgcctccgctggcactgtgggtgcggcaaggaggaggaggaggaggagcatctgcgccattgccgctccgctgctgtcactctcagctcagctgctctagtagaagggtgt

SEQ ID NO: 1873 - DNA, 1147 bp, Zea mays
  Clone ID: ZEAMA-23APR03-CLUSTER14751_3
atgggttggcaactgccgggctcatctctagagggcagtgcaaaagtttcaggttggaaaccaccagtcttatcacttgaagggattgctaatggttcaggttcacaagcatcgtgtccttctacgcaaaggggcacaaaatcttcaggttggcagcgatcaagttcatccccggatgggagcagaaaagcctcaggttggcaacagtcaagtacatcaccagaggggagtggaaaagcgcatggctggcaacgatcaggatcttttacccaggggggtacaaaggctgcaggtcggcaaccctctcgttcctgtacagatcggattgcaaaagttgatggctggcaacgaacaagttcatctccggagggaagcagaaaagcttcaggctggcattcgtcgggtcgtgacagctcaaagatcgcatccagtgccagcgaaaaccgtaaattgtcttctagtcaccaagcgacgacaccaacagggaggcactcgttggcaaagagacagggaagcagcgacaagggtgctgctggttgggacgaggctctggggaactcttcggaagcatcgaagagacaacagggaaacagcgacaagaatgcaggctcgggagtggctctcggaagcaacaggagctggcatccatcgtctggtaaccctagtcggggcggccaggggaatcaccaacatgacagggactctcacagcggtgattcgcggcggggtagctcgaactacccccggaggtccgacaatcgtcatgaccatggcagtggtggttcgtcacgaccctcgtcaagagggcagtcccagagggggctatgtaaacactacgagagtggccactgcgggaagggttcgaaatgccagtacctgcaccggtgatcgccgtggccgtgtggaagcgggacccctgtttgcctggccgtcctcacatttttgtatagcaggatgtggtttcgtcgtagtcagtatagtagaacgcttattaaccgtgtcggcaccactaagttggtagtagtacatatctttcagggcaggagcatgactaaagtaggatttgtaagttttattagagccactgatggccttggataaagattctccgctttttggttcgggaatgcacgctttttgttcagct

SEQ ID NO: 1874 - DNA, 1497 bp, Zea mays
  Clone ID: ZEAMA-23APR03-CLUSTER14793_1
acaaatactactctagccatcgcaaaacctcctgacttcccccagatccagatcgtttccccagatccagatcgcaggcgtgaagggcgactgttaccagattatgatccgttttcgagcttcgaggaatcgacggtcaagcttcggtgaccaagtgacctggttcttcgagttctgcaaggttgaagaccctgagcatctatttggtgaaggatactataccagcctcctaagtgaaggcacaaatccacaagactatgacgatttagttgacttgtatcctgaggaacaaccacaaagggtcgaagtaaacacttatgcaccctctgctagaccgaaccataagaggtcaaagaatttcagtgacgtggaagacgagcttttggtgtctgcatggcttaacataagtttggatccaattattggttataatcaaactcgcagttcatattggactagaatttatgactactttcatgccaataagaccttctcctcaacccgtagccagaactctattatgcaccgttggaccagcatacaagaaggtgtaaacaggtttactggatgccttgctcaggttgagagaagaaggcaaagtggtgctacaatgcaagacaagcttacacaggcgtgtgctttatataagtctgaagataagcaacataaagcttttccatatatgcattgttggaataagttgcggacacagcgtaaatgggagatgaaacttgaagaattggctgttggcaagtcatctaataagaagcaaaagatgaactcaaatgaaacctcacctccacatttaccaagtgccaccgaaacaagcgagcctacaactccaaatgagactgtcacaacaagaccacctggaaagaagaaggccaaagcagcagcatttcaagctgaaaagaaaggctacacagaaactttaaacaaattatttgaaaagaagaaagaaacagatgaatttaaagaaatgaaaaaagacgagaggtttagattagcattagcagttgaacaagagagggctgcgaatgagaaattaaatatgcagttaaggagtaaagagctagaattgaggcagcaagaagttgaacaacataagaagagggaagaagagaggattatgacactagaccttagtgtcatgcctgctgatcagaagcaatattacatgagactacgatctaagatattgtctgaaaatgcctaatgttacatggtacattaggtgttgattagtctttagctaaactgtttgctttttatcactatagatttaggtttctttcttttggtgctatgtaattggataatacacaactagctttgcttattttttagctaaaatgtttgctgtttttatcactgcgattttaggtttctttcttttggcaatatgtaattggatactgcccaactagcttgtcatatataattcaaacatcaggtgtttgtttaaaaaaaaaaaaaaaaaaaaaaaaaaaaaaaaaa

SEQ ID NO: 1875 - DNA, 2012 bp, Zea mays
  Clone ID: ZEAMA-23APR03-CLUSTER14806_2
agaggacgcgcacccggggtggagctgagagcaacaggagctcctgcggcgaattcgggccccgagtacgccggttcaggcggccgccgccggtggaattgtgccagtcgaggtggcctgctggtgcggcgggagtttgcgagtagggcggttccggttttgagtgagcgaaggtgttgttgggggcgtggatctggccggcggcgggcgatgggaaggagggactagggctcgattggagggaaaggcgtgatccatgggcggatgcttctcgcaggaggagcaccggctccagagcaggccagctgaagctgctggaccagacggactgcagaagtcaaaatctgattctaaagctacagcaagtgttcttgctccaccaaaagctgtggtggatctgcaagtggaaggatatggaaatgtgaatattttcacatatgacgaattgagcgcagccacaaaaaacttccgaccagatcaaattcttggagagggtgggtttggagttgtttacaaaggtgtaattgatgaaaatgttagagcaggtttcccatccaggcaggttgctgtgaaagaactaaacccagagggttttcaaggggacaaggagtggctggcagaagtcaactatcttgggcaacttagtcatccaaatcttgttgaactgattggctattgctgtgagggttcacatagactgcttgtgtatgagtacatgggcttgtggaagcctcgaaaagcacctttttcggcgggtttgccttaatatgccatggtcaacacgcatgaagattgcattgggtgctgcaagggggctcgagtaccttcacagagctgagagatccatcatttatcgagatttcaagacatcaaacatcttgctagatgcggattataatgctaagctttcagactttggtctcgcaagaacaggtcctagtggagaccaaacccacgtgtcaactcgtgttatgggaacttatggatacgcggctccagaatatgtcatgactggccatctgacagcacgaagtgatgtttatggctttggagtcgtgcttctagagatgattattggaagaagggctgtggacgatagccggccgagccgtgagcataacctagttgactgggcacggcccctcctcgtccataacaggaagctgttccggataatcgatccaagaatggaagggcagtactccaccaaggctgccaccgaggtggcaagccttgcataccgctgcctgagccagaaccccaaaggacgaccaaccatgagccaagttgttgagacctttgaggccgtgcagaacatgcctgaatgccaggacatactcctccagaacggcatcacaggtgccgtgacgctctacgaggtcccaaaggagcctgcagacagagttgagctggagaaggccaagcaggaaccggcagtaaagaccgccgcaatcccgcccgtgaacggaaagccggccccccagagcaggcgaacgcggcctgggaatggccggagcaagagcgagccatcgttggagtgtaagatgtacatcccatcaccagactctgacgaacagcagctcggcctggaggcactggcgtccccaaatggcagcatgaaggaccatcctgatgaggatttgtacaagatataaaaccagagccctcgttgctcgccttttgcgccgcacaccccagttctcaaagatcggtcagttacaattttttctctgatagccaccggcctcgctagggttcttattcttccgattagcaatagtatgtagagggagagttgtgatggaaagcatgtgtgtgcttgccatgacgatgctgtagagatctgatacacttctttctggggaatttccactccaaaaatggaagttgagagatgtgtcctgacgattggtgcgttttacccgtgtgttgagtttacttgtaaagatgcttcttcgttgtaatcttcagttctgcgggaaatcaacaccagcatagaaattgatagatca

SEQ ID NO: 1876 - DNA, 2826 bp, Zea mays
  Clone ID: ZEAMA-23APR03-CLUSTER14820_1
gcacgagaccattacctagaacatcctaaatcaaaaattcttcatcaagttattttcttgctccacggattgcctgctctgatgatctggtccttggcaagatcacactcgtgttcataaactcaccaactcactgacacccccgtactctttcttcttcacccacggccaagatagaactcactggcatgctaggcttcctctttttaattcaccaactccctcctccggcgcatccgcatccgaatctcaatccccacgggcacgaatctgacgctgcgaaaacctttccgccatgaagcaggaggggcggaggcggcaacaccaacaccaacaccacaggccgccgccgcgcctcgagctggctatggcgcacgcgcggggcggcgggggccacggccacggccacgaggaggaagcggaggcggccgtctgcctggacggcgactccgaggcgggcgaagcgcgcagcgcggggcgcgcgccgccgtggcgggaccagctgacggcgcgcgggatggtggcgagcctcgccgtcggcgccatgtacagcgtcatcgtcatgaagctgggcctcaccacagggctcgtccccacgctcaacgtctccgccgcgctcatcgccttcgtcatcctccgcgggtggacgcaggcgctcgcccgcttcggcgtcgctacgcgcccgttcacccgccaggagaacaccgtcgtccagacatgcgccgtcgcctgctacagcatcgccgtcggaggtgggtttggctccttcttgcttgctctgaacaagaggacctacgagatggctggggaggacacggaaggcaaccttccgggaagctacaaggagcctggcattggctggatgaccggcttcctcttcgccgtaagcttcgtcgggattgttgcgctaatacctctaaggaagatttttcttcgatttcagtctaacatatgttggcgctgggatgatttgctctcacctcgttaatctatctctccttcttggtgcacttctctcatggggaataatgtggccactggtcagtgatttgaaaggggattggtatcctgcagatatgccagaaagcagcatgagaagccaaggttacaaggccttcatctgcatagcgctcctcttgggcgatggtctttacaattttgttaaggttgttgcattcactgttaagagtctacttggcagatcaagactgaagaatgcaaagaaagaggaagacattccagtgcttgatgaaattcagcgcaatgagatttttacaagagacagtatccccacatggctagcctactctggatatcttgcactatcagctgttgctgtgtttgccattcccttgatgttccatgagatgaaatggtactatgttattatagcatacttattggccccggcattgggtttctgcaatgcctatggtgctggccttactgatatcaacatggcctacaattatggaaaggtcgcgctctttattcttgcggcctgggctgggaaggactctggtgttgtagctggcctagtgggttgtggtttggtgaaatcactggtgtcaatatccgctgatctgatgcatgacttcaagactggacatcttacattaacatcacctagatcaatgattattgctcaggctattggcactgccatgggctgtgtcattggaccactgacatttttactgttctacaaggcttttgacattggaaaccctgatgggtactggaaggcaccatatgctctaatctaccgcaatatggcaattcttggtgtccagggcttctctgctctgcccctgcattgtttgcagctgtgctacggattctttggatttgcagtggcagccaatctgatgagggacctcttgccaccaaagtacggcaaatgggttccattaccaatggcaatgggggttcccttcctagttggtgcgagctttgccatcgacatgtgtgtggggagcttgatggtcttcatctggcacatcattgacagaagtaaagcatctttaatggtgccagcagttgcatctgggttgatatgtggcgatgggctttggatcttccctgaatccttgcttgccttggccaagatcagtccaccattgtgcatggcattcaggtcttcacactagagtaacaaaatgctcgacatctgagaacagttccatgtccaatcggagaagctgttggcatgccaagtttgttattaattagctgggatatgatacatgcaggtaggtaaagatgcagtgcctatctggatgttacctacatataatgacgtaatgtggtacccctgtaaaatttatcatatgcaagatgatacatcacattagagcaatggtaagtttgagaatttcaccccagtggtaatggatggatgcaagagctagcagtagccaaaattttgcaccataggttgtacccccacccctatagtttaatatggaaccacaagctacagtatacaaaccatcttccaaagacagctgaccctattgtcaatcacagctggttttggtaaaagaaaaatgcagtcaaatcttgcatgaatggttagcaaatcatgtatatatttatgtatgtctttgccataacttggattcacaagatgcaatgtagtaagaggcatcttggtcaggcatctgatacaattgtaaaatcatctgctgcgtccttttatcataaacaaaatcatcaggtgatgtatgcctatgaatagttagcaaaaggtacatatatggttatgtatattaaacacgttctgtgaagaagaaatgtaaccattcaacaaaaaaaaaaaaaaaa

SEQ ID NO: 1877 - DNA, 1163 bp, Zea mays
  Clone ID: ZEAMA-23APR03-CLUSTER14913_1
aggagaagtgaaacatttgttcacttgtgcagcccaggtgcatgttgtccagagataagcaggtgatggctgcgccgatggccgcggcggacggcgggcttaggcggctgttcgagaagccgctgccggagaacccgacgctgctggaggcgctctcggcgtggaaccgcaacgtgcaccaccccagcagcaagcccatcgacacggcgtccttcacggagatcttcggcgagctccacttccaggagaagcagcagcccgaccgaggcgccctcctgccgccgtcgccgtcgcccccgccgacgccgtcgcccccgccgacgccgctccctccttcccgcacgctgtcgtggctcgacatcgcggccgaggccgagaagagcaaggacgactcgtcgctggacgcgctgctgaggcccaagccagcgaccaccgtggccacggtgaagaggagcgcgagcttctgcaccaagaagggctcctccgcgtcgctgctgctctgcaccgaggggctcggctccgagagcaccgtggacgctgacgacatgttcaaggacggcgacgccgaggccgaggccgaggccgccgccgccgcgctcaagggcacggacacggcggacggcagcgacgccgaggaggcggtgaaggaggagaggcagcccaagacgttcccgccgccgataccgtccatcgggcgcggcggcaagccgtacgtgtgcttccggtcgttccgggaggacggccggttcgtgctgctggaggtggtgatccccgggaaggagctcctgcaggccacgcgcgagggcggccggctcaggctgcagttcgccaacgctgccgcaggtggtgtgggtgtcgtcgacgaggcggtgcacggaggtgacgacgatggcgacccccgtggcaagaacgcatgcatagacgacgacgaccacgatgacgagcgctaagtgatcgtcggggttcgttgatgtacttggcatactttatcacgatcgataattgtcctactactactgctacggatgatgatgatgcaatggtgaatcatgcggatgagaagcatcggctaactaattaattaatgtttctaaagtgttcttcagaaagtgatctgaaaagcgttgtgctcgtcctattcagtcagtaatgtttctaaaaaa

SEQ ID NO: 1878 - DNA, 1000 bp, Zea mays
  unsure (1)..(1000): unsure at all n locations
  Clone ID: ZEAMA-23APR03-CLUSTER14918_2
agtcctcttccattagagagacgccttggatcgattgcttgggagaaagagggcgcgggtggctgattcgttcccctctgcctcctccgtgctgcaggccgacgagggacaacctcgtgcctatacgcgtcgacgtcgaggtggacggccagcgctacagggacgccttcacctggaacccgcgagatcccgactcggagataatcagcttcgctaagcggacggccaagganntcaaactgccggccaatttcgtcccccagatgctccagtccatccaggggcaacttgcggagttccgctcctacgaggggcaggagatgcaaatcaaagagaagattgtgcctctgaagattgacctccgagtgaacaacactgtaattagggaccagttcttatgggatatcggcaaccttgatagtgaccctgaagaatttgcgaggacgctgtgtgatgatttgaacattacagaccctgaagttgggcctgcaatagctgtttccatccgtgagcagctttatgagattgctagtcagagcgtctctgttatgagagagaagcaaatgtcaaagaagggaaggcgagcaccagaattttcttcaaatagtaaagccgtgaacaatgcagtggatttgttcaagtattttggcagcaaagggagcgtcatccggtatatgatcatttcttctaaaaaccttgatgcgttaatgattactgtagtttggtactttggttatgatggtactggtagggaagtaccgacgaacaatgttcactctgtttggactaacacgttgctagcttactgttctctggtgtcgaaaccgccttgattctgttttttcccctttttggtgtataccaggaaaaggaaggaatggtacctgtatgagcctgttgttgatgtggtagctaatgacgaagacgggaaagaggaggctaataattctagcaggccgaagaaaagagccgacgaagagaaagctgcaagccttcagtc

SEQ ID NO: 1879 - DNA, 2004 bp, Zea mays
  Clone ID: ZEAMA-23APR03-CLUSTER1493_5
gcacgagaccattacctagaacatcctaatcaaaaaggccgctctctctgccacactcgggtgcctccaccaccaccagtagcagcagcagcaggatcaaaaggccaatgggggcgcacgccaccgcggccgcggccgccgtcctgctcgtcgccacctgcgttgcggcggtggcggcggcggcggcggcggcgctgctgcagcacgagcccggcaggatctcaggggacgcggtgggcgtgctggacgacgaccccgtggggaagctgaaggtgttcgtgtacgagatgccgcgcaagtacaacaggatgctgctggacaaggacagccggtgcctgcaccacatgttcgcggcggagatcttcatgcaccagttcctgctgtcgagcgcggtgcggacgctggacccggaggaggccgactggttctacacgcccgcgtacaccacctgcgacctcacgccgcagggcttcccgctgccgttccgggcgccgcggatcatgcgcagcgccatccgctacgtggccaccacgtggcccttctggaaccgcaccgacggcgccgaccacttcttcctcacgccgcacgacttcggcgcctgcttccactaccaggaggagcgcgccatggagcggggcatcctgccgctgctccgccgcgccacgctggtgcagacgttcggccagcgcaaccacgtgtgcctgcaggacggctccatcaccgtcccgccctacgccgacccgcgcaagatgcaggcgcacctcatcagccccggcacgccgcgctccatcttcgtctacttcaggggcctcttctacgacatgggcaacgaccccgagggcggctactacgccaggggcgctcgcgcgtcggtgtgggagaacttcaaggacaacccgctgttcgacatctcgacggagcacccgtcgacgtactacgaggacatgcagcgcgccatcttctgcctgtgcccgctggggtgggcgccctggagcccccggctggtggaggcggtggtgttcgggtgcatccccgtcatcatcgccgacgacatcgtgctgccgttcgcggacgccatcccctgggaggacatcagcgtgttcgtggcggagcgggacgtgccgcgcctcgactccatcctcacctccatcccgctgcccgacatcctgcggaggcagcgcctgctggcgcgggactccgtcaagcaggcgctgctgttccaccagcccgccaggcccggggacgccttccaccaggtgctcaacgggctggcgcggaagctgccgcacggcgagggcgtgttcctgcagcccggggagaaggcgctcgactgggacgccggactccagagcgacctcaagccctggtagtggactggactcgttgtacatctcttcgtgttcctttgtactctttcatttgacatgacatggatggatcacgcattagtttttgtaccacggcccgtttacatgcagcagcaatgtatgtatatatagtgtatttccgtccccaggctcgacaccatcctcacgtccatccccaccgacgtcgtcctgcggaagcagcgcctcctcgccaacccgtccatgaagcaggccatgctgttcccgcagcccgcccaggcgggagacgcgttccaccagatcctcaacggcctcgcgcgcaagctcccgcacggggacggcgtcttcctcaagcccggggacgagagggtcctcaactggaccgcaggaccgcctggcgacctcaagccttggtagcatcgtacgttcgtgcgccctataagttaccatggctgcatgcatatacactgctgacaacaagccaattaagtgtacatttttttggtatcttctttcttccttccttccttatatatagctgcaataccgtatacgttcatctctctctctatctccttatatatagatgatgagaaccatgtggataccgtagtcgaaatctacaacagtttacttactcgatcgctttgaatgtctg

SEQ ID NO: 1880 - DNA, 1830 bp, Zea mays
  Clone ID: ZEAMA-23APR03-CLUSTER1494_7
caagggcctcctgtctgctctcacttcctcagtcctcgtccgtctctgctccgatccctcctctctctacctagctagctagccagccttcctgtagcgcggcagatatggctgcctccaccacggcggcggcggcggcgtccgtgctgcttctgctcctgtcgctcgcccgcggcggcggactaatgtcgatcgtgtcctacggggagcgcaccgacgaggaggcgcggcggatgtacgcggagtggatggcggcgcacggccggacctacaacgccgtcggcgcggaggagcggcggtaccaggtgttccgggacaacctccgctacatcgacgcgcacaacgccgccgccgacgcgggcgtccactccttccgcctcggcctcaaccgcttcgccgacctcaccaacgacgagtacccggccacctacctcggcgccaggaccaggccgcagagggacaggaagctcggcgccaggtaccacgccgccgacaacgaggacctgccggagtccgtcgactggagggccaagggcgccgtcgcggaggtcaaggaccagggcagctgcgggacgtgttgggctttctcaacaatagcagctgtggaaggcatcaaccagattgttacaggtgacttgatctccttgtctgagcaagagcttgtcgactgtgacacttcatacaatcaggggtgcaatggaggtctgatggactatgcgtttgagttcatcatcaacaatggcggaatcgacaccgagaaggattacccttacaagggcacggacggacggtgtgatgtcaacaggaaaaacgcgaaggttgttactattgacagctacgaagatgtaccagcgaacgatgagaagagtctgcagaaggcagttgcaaaccagcctgtcagtgtcgcaattgaggctgctggcacagcatttcagctctacagctcgggtatcttcactggaagctgtggaacacggctggaccatggtgtcacggccgtcggctacgggacagagaacggcaaggactactggatcgtgaagaactcatggggcagcagctggggcgagtccgggtacgtgaggatggagcgcaacatcaaggcgtccagcggcaagtgcggtatcgcggttgagccgtcatacccgttgaaggagggcgccaacccgccgaaccctggccccagcccgccgtccccgaccccggcgcccgccgtgtgcgacaactactactcgtgccctgacagcaccacctgctgctgcatctacgagtacggcaagtactgcttcgcctggggctgctgcccgctcgagggcgccacctgctgcgacgatcactacagctgctgcccccatgactaccccatctgcaacgtcaggcagggaacctcgctcatgggcaaggacagcccactgtcactgtcagtgaaggctacgaagcgaaccctggccaagcgcactgggctttctccggcaacacagctgacggcattgaagagcagcgcattgagaaaacgcagcgtggcattaggtcgtcagcagcctgggtgatcgattagagcccctgcgtggggaaatggtcacctggccccctgattgacgacggaagcatggctcggcggccgctatctacctatatccattttagtaggtactcactcctgtacataaaccctgcagaaaaaaaagagggttcggttgtttatggaacccaggcaaatttgctttcgcgcacaatgtaaaactcagctagcagctctgctaagctccccggcgtagctcgacacagctgcgatctattattatttgatgtaatggggaccgatattgc

SEQ ID NO: 1881 - DNA, 1872 bp, Zea mays
  unsure (1)..(1872): unsure at all n locations
  Clone ID: ZEAMA-23APR03-CLUSTER1497_19
ctcccttcctcttcctgtttccgcgcgcgagatcgccgccccgggtgggctctagatcccgatggcctcgcgccgccgcaccctgctcaaggtcatcatcctcggcgacagcggggttgggaagacgtctttgatgaaccaatatgtgaacaagaagttcagcaaccagtacaaggctacgattggggcggatttcctcaccaaggaggtgcagttcgaggacaggctcttcactctgcaagtaagattggttaccctagccgtatgccgtgccgtgatctgggagtagttatgtttctttacgccaacttcagccccgattagtactttcttaattagttcgcgaactcattcatcagctgggatatttagaaagtataggagagggtgtttgccgctcaacatttgttaggtcatagcgtcgtgcttgtcgcgtctgattcagtatcctcaatatgctgtttcgtttatgcagtttgcttacacttggaatgtctagctccagtactaggtcctgttggcaaaatttcagtttcatcaattttattgcatcattgattactgtaatggcaacaatgtagtgaagtatttctgctagaaaacgtgcctcctaaattttctgaggaaaacagtactactaaaaggtgtaccctttataacatctgggcatctgcattgtttttcattctttactagtgaatcagatgttgctgtttatattggcatgttggcatgatgttgtttatattaacatagggcatttgggacagatgtattattaactccttttctatacttgaccgtaatcttgctctttgcttaattcacaaacggctgttttcagatcatttcaaaccttctagatatccgttattttttcatgctactttgtaaagcaccatcttcatcgtctctattgtgcacataagaaatctatgtagatccagattaatatcatgtcaagggaaatgtcaaaggtattgtcttctggtttatggtgtttaacaagtctttgtagatatgggacactgctggtcaggaaaggtttcagagtcttggcgttgcattctaccggggagcagattgttgtgtcctagtctatgatgttaattctatgaaatcgtttgataatcttcacaactggcgtgaagagtttctaattcaggcgagcccatcagatcctgacaatttcccttttgttctgttgggtaacaaagttgatgtagatggtgggaacagccgtgtggtgtcggagaaaaaggcaaaggcatggtgcgcctctaaagggaacatcccgtactttgagacgtctgctaaggatggaacgaacgtggaagatgccttccagtgtattgtaaagaatgctctgaagaatgaaccggaggaagaattgtatgtgccagataccgtggatgtggtaggtggcaaccgggctcagagatcatctggctgctgttaagacatgaggcatccacgaggcgtggtgatcatcatcggctatgcagtgaccaaacaatacctcaacattgctgggcctccatggttatctacgtgtccgtattccatttgttacctttccagtctcctgctatgtacccaagggcgcatttcccatgctgtcagtcaatccgtagacttcatttgtgcagttccatcagtagcgtcataccttgtgaatacagttggacaaaataagagcaagcctgaactgaagttcgtctctgtgtgggatgggggtcgccttttcctcgctttctgcttcaatgcgagttgccacacccgtgctggctagaaatgccgtcccttctggaaagcgacacccagttggcaccataaattcaatgcaagacgtcttnaaaatcagttgccatt

SEQ ID NO: 1882 - DNA, 1063 bp, Zea mays
  unsure (1)..(1063): unsure at all n locations
  Clone ID: ZEAMA-23APR03-CLUSTER14996_2
attctaggctccgcgtctcgctgtccccactccgtctcctccggctccgtctcatcccgatgccgctccttctcatcgtcgtcgtcccagtcccggagtcgctcccctcctctggctaagcgcagttcgcctggagcacggaaagacgatcaccttcacccccccctaaaaagggttcaccttcaaaaaaagtttgttcgccatcaccaccccctaaaaaggcttcaccccctaggtcaagctacattctgtgctattcaaaggccccaaggatgacgcaatggcaatgactatctaccaatggacatcgtggagctatcttccgatcatttgatagagaataaacctttgctgctaaaggatgtcaagttccaaaacgtacacgggcttaccagtgcttatagacctttgtttgttcgggacactacctttgctaatggggaacagacactgcacaggcaagggggaaatcttcttatagatatgtttcgtcactggtgacaatcatttgggagagaaacaagttaacgtaaacaacccttttttccataaaactccatctggaatgccacagttgctgctactgagtaccatccttatatccttatttcctaattgttgtggtgcatgtacagttttttttaaaacgaattccgaattggttattgctgttagaactcatttgagtgctatcttctcatatgctccttttttctctctggctgttatgttaaaggaccagatacaagtcaatcttccctttaaattacagttcaattattttatatctggcttctgcaagacactntcaaaaaaaatataacagcatgtggtccctgtgttatctactagcatgagccattgttccatgcaatttggtacatagtggggcatatttcgttacatttactttctatattcttagtatatttatagcctatatccccaaactatatcatatacttagcacacacccaattgttataatccacgcgctcatggcgcgcacactttactagtatataacattgttggcaacatgagctgatctctttattacacg

SEQ ID NO: 1883 - DNA, 1027 bp, Zea mays
  Clone ID: ZEAMA-23APR03-CLUSTER149_162
tactctctctctctgcctgcaaagctgcttgatccatcatcgatcacatcactccaccagtcgcagggcacgtaacgtacgactcatggtagatcgcgaccgcagcggcatctacggcggacgagcgcctacgggcaggagcaggggggcggccgcccgatgggtgagcaggtgaagggcatgatccacgacaaggggccgacggcgtcccaggcgctgacggtggcgacgctgttcccatctgggcgggctgctcctggtgctgtcgggcctggcgctggtggcctccacggtggggctggccctggtcacacccgagttcctgctcttcagccgcgtgctcgtacccgccgcgctgctcatcggaacggccgtcgcgcagttcctcacgtcgggcgcgctggggctcggcggcctgtcctcgctcacgtgcctcgccaacacggtgcggcgggcgttccagcgcaccccggactacgtcgaggaggcgcgccgcaggatggcggagcccgcggctcacgcgggccacaagaccgcgcaggccgggcacggcatccagagcaagacgcaggaggccggtgctggcactggcgccggcggcggcaggtcttcctcgtaaataagcaaatcatccatggatgcgtgcgtgtcaatctcagcagggtcgtcgtggaatgctcttctctgtacgtgggtaaccgtcttttggtcgtcttccccgagtgcgtgataaatatcctggtgttcgtcgtgtgtggtgctgccctaggctggggcctggggtcggctgtgtaccggtatctgttcatcgccgctccgtcgcgttcggagatgtgaataagtgatgtgaaggttaagtttcagctttgctattgctattgtggcttgtgcatcagcggtttgctcgttgactgttatggaaataagcattggtgaaggtattgttttaaaaaaaaaaaaaaaaaaaaaaaaaaaaaaaaaaaaaaaaaaaaaaaaaaaaagggcggcgtgcgcgcccacgcggccg

SEQ ID NO: 1884 - DNA, 1495 bp, Zea mays
  Clone ID: ZEAMA-23APR03-CLUSTER149_215
tccaccgtccacctcagctcccatatccgctcccctacctctccagcatctcccgtctccgtcgtctcgtctctgctcctcacctcgccgccagccatgggcaagatcaagatcggaatcaacggtttcggaaggatcggcaggctcgtggccagggtcgccctgcagagcgaggatgtcgagctcgtcgccgtcaacggaccccttcatcaccacggattacatgacctacatgttcaagtacgacaccgtgcacggccaatgaagcacagcgacatcaccctcaaggactccaagacgcttctcttcggcgagaagccggtcaccgtctttggcatcaggaaccccgaggagatcccgtggggtgaggctggtgctgagtatgtcgtggagtccaccggtgtcttcactgacaaggacaaggctgctgcacatctgaagggtggtgccaagaaggttgttatctctgccccaagcaaagatgcacccatgtttgttgttggtgtcaatgaggacaagtacacctccgatgttaacattgtttccaatgctagctgcaccacaaactgccttgctccccttgctaaggtcattcatgacaactttggcattattgagggcttgatgacaactgttcatgccatcactgccacccagaagactgttgatggaccctcagccaaggactggagaggtggcagggctgccagctttaacatcattcccagcagcaccggtgctgccaaggctgtcggtaaggttcttcctgaattgaatggcaagctcactggcatgtccttccgggttcccaccgtggatgtgtcagttgtagacctcactgtcagaatcgagaagggggcctcctacgaggaaatcaagaaagctattaaggctgcttctgagggcccactcaagggtattatgggctacgtggaggaggatctggtttccaccgacttcaccggtgacagcaggtcgagcatcttcgacgccaaggccgggattgccctgaacgaccacttcatcaagctcgtctcttggtacgacaacgagtggggctacagcaaccgcgtcgtcgacctgatccgccacatgttcaagacccagtaggctagtagagagatagatttctgcctccctatcgtgggtcgtccccaatggcctttggtcgcagaccatctttgctgcttgtctatgctgagaataaatgtgaacggtgcccctggacgctggatccatgctggttttggacacgctgtctttttgtgtttaacttatctgctgccgtcctgtaacgaattcgcaagttttagttcttttgtgctttgttaaagaataaacaatgaggtttcagttttggtggcgccatccggtctgattgcgtactagtatcatgcatacctgagctgtctttcgggagtaacagttttttttgtttcgtgtcaatggttctcagactgttcatttggtcttaatccatatcggttactcctat

SEQ ID NO: 1885 - DNA, 1466 bp, Zea mays
  unsure (1)..(1466): unsure at all n locations
  Clone ID: ZEAMA-23APR03-CLUSTER149_235
tcgagaactccatttcgatctcatttgaaatcaacccatcctcgtttcctccgtctagcagcctctcaccctcatggccaagatcaagatcgggatcaatgggtttggcaggatcggaaggctggtggccagggtggccctgcagagcgacgacgtcgagctcgtcgccgtgaacgaccccttcatcagcaccgattacatgacctacatgttcaagtatgacactgtgcacggacagtggaagcaccatgaggtcaaggtgaaggactccaagacccttctctttggtgagaaggaggttgctgtgtttggctgcaggaaccctgaggagatcccatggggttcggttggcgctgaatatgttgttgagtctactggtgttttcactgaccaagagaaggctgcagctcacttgaagggtggtgccaagaaggttgtcatttctgctcctagcaaggatgcccccatgttcgttgttggtgtcaacgagaaggagtacaagtctgacatcaacattgtctctaatgctagctgcacaaccaactgccttgctccgcttgctaaggtcatcaatgacaagttcggtattgttgagggtctgatgaccactgttcatgccatcactgctacccagaagactgttgatgggccctcatctaaggactggaggggtggaagggctgctagtttcaacatcattcccagcagcactggagctgctaaggctgttggcaaagtgcttcctgtcctcaatggaaagttgactggaatgtctttccgtgtcccaactgtcgatgtttctgttgttgatctaactgttaggcttgagaagtctgccacctatgatgagatcaaggctgcggtcaaggccgaggcagagggtagcctcaagggcattctgggttatgtcgaggaggaccttgtttccaccgatttccagggtgacagcaggtctagcatctttgatgcgaaggctggcattgccttgaacggcaactttgtgaagcttgtgtcctggtacgacaacgagtggggatacagcacccgagtggtcgacctgatccgccacatgaacagcaccaagtaaatgaacaaactgatgaaagcatgcaaagagtgatgaaagcatgcaaagagagttgtgtttcttccccggaagtgcttccgagaataaatttttcttatctgattgtctaaaacctataacgggtgtatcgtagtggttgttatcgttaaacttttaacggtcattctatttcaaaaaaaaaaaaaaaaaaaaaaaaaaaaaaaaaaaaaaaaaaaaaaaaaaaaaaaaaaaaaaaaaaaaaaaaaaaaaaaaaaaaaaaaaaaaaaaaaanaaaaaaaaaanaaaaaaaaaaaaaaaaaaaggggggggccctnttaaggaaccaaattttccttcccgggaatggaaaggtaaaactttttttttagggcccccaaaa

SEQ ID NO: 1886 - DNA, 1134 bp, Zea mays
  Clone ID: ZEAMA-23APR03-CLUSTER149_265
ggtaaacatttcccccgcggaaccagcttttgcccatgtttccccaagcggccattaaccctccttaaaagggaccaaaagggggggtccccccccgtggccggccccttttgaattagtgatcccccggggtgccaggattcgcccggggcccttcccttggacatcctaattggaaatctcttcttttttcttgcctgcaaagctgcttgatccatcatcgatcacatcactccaccagccgcagcgcacgaacgtacgactcatggcagatcgcgaccgcagcggcatctacggcggacgagcgcctacgggcagcagcaggggggcggccgcccgatgggtgagcaggtgaagggcatgatccacgacaaggggccgacggcgtcccaggcgctgacggtggcgacgctgttccctctgggcgggctgctcctggtgctgtcgggcctggcgctggcggcctccacggtggggctggccctggccacgcccgtgttcctgctcttcagccccgtgctcgtccccgccgcgctgctcatcggcacggccgtcgcggggttcctcacgtcgggcgcgctggggctcggcggcctgtcctcgctcacgtgcctcgccaacacggcgcggccaggcgttccagcgcaccccggactacgtcgaggaggcgcgcccgcagggatggcggaggccgcgggcgcacgcggggccacaagaccgcgcaggccgggcacggcatccagagcaaggcgcaggaggccggtgctggcactggcgccggcggcggcaggacttcctcgtaaataagcaaatcatccatggatgcgtgcgtgtcaatgtcagcagggtcgtcgtggaatgctcttctctgtacgtgggtaaccgtcttttggtcgtcttccccgagtgcgtgataaatatcctggtgttcgtcgtgtgtggtgctgccctaggctggggcctggggtcggctgtgtaccggtatctgttcatcgccgctccgtcgcgttcggagatgtgaataagtgatgtgaaggttaagtttcagctttgctattgctattgtggcttgtgcatcagcggtttgctcgttgactgttatggaaataagcattggtgaaggtattgtctatc

SEQ ID NO: 1887 - DNA, 1907 bp, Zea mays
  Clone ID: ZEAMA-23APR03-CLUSTER1501_29
ttgctcgccttcaccccatcgccgccgccgccgccgtcgcaagcgacgatgctcgacatcaacttgttccgcaccgacaagggcggcaacccagaccttattcgcgagtcccagcgcagtcggttcgcctccgtcgagctcgtcgacgaggtcatcgccctcgacaaggcatggcgcgaaaggcagttcgagctggacaagatccggcaagctcaacgtaccagcaagaagatcggcaagctcaaagccagcaagcaagaagaggaagcgaagaagctcatggagagcacagacgaaattaagaaaaggttggcagccaaagaagttgaggtgcaggaggccaagagcaccctcgacgccaaggtcacgacgattggcaacatcgtgcatgagtccgtgccagtcagcgacgacgaggcaaacaataaaattgtacggacatttggagagaagagagtagaggataatttgaagaaccacgtggacctttgcaggatgcttgatattgtcgcattggaaaagggtgctgatgtggctggtggtaggggtttctatttaaaggacgaaggtgtcctccttaacctggcattgataaattttgggctagcttttctgagaaaacggggatttaaaccaatgcaaactccttttttcatgagaaaggaaactatggcaaaatgtgcccagttggcccagtttgatgaggagctttacaaggttacaggtgatggcgaggacaaatatctcatagctacatcagagcagcctttatgtgcttatcacttaggtgatcgaatctaccctgctgaacttccaatcaaatatgctgggtactccacatgcttccggaaggaagctggttctcatggaagggacacagctggtatcttcagagtccaccagtttgaaaaaattgaacaattctgcattacaagcccaaatggcaatgattcctgggagatccatgaagagatgctaaaaaattcagaagatttctacaaggagattgggctaccataccaagttgtttccattgtctccggcgctcttaacgatgctgctgctaagaaatacgatttggaagcatggttccctgcatcaaagaccttccgagagttagtatcctgttcaaactgcactgacttcagtcaaaggagacttggaattgggtatggccagaaaaagaatgatgagcagtccaagcagtttgttcatatgctgaactctaccttgactgccactgagaggaccctctgttgtattctggagaatttccaaaaggaggacggacgtcgagtcaaaggcactctgcaaccttatatgggtggaatagagtttcttcctttcaagcaacctttggatgtcaaacaagcttctgactccaaatcaaacaagtccaaatcaaagggaaatgctgcttgagttggacgaggaacagactggaatgcaaatgcacgtgcaggttttggtttttacccgttttggtttcctggttgccgcattctctgacgacccacttggcacacttgtattgcaatagcatttcttgaaatccggaatgcttggccaccaccgccagctcaaccgggactgtgtttatcgcgttgccacagaacgcctgcttgtctgtctccgaaaccaccaggtgttctttgtagcaagcacattagaaacggcttgctggcggattggttttttatccttttttttttccaatgacggtggattggtgtacttctgatcggtaatgaaaaaaaaggcatcttgtgttagtggaatctagtgctgttgtggctggaacctggaaatcctcagtcctcacaagcatgttcttggattctcgcatcgcatgcattgtatggaaacaccggtacctacagcgaaaaaaaaaaaaaaaaaaaaaaaaa

SEQ ID NO: 1888 - DNA, 1268 bp, Zea mays
  Clone ID: ZEAMA-23APR03-CLUSTER1501_52
gggagtgaaggagaaggcaaactctttccttcctcttcgaaatgaagaagacactgattgtgaactcattattcagattatcagcctgttttagatgtttcacaaacaggaagtgtgcctaaagcactaaaacaagtgacctctacagtatagcaagatttgaaaaaatacagaccagacaaaaattgcactggccaaggacatacctgaaggactgagaagatcacagagaggaaatagctgtgaagcaccatagaaacataaattgtaccgaccatgcatccaataaatccaactgaaaacggtagcctctgtataggaaagcagacaaaattcgtcatcagacatcatgtgcttcccatgttacagatattacagttattcaacaatattaaggcagtattcatgtactgacttaatattcttaaatattcatgtacggttacttacacagaaagacagaaacaataaaaggcttcattatatgttttccaattgttgctaatgacttaaaatcacaatagtgggttggaaggaggttgttcctgtgaatttttggttgctccaagtctgcaaccatccagtccatcacaaagttgctatagcttttggagtttggaccaagctaagaaaagccttacgtatatcagagagtatttcatccacactccacagatctattgtagacaaattactgtaacaaagtttattagaatgctcagaatattgagccaaatattttatgcttaaggaacacaagccgtttgtttagattgatgatatttcccctctggattgcttgtttgatattttatgttttcttgtgtgaaataatctatatatcaagcaaagggagataaggaacccttacttcgatttcacaaaaagtagaattgccctaaaacatagaaaaaaactgaagtgacacaatagaaaagaacattttaatgccaatgaggcagtgagcacggataacctacagttgattgttgagaaatattcattggtagacatcaagacaatgttcgataagcataaagtcccaacaaagtatgttacgctcatcaaggacatgtatgacaaggttgtgactagcgtccggacaactgatggtgatacatatgttttcccgattaacataggactacatcaaggtttaactttgagcccttatctatttgcattagtgatagatgaggtcacgagggatatacaagaagatatcccttggtgtatgcttttcgctgacgatgtagttctagtagatg

SEQ ID NO: 1889 - DNA, 588 bp, Zea mays
  Clone ID: ZEAMA-23APR03-CLUSTER15031_21
attcatcaagccggccctagaatggttaaaccctagtagagagaaaggaagagaagggggcggagaagcacgtacgtcgtacatcgcccaccgccctttgcctcgcctcgcctcgcctcgcctgcatatctaacagccggagccggagccggagccggagccgacgccggcgccgacaatcgttccaactgatatggctacgacgccaccaggattcacgggcaacctgaaggtgagttattgaaagatccccatccgccaacgcacggttcaggccacactttgccagttccggcgcactgctaggacggcatcgacacatcaacaccacccatggctaccgttcctatccccaagcgtcgtcgcaggtccctgcccaggcgcgttgcgtctccatcccagggcttccgccactcgagaaactctttgctactgcgcccccatccgctcccttcaatcgggggcatgaatcatttgccgccgagctgtgctgatccgggggcccgacgtctgtggcactcagtcctcctatttgcgcttagtagtaggttcagttctctgcagacaatagctgaaacactactgtac

SEQ ID NO: 1890 - DNA, 1651 bp, Zea mays
  unsure (1)..(1651): unsure at all n locations
  Clone ID: ZEAMA-23APR03-CLUSTER150352_1
tgcggaacgaagagaaacggcccggagcgcaaggcgacgggcgccatggctgttcggccttgctctggaccgaaatgaggggtttcgcccatggcgcacgggccgaaaactgaggcccgggcacgacccgcaaattaagctaagtccaagcgtgtggaatgaaaagacaacgaagctaaggtgtatgtatggcttcagtgaagggcaaggtgaaacggagggaaaacgggaggaggcgcgcggcgacgggcggcagggctgttcggccttgcgtttggactgaaaacgaggcgttcgccattgtgcgcgggccgaaaacaacggttcggccacggcctcggaaataagctaagtccaagcgtgtagaaagacaccgaagctaatgtgtaagtcttgggtgaagggcacggtgaaacggagggaaaacgacacggaggcacgcgacgacgggcggctgggccgttcggccttgcgtctgggctgaaaacgaggtgttcgccatggcgcacgggacgaaaacggaggctcgggcacgaactcgaaaataagctaagtccaagcatgtggaaagacaccgaacataatgtgtatgtctttggtgaagggcacagaggaacggagggaaaacaacacggaggcacgcgacgaacggaggctcgggcacggaggcgcgcgacgacgggcggcagggctgttcggccttgcgtttgggctgaaaacgaggcgttcgccatggcgcgcgggccgaaaacaacggttcggccacgacctcggaaataagctaagtccaagcgtgtggaaagacaccgaagctaatgtgtaagtcttgggtgaagggcacggtggaacggagggaaaacgacacggagacgtatgacacggggcggcatggctgttcggccttgcgttagggccgaaaacgaggggttcgcccatggcgcacgggccgaaaaccgaggttcgggcatggccccggaaataagctaagtccaagcgtgtggaaagacaccgaaggtaatatgtatgtcttgggtgaagggcatggcggaacggagggaaaacggcacggaggcgcaaggcgacgggcggcatggctgttcggccttgcgtctgggccgaaaatgaggggttcgcccatggcgcacgggccgaaaactgaggcccgggcacgaccccgaaaataagcttagtgcaagcgtgtggaatggaaagacaacgaagctaaggtgtatgtatggcttgagtgaagggcaaggtggaacggagggaaaacgggaggaggcgcgcggcgacgggcggcagggctgttcggccttgcgtctgggctgaaaacgaggtgttcgccatggcgcacgggccgaaaacggaggctcgggcacgaactcgaaaataagctaagttcaagcatgtggaaagacaccgaacatacagtgtatgtctttggtgaagggcacagtggaacggagggaaaacgacacggaggcacgcggcgacgggcggcatggctgttcggccttgcgtttgggctgaaaacgaggcgttcgccatgtcgcgcgggccgaaaacaaccgttcccccccccancccnttcnncnnatcantcaattaactccccttcntatccnataatacccctccancnnccccactc

SEQ ID NO: 1891 - DNA, 1500 bp, Zea mays
  Clone ID: ZEAMA-23APR03-CLUSTER15094_3
accacacacacacagacacaccaccacacgccggtgagccggtctctctcgcccccgtgcccgtgcgcgccacctagccgttcgttcgcatccatccgtccatccgtcacacgcacaccaccaccaacccgcgcggccgtgtctatctgggtctgggatcgagtagcaagcaatggcgctggaggccgtggtgttctcccagccccaggcgggccactttggctgcggccgcggggactcgccgtacgcggtgccgtggagcgacctgctgcagggagggggaggaggaggaggagggtttggcgatgtctgcgccgcgggtgagtgggtcgaccagcacgacctcgacacctgctgggccgcgcccaccgtgggggacgactgggactggggggaggcgctctcgcggggaccactcctcctcggacgccgcctccacggaccacggcagcaggaaggcggcgcccgagccggcggcggggaggaggaagcggaggcgcaccaaggtcgtcaagaacaaggaggagatcgagagccagcggatcacccacattgccgtcgagcgcaaccgccggcgccagatgaacgagtacctcgccgtgctccgctccctcatgccgccgtcgcacgcgcacaggggtgaccaagcatcgatcgtgggtggcgcgatcaactacgtgagggagctggagcagctgctccagtcgctggaggtccaaaagagcctgaagcagagccgggagcggcggccagcagcaggcggcgccagctgctcccccccgttcgccggcttcttcagcttcccgcagtactccaccgcctcaagcaccacgagcagcagcggcggagagaaatgccgcggccacgacgtcgcggccgcggacatcgaggtgacgatggtggaaggccacgccagcctcaaggtgctggcgcgccgccggcccaagcagctcctgaagctcgtcgccgggctgcaccagctgcgcgtcccgccgctccacctcaacgtcaccgccgccgtcgacgccatggtcctctacaccttcagcctcaaggtggaggatgactccaagatgggctctgtcgaggacattgccaccgccgtgcacgagattctcggcagcatacagcggcagcagcaggaggaggaggaggaggagaccgccgccatgtgaaactctgcaccacctgcatgtccggcaggcacactgccatcctgccaatggaatccattgcctgtgcatgtgatgactgtgattgcgcccccttgctaggcacagacacctgagcctgccatgatgcagcaatactgtcccaatccggccgtggtcgcaaagaatatgctatgagaaatcttaggctgtaatctaagcaccacctcccttctggagtgagagcacttgtgtagattattgacagatacagctgatctgccctctcgagctacataccactgcgcgcttacatacgccgttggtgttgtcaaaaaaaaaaaaaaaa

SEQ ID NO: 1892 - DNA, 853 bp, Zea mays
  Clone ID: ZEAMA-23APR03-CLUSTER15095_1
agtgcctctgcttcatcgtgcgagcgagggcatttggattcggattcgaggcggtgcactgaagtgcctagctagtgcagggagaagcagcaaagctctctctctctctctcccttatatgggagcaaggccggacggggcgccgggggctgtggagtgctgcggccgcaggctggtacgactgctagccttcctcttcctggtctgcgcttgcctcgtgatggccgccatggtggcgacgacggacggcggagcgagcttagcagggccgtcgtcgaacagcgctgcgtcgtccgccacgaagacgggcggctcgccggcgtggcgttcaggcgggacggccgcagacgcgttccggagcagcgagaggaggatccccaaggggcccgacccgattcacaacaggcgtgccgggaagacgacgaccgcgccgcgccggagagactagctagccggaggccggccgggggcggcggcggcggcggcaacagaagctaccactgccggtgctcatcgtcctgcacctgaagcagcagcagcagctgatctgatcgacatacagttcgtgttcggcagctagcccctagccatgctcggagaggtttaattaattacgcagcggactccttcgatgggggtggatttttggtgatcattctgggggtatgtataaacctgcaacctacccttgcaaggattagtttttcttcttctgtttttcttctttcaagtttcaccgaggtggagtggaggttgaccgacattctgttcttcccgcatattcttgtgagattttgattccaatcagtgtctatcaattcaatttcgatcaaaaaaaaaaaaaaaagcccgg

SEQ ID NO: 1893 - DNA, 1386 bp, Zea mays
  Clone ID: ZEAMA-23APR03-CLUSTER1510_5
aatataacaccatcgtataaaaacagatcactctatccaacctccccgataactgctgtgtgcaagaaaaatagggtttcagtggcggcagcctccactcatgccgccgtcgcctccgagccccactcctcgatctagacaaccaccacgcccagatccggatccacctgtaccggatctcacagccttcgcttctgcttttctttatgtcgtcgaccgcgatgtcttgggacgggtatggcgggtagatctaccctggagctggaggcggtgttccagcagcctgagacgaccccctgtaggtgccggcgggggagatggagctgccgagcaacgctggcgacagcgaactcctgcccctggaggagcacaaggagcgcgtgttgcggcacctacaccgccgatccaagcgcccgctggaggagttcgtggccgttgtggcgaacgtcgcggagcagctggtgagcgtgtatctagacctgggcgccgagtggcgcggcgcagactggcgggagcggttcctggccagtcgtacgatagagcgagctcgatggccaggcataggacacacgtcacaccgggtggcaactggcagggcaatgcccgatcaggtctccgtcgtcgattcgtctgaacagctatcctcatcatattttaatgccccatgcataatacggagtacgtatctgtatttatgtcagcgttattgcaacacgctctctctatggtctcttcttctacatactataatagtagtacattagtactaataatgtggttggccatggcatcttgcttcgagatcaacatgaacaatggaagcacaagtacgggaatccatgtagaaggtgatgaaaatcttgtatctgtaatggttttcgttctgccttctactcaggtcaacctccaaagcatgatggctctaacaaaccactctgtctaggacgtagtgttggcttctgttgagtggcagttgacagtatatatcctgcactagatgttgtataaatagttgaaattaataatatttgatactgacttctgtttctcctgatttcttgatattgtcaattattacattagtagtttcattcagtgtgaacaaatgttggacatcttttcaagagcgggaaaaaaaggagcaccaaatcaagtgttgaggtattgtcgagaaccaaatgccaaacgtaacatgtgtattatgcaggttggccaaagttcatagaaaagagtattaagtattagtggcattgaggagatcaactataaaaatatatttcataaatgtatgagttgaaaatgatgttcatctattattgtaaatattattattctctataagtttgccaaatttaggatagtttgacgtagagccccccccccccc

SEQ ID NO: 1894 - DNA, 1267 bp, Zea mays
  Clone ID: ZEAMA-23APR03-CLUSTER151241_2
gcgcctctgcttctccttctctccatcccatcccatcccctcccctcccaccgtatgcgcaacccgcgcctcccttcccggtcccctccctccaccacccgcccgcaggcgcaggcgtcccccgtgaccccgtcgatcgcccctcggccctgccggtggagttagtgctggagatccatccggacttggatttctcctcggtccaagcaaggaggttttggcaccatacaagatcgtcgaaattgcggaaatgggaggtgtaattagtggtgactcaccaaggcacacctcgtcggcatctaagttagagaagaagatggttgaagccatgcagcagagagcattaaaaggaacctcagtgaaatcattgaacagtgtcatcatgaaatttcctaagatcgacgagagtttgagaaaatgcaggactatctttcagcaatttgatgaagattccaatggtgaaatagatcagctggaacttaagcattgtttccaaaatttgggcattgaatcgactgaccaggagataaaagatctgtttcaggcatgtgacatttatgagaacatgggcatgaagttcaatgagttcattgtcttcctgtgccttgtttatcttctagatgatcctgcagtgtctgaagttagaaaaagaatggggttaggtagccttgaaccaacatttgaaacattggtcgagtcttttgtcttcttggacaagaacaaagatggatatgtcagcaagagcgagatgatacaagcaataaatgagactattggaggagagcgctcttctgggcgcataggcatgaaaagattcgaggagatggactgggacaagaatggaacggtgaccttcaaggaattccttttcgctttcactcactgggtggggatcaataatgaagaagacgaggacgaagaagaatgagcgtgtcggctgaaggagattaggcgttccgaatcgaccgagccagccagccagccagccagcccccctcaggggaggcctccagcagctccctcctgccgtggatcagaagcggtagagctcatgtgttctctgtgtgtgccgagctgatggtagatgttcatgttcgtataaatagaatgaaacactagccgtgtcaagggatttgctgataaaaaaaaaggttacgctggtcagacgctgctcagttaattaggttaccttgtcattaataaagtatttgcagtgtgtttggaaaatgtaaaactgcgaatggtactactaatcctctttacttcg

SEQ ID NO: 1895 - DNA, 1551 bp, Zea mays
  Clone ID: ZEAMA-23APR03-CLUSTER15139_6
acaggtatcaacccaagtgacctcctctctttcccggctccggtcgcgaatgcgcgatgcgttctctcctcctgccccgcaggtgcgccttcgcttcgcggcgcttcctctccgcgctcgccggcagcggggctagggccccgtgcgccggcgttgtgtacgggttcggggataacagccatggcgcggtgggccagcctccaccggctgcccacgcctacgtgcccacgcccgtgccctccctcccgccgtccgtgagcgccgtcgccgccggtcactaccactccctcgccgtatctgccgccggagaggtctaggcgtgggggcgcaacgacgagggccaactcggccgcgggcttcactccccgaggaatacttggagcaatgcagaactggtcagaggattggaaaatgttcaggttcaagctgtatctgcttcaggcgttgtttcagcagcaataggatctgatggttccctatgggtttgggggaggtcaaagcgtggccaacttggacttgggaaggacattgtagaggcagcagtgccatctaaagtgaaagctcttgctagctacgacattgttaaggtatcatttggatgggggcattccatggcactgacaaaggatggaaagctatttggttggggctactcggaaaatggaaggttaggagaaatgggccaaagcactagagctctttctgcagaagaatacataggaaaaacggtagacaagtattctagtgtaatgctggaggctgtgggttctgtggtttaaagtgtgatcggaatgcatcttatctgggaaccatcccttgttcatgaagcgagtcgtcttgaggtgtctgatgtgtcttgtggacttgatcattccttgattctctgctctgatggcattgtactgagcggtggtgacaacacttatggacagctgggtaggaaggccgggccacccaaattgcttcctgttggcatgagctataggccattctccatgtcggcaagtgttggccactctcttgcactatgctacacaacgactgaaggcaccgctggtgtggaaactggcctcctctcatgggggtggaactgcagctcccagctcggacggtccagccaagaggacatccctgcactggtggactctctgagcagggagaggctggtatcggcctcggctggtcgagtccattcagttgctctaacgtcgaaaggtgaagtttggacctggggatcgggcaggaatggcaggctaggcctgggcagctccattgatgaggcggcgccatgtcttgtagataccctggaaggggtggaagtcttgcaagttgcagcagggatggaccataatctcctcctggttgccgagtaggtataggttggtatgctggtgaactgaaagatggtactccatttgttcttaactagctgaatgctcgtgcgttgcaacggaaatatataataccagtatactacgataacttatatacaaaatgtgtgttataccgttataagaaaatgtttcataatcaatttgtgattctggccat

SEQ ID NO: 1896 - DNA, 1642 bp, Zea mays
  Clone ID: ZEAMA-23APR03-CLUSTER1514_2
aaccatcctccctccacagatctctccggggaggcagcaacagttatgtcatatcattgtcgcgtcctcgtccccgttccatttcattatccccccggagctggtgcgcgagtcggagctggtgcagggtcacccttcccctcggcctcaagagctctgcggttgccgcggccaagggcgtccgtggagaagcgggagcaggtggcggcgatggaagagcaaggcggccaggcggcgctcgggtgggcggccagggacgactccggcgtcctctccccctacagcttctccagaagggttcctaaagacgacgatgtcacgatcaaggtgctctactgcgggatctgccacaccgacctgcacgtcatcaagaacgactggcgaaacgccatgtacccagtcgtcccggggtaaccgatccaatttcgctagcctagacgccccggatgctgttgcaaaactaacagcctctgtctgtctgaccccgtcggctggcgtggcgtggcgagcaggcacgagatcgtgggcgtggtgaccggcgtcggcggcggcgtcacgcggttcaaggccggcgacacggtcggcgtgggctacttcgtggggtcctgccgctcctgcgacagctgcggcaagggggacgacaactactgcgcggggatcgtgctcacctccaacggcgtcgaccacgcgcacggcggcgcgcccaccagggggggattctccgacgtcctggtcgcgagcgagcactacgtggtccgcgtccccgacggcctggcgctggaccgcaccgcgccgctgctctcgccggcgtcaccgtgtacagccccatgatgcgccacggcctcaacgagcccggcaagcacctcggcgtcgtcggcctcggcggcctcggccacgtcgccgtcaagttcggcaaggccttcgggatgaaggtcaccgtcatcagcacgtccgccagcaagcgccaggaggccatcgagaacctcggcgcggacgagttcctcatcagccgggacaaggaccagatgaaggcggcgacggggaccatggacggcatcatcgacacggtgtcggcgtggcacccgatcacgccgctgctggcgctgctgaagccgctggggcagatggtggtcgtgggcgcgccgagcaagccgctcgagctgccggcctacgccatcgtgccgggcgggaagggcgtggctgggaacaatgtcggcagcgtcagggactgccaggccatgctcgagttcgcggggaagcacggcatcggggccgaggtcgaggtcatcaagatggactacgtcaacacggccatggagcggctcgagaagaacgacgtccgctaccgcttcgtcatcgacgtcgccggcagcctcggctctgccgcctaggcatggctgcaaaggtttcaatcagagcccagccgcaataatttgttagctaccgaatgaatgatggtctacgcttgttgatgagttggtgctttgtcgtggttttgtggatgtaataattcgatgtacaaataaaaaaaggggagacaaggtgcttgttcccttggtttggtgacaacttgttcgtttacaccgatctatctctaaattagtatgaattaaaattaaatttatgtcacaatctatattcc

SEQ ID NO: 1897 - DNA, 1465 bp, Zea mays
  Clone ID: ZEAMA-23APR03-CLUSTER151910_1
gcctcgccgagcacgggtcacctcgccgggatcccacctcgccagtgccgcctcgccgctctcccacatcgtgtcctccgccccttcgcacggacgcacacgcacctcacctctcacaattccaagcccaccagtccaccactctccgcttcgcttcttgtcgctgcggcgcgcggccatggtctccctccgcttccctaccgctgcaatcccccgcctcccgccatcccaggcccccaacggcgtcgccatcgccgccacggtcgccgctgcagccgcggccgcagctgcagtaagcggccagcttgaccctcacgggcaagtccaccggccggccagtcccgcaccctgcccctctctgggcctccctctccctggccgacgcggcggcccccagctccgtcgaaccccggaccggcgcgacattccccaccgaggccgccgttgggcgccgcctactcggcataggcctccggaagaccagcgtcctcgggctcaagtccatcgacgtctacgcattcggcgtgtatgcggatgacaacgatttgaaacagcagctgaaggagaagtactcgaagttctcggtctcggaactgaagggaaacggtgagctgatcaacgatgcgctagagcgtgacataccgatgacggtcaggctgcagattgtttatgggaggctgagtattcgctcggttcgcagcgcatttgagaagagtgtgggaagtaggcttcagaagttcggtggacaagacaccaaagagttgcttcagagttttgttgcggttttcaaggatgaatacaaattaccaaaggggtctgtgattgagctttcgagggaatctaaccatgtccttaaaatttgcattgaaggcgaggaagtggggagcattcagagcaagctcttgtgcaagtctctcttagatctctacatcggagatgactcctttgacgaaaatgcgaaagacggcatccatgaaaatatagctagcattcttaaaagttaaatgggatgcttaaggaaggttacatggaactgggagatttttcagggaagatatttttaattccagcaatacctcgactgtgcctagtaagtagcgcacaagttttttttcagtagcgcgtgaggaactgaggaaaaggatagatccttccaagtacagccttttccaagtcgtgtgtgatgttgttccacgtcctccgtgaaagcggcaaactcctggccctcatatctcgttggttctgtcagcgtaagaaagaccagcaagctgttgcaatcgaccttcaggaactgttcctcatccggcaaactcaagacctgtcgatctcattgcagcccggagttggcaggcgtgcacacaatggatgagagcgtgcatcactgtctccctctcgttcccacaaatctcacagctaacagtctctccttataatgttctgatggcgtttattctgttgcgcggct

SEQ ID NO: 1898 - DNA, 1524 bp, Zea mays
  Clone ID: ZEAMA-23APR03-CLUSTER151984_1
gctctataaatacgtacaccagttcatcgccctagctaatcgaaaaagctccaccagttcaccttccccttcccctgcccctgcgtgcgtgaccggcgacctagctcgcagtcgcactacactactcctcgaccaccactccgatccttcctgcctcgacgacggtcgcgcgcgcggcagcccatgaagaagaagcaggcgcgggcgaggcggcagcgcgtcccggcgttcggggagtggaaccatgcctacagctacggcggcggcggcggcgaccaacggcccgtcgtcacccactacgacctggactccgccatgcagatgcaggccaggcgactcgtcgtggcgataccggcggtgccgcccaagcctgccagcaaggtggtgaagtggaggcaaagtgccacagccacgcttgagctggaggacgaagatggcgagcacgagcacgaggacgagaagaagcagctgcagcagcagcatttgggtttggacgtggtggtgggactgggactgggcggccacggcggcgctggtggcgctgccaggaagcagcaggggaagcagcagagcccggtggtgggctaccaggcgcgacggaggagggcggcggtcaagaccgtggaccaggacctctaccacatcccgcccgacatgctctgccacgagcccaggaaacgtctgacaaggaagaagagcctgtggacgggctccctgggtctcagctgcgtcgtcgcatagggatccgccattgcccacctgctgacagctcatcatgagtcgcccctcggccctcgcctggcctgccttgttttgcgtgttgtgccaccccgtactgtaaagacactcggctgctccatagcagaaaaccatggccatcatgttgtcacaccaccatcatcatcatctccacagtgttgtgctggctcgtcaactcgtcgtcgtactacgcgcgcgtgggagcagtgggcggacgggaaacgacttgttgttggatgtcgccgccgtgcccccgacgtgcgcggccgcccgccccggcagcgtcatttccccgtgccccgagacccactcgagcgctgcttttccaatttccacggcgtgcggtggcgttgcgttgcgacctgcaacctgctgctgtacggcgcccccggtgaagccggcgggaaaaggttgtgcgtcgtcgaaaggtcgatgacatgacagtgacatcgatgccttgtacgactatttggcgccactctttctctggaatacgtaaaaaaggagctccaaaaggccttgttctgcgcggggtgtcgccgtgttcaagcttaagatcccatcttggggatttggagttgacgatgatgggcgaatgacgccggacacccccctgcatggcccctcaatcatgctacctagctagctaacggtgtgttgatcgagcgcggttttcatgtccgccctgtttatagcgtgttccccaaaaaaaaaaaaaataaaaaaaaaaacaaaaaaaccaaaaagggaaaaaaaaaaaaaaaa

SEQ ID NO: 1899 - DNA, 700 bp, Zea mays
  unsure (1)..(700): unsure at all n locations
  Clone ID: ZEAMA-23APR03-CLUSTER15227_4
ngacaaatcgcgagccattgggcgcagttgggccccaatttgagtacgaataactttgggagagcagggacccccccccccctggcggcacagaggcttgccttgttcccctccctagttttttggccaaggccccattggtgggcccaatattccaggggctcttgccccccggtcatgccattgggtcccatgaacccctgcatgcggttttgcaggagccaacgggggcttgccacttggtgggggggtccgtccctgatggtgccagcagccggtggcctttccgcttcagcggatgccagtgatgatgccccagaggatgacgcctaacatgaagtcaccattgatgatgccgagcatgatgtcaccaatggtctttccgagcatgatgtcgcaaatgatgatgccacaatgtcactgcgacgccgtctcgcagattatgctgcaacagtagttaccattcatgttcaacccaatggccatgacgattccacccatgttcttacagcaaccctttgttggtgctgcattctagatagaaatatttgtgttgtaccgaataatgagttgacatgccatcgcgtgtgactcattattaacaataaaacaagtttcctcttaaaaaaaaaaaaaaaaaaaaaaaaaaaaaaaaaaaaaaataaaaaaaaaaaaaaaaaaaaaaaaaagcttgtactcg

SEQ ID NO: 1900 - DNA, 1859 bp, Zea mays
  Clone ID: ZEAMA-23APR03-CLUSTER152384_1
ctctctctctttccttcagtgccttctgcctgtgttgagagtcccaagaagcactcaagaattttgttggatggacccttgagcgtgaggggataagagtaggtgcagtatatcagtaaccagtaaatacttggacccagcagtaaccaggaccaggagagatcatcaaagtaaccttgctgccttttgagaacagaagcgtcagcagcaccagcaagaagcatcttctctctggagcggcgcctccgagaagaggacgacggatcgggaccaggaggcatggatctatctggcacgcagggcgagctcgcgatcccaatgcacgccaacgtcgcgtcgccctacggaggcggcgtcggcggccatgtcctgcagctgcaccgtgacgaccacggcagcaacaacggccagtctccggcgccgctgctgccaccgccgcctgccgcggcggaggagacggagagctcggcgaagaagcgcggtccggcagccggggccggcggcggcggaggcagctccgcggtgaagtaccgggagtgcctcaagaatcacgcggcggccatcggcgggaacgccaccgacgggtgtggcgagttcatgccaagcggcgaggagggctcgttggaggcgctcaagtgctccgcctgcggctgccaccgcaatttccaccgcaaggaggtggacgacgaggacgacgacatgtacggcgccgccgaaggcttcagcggcctcggtctcggcctcggcctcgggcacggccaccgcgccgcccgccgcctcctggcccccgccatggcgcacccgcaccacaagagcggcggcggggggctcctgatctccggggccgacccctacgccgcgtacgcgtcggcgcgcgcgctccctccggcgctgccgccgccgccagggcacgcccaccaccaccaccagtacgtgatgccgctgaacatgatgcacacctcggagtccgacgacatggagggcggccgcggcggctgcggggacgcggcgcgcggcagcggcgggtcgtcgtcgtccaggaagcggttccgcaccaagttcaccccggagcagaaggcgcgcatgctggagttcgcggagcgcgtggggtggcgcctccagaagctggacgacggcatggtgcaggccttctgccaggagatcggcgtgaagcggcgcgtgctcaaggtgtggatgcacaacaacaagcacaacctcgccaccaagcgcctcgaggcctcgccggcgcaggagcaggcgatggcgggcatggcgtcgccgccgccgccgccgccacccccacagctgcacttgcctctgcagatgcccgctggagtcatgccgccgccgccgccgccgccgcaggccgggtcgtcctgtcaccgcggcggtcccggctccccgctgccgctcaagctcgagtgaccaccgacaacctgacaaaaaacaagaagagggtgaccaccattggtggccgttgatccgtcctggtggtaagtggtaaactagctagctagcagaccgacggaccgcatcgatggctatttcactgttccattagtccattccttcccaagtgatctatctaccgtcgtcgtccaagcagggagagaagtgggcgatgaacttttcttgaaacaacaaaacgaacaaagtccaggttattatcgtctcttttttttccttcccttttccggtgctcgttgctttgtcacaaggtaggggagcaagcaaccaagcatgcatgatagtagtagctgatttcgactggactggactgatttccttccaaaaatttttttcctgatggtgaagaaaactaaatatcctactagtttcctccaaaaaaaaaaaaaaaa

SEQ ID NO: 1901 - DNA, 1424 bp, Zea mays
  Clone ID: ZEAMA-23APR03-CLUSTER152408_1
gcacgagaccattacctagaacatcctaatcgaaaaacgcttttgcagctcgctcacccaagtcccaagcgcaggaggccgcggtagcgtcgacttcctgaacgatctggcggcggccgcggctcccaagttcacgaagcgggaggcgcaagcgaagcggctacctctcgccggagatgccgctggggacctctccagcggtggcggaggccgaggcatggacgtgggagaacgcagcggctggagctgccgccgggttcgccacggttgcggccctccacccgctcgacgtcgtccgcacccgcttccaagtgagcggcgggagggggtggtctgaggtgcctccgtacaggaacaccgcgcacgctgtgtacaccatcacacgatctgagggcctgagaggactttatgcaggattttatcccgcagttcttggatcaactgtttcctggggcctatatttctttttctataacagagctaaacaaaggtacttacagaggaagaatgaccagcttcatccagtccatcatctcatctcagctgcagaagcaggtgctttggtttccttgtttacaaatcccatatggctggtgaaaacaagactgcaactacaaacagctaaacaccatacttctcagtattctggtttttctgatctttgaaaactattctaagagaggagggatttcttgcactttataggggaattggacctgggcttttgctggtcacccatggtgcaatacagttcacggcctatgaggaacttcgcaaagctatgatattctttaaaagtgcacaatcaagggcagacgacacaggaggcggggagtcattgctgaattccgtcgattttgcggcacttggggctggttcaaaagtagctgctattctacttacttatccttaccaggtcatcagagcccgcttgcagcaacggcctggcactgatggtactccaaagtactcaaatagctggcatgtagtgaaggaaactgcaaagtatgaaggcgtccgtggattttacaggggcatcacgtccaatctactgaaaaaccttccagctgcgtccctcacgttcgtggtgtatgaaaatgttatcaaactattcaaagcaaccaaggagaagacgtagctactcattaaatccaggagtactgtgcatggtctgacatttctgagttcaaacgatgcctataatttccattccacgtcaagcccatattttatccatttaacatcgtatatgacaaatatgtaacagtacaggttgtgaccaacctgggtcgtggaaattttttgtacttgcattttgtagagagaaaatacacattttgtttcttcccaaagaaatatgtctttgttatataatccagccgggacgctggcgttgtagatcttaaaaaaaaaaaaaaaaaaaa

SEQ ID NO: 1902 - DNA, 1582 bp, Zea mays
  Clone ID: ZEAMA-23APR03-CLUSTER15287_4
gagcatatattttttttttaaaaatcacacattctagtatgaatgtatttgtttacactaaactggttgcattcaacgcaatctgtacattacaatacgtgaccatcacacgtaaggtccaactaatacctcagcgacattcttatggctgggagtacaatacataatgcttggcgtgggtcgtgatttcgactataccactatacatatatataaccatgaatcgtatgattatatacaatcttataaatagtaatatctctgttctccaatatttatcgtcggctacaaataaaaagaacggtaaattcgtagctagtcaaatataaatgccatgcacgtgcacgcttgtcttggatgacgtaacagcatcatgcgtactgtatgctgtgcgatggttacgttggtggacgcgatcggtgctccgatccgctgggcctggcctctagaccgggtaggacggcagcttggcgagaccgcagacgccctccccacggacgccgcggcggatgcggacgtatccgccctcgccccacgacgcgccccaggagttcttcatcagccagtaccttgtgccgtcgttcgccgtgccgtacccgacggccgtgatggcgtggttgaggtccgtgccgcaggccccgcccagcacgccgctgtcgtagaagcggaacgccatgtcctcgccgttgatggccacggacacgggctggttggccacggcggccgcgagcgcggcctcgttgttgcgcggcacgtcctcgtggccccggatggacgcggcggcggcggcggacgagcggcagggcccgtccccggccctggtacgggtagcccgactccgaggccagcccgccgcggcgcgcgacgaactggaaggcgttgtccatgaggccgccgtcgcagccctggtccacgccgctgacgtcgcagtccaccagctcctgctccgacagcgacaccagccgccccgtccggatcttgtttagcccttccaccgccgccaccgccgagaacgcccagcagcagccgcacgctccctggtccttgacgccggtgacggcacccatggcccgccagtccacgctctgcgccgcgtccgccaggctgaagttctcgtacctgaaccggccggcgcccgcggacggcgccgggcgctgccggagcccggtcctggccgcgcggaactcctcgacggtgaggtcggcgaacctgttggtcgccagccggtggctgtgcgtccctgcggcgttgaacgagtcgatcagctccgcgttggcccggaacacctccagccgccgcgccttctcggcctcatccttgtacgcgcgcccgtgctccgccatccacttctcgtgccgcgacgccatcgcggcggcggcctcgtcgtccccggccagctcgcgagccgccgccgcgagcgcgcggggagcggcggcggtgcacagtacgctgcccaccacgaggacggcgaggaggaacccgtgacgcggacatttttttgggggggtatgctagtgtatttagctatatatgtagttagtgtgtgcaatgctagtgtcgtctttagcttagctggtgcttt

SEQ ID NO: 1903 - DNA, 1502 bp, Zea mays
  Clone ID: ZEAMA-23APR03-CLUSTER152_4
gcacgagaccattacctagaacatcctaatcaaaaagattgaatcctgcagtgtggttagtaagtgcctgtgttcacgcgtagctgctgctaaatctgtataaatatagccagaatccaaacttattagaactcaggtccttacgcaccattccactgttactggatctgtgtataggatttgcctagttctgtaccacctgtaggggttgttggggttgatgtagtagttgagttcccaagtgcctcaagtaaaagatcctgatggcaaatcatttcctttgcacgttgtctcgcatgacaattttttggttttctgtgttctgatttagttggttgaatgctgtaaggcagaaactgggttacttcattatcttaatgaaataaaatcccttcataaaaaatacgatatgtctgttgggattctgcttagttgtcttttaggatttcaccctactaagttattctgaatggaaatgccttaccctaaggatagatgttaggattttgggtacatgataatccattgtggaatatgcatcctggtcacatagatgacttatcacctaaactgatgctttagcagtttaaggacatttcatacttgtagaatgcctcatgtcacacatctggagcagctttcttacatattatgctataaatccttctttcttttcgtgtaacagctttgaccgtgactggaaaaagattgaagcatatgttggctccaagacagtaatacagattaggagtcacgcacagaagtactttttgaaggttcaaaagaatggaacaggtgagcatttgcccccacctaggccaaagcgaaaggctgcccatccatatccacacaagtcctcaaaaaaggcccttcaagttgtcttaccacaacaagtttcgcacataatggagcaaggctgtggtacacctatggatgtagctactgttgctacagactctagtgtaaataatgcttttcctgttcaacatttcagtccgaggcatacacaagccatgccagactttgctcgtgtatacaacttcctgggaagcatatttgatccagagacaaatgggcatttgcagaagttgaaggaaatggatcccattgatgctgaaacggtactgttgctgatgaaaaatctgtcaatcaacctaactagtccaaactttgaggagcataggaggttgctctcttcggatgcctcaagcatggatcaagagtcgggctcttcccgcgttcatctcccgttcatgataacgagcaagtgagagaagcagctggctggcctgaaggcaagaaggtcgtttggagtcgtcacactcaggagcaaggcgatgcgtatgtacatatatcttaataagcagctttaggatagcttggtttgctcgacccacatgttgcaagtttatgcgcctttttctttattctctgcccctccagttttgcccattgtagtactagtatggaacttataacatgcgtgttttatgccgcatctt

SEQ ID NO: 1904 - DNA, 2690 bp, Zea mays
  Clone ID: ZEAMA-23APR03-CLUSTER15320_1
agttaagtctcgttcactgcctgtgctgctcagtgctctgctcacacatcctcgtcgccaatggcggctcccgtccgggccatcccgctcccgtcgcccgtcctgtacccccgcatgtccttatggggccgcagcagctgcagccggcgacgtgcccccggagttcgcgcagcagtggaggcggcggagggtgcttcgcgggcgacggagcccgtggaggtggtcggcgtaggcagccggaaggacgccgtcatcgacttctgcctgggctcacgcacgctgtcctccacccccatccgcttctggacagtacatgtgatggataattctaaagttcagttaatacaaaaaggtcatggaactgatgcagtgttcagagacttggaacctcccttatttcttcatccctgcccacctgcggttattcttgtttctagtgcaggacaggatgctgatcatattactgcaatggagttacttagcgttgtcaaatctgctggtaatctggctgcatcaatatttttgaagcccttctgcttcgagggacaaagaaggcaagtagaggcagttgatttgattggcaaacttcaaacatgctcaaactttcatattgttattgaagctgattcattgcttgagacggaagtggaaactcttgccgaagctttggaaagtgccaataatgctgtcctgtcaactattagcatgatatctatcatgatgtctggttataataagatgttctggagttcccttaatgcacaaattaaggaagttggtcctgaggaagtagccaagctactcagaagctatggggaagctagagttggctttggtgctggttataacatccagtcagcaattaagcaggctgtctttcactgtccatttcttcgtggtggcataaaggacttgaacaatgtggttttcctctcccttacaactgctcgggtgttgtctgaaagtgacttgatctctattctgcacatcttccgtcgagttactgggttcaccaaagatattatattttctagaaattctgaatctgatttagagccaaaactgatagtagtttctcttctaactgtccgaaaccactatgacggaagtgtttccacagtacaagagggattcctttcaagtttggccttgcattttccttttatatcttctcttatgggaggagatacccctgagcagaaacaaattaggtcgaagcattcctttaatcgactgcctgacaacagatttaattctgtagaacaagacgaattctcgcgactttctaatcggtcatttgatgctactgtttccaaatcatttcctgaagaatttgaggatttggaatctgtgaggaatcagagaataaagccagaatctctggaaggtgatctggcagttactggagaaatgaacaaagatgatgacaacgagcatttagtttcacagaaggaacatcgcttcttgagcaactcccctggttttgatattgcacaatcgtgggctaagcagcgtgtgatggcaagtggaagcagtaaaaatgatgagcttgatgctgtcgctcttcctgttggtgtaaaacttagcaaagttcagtctgatcattctccagatatgcagactgaaactcttggtgctgacacaactgttgctagtggacatgctgcctttggagtatctttttctgatgttcgtttggagaaagtaatggacgtatgtagttctgcgatcacatttctgaggaatagaatggataggcctcgaaagcgtggttcaaactcattatccagccgggctgccctgatgcttgatgcagaaagagaaccagaaaagacatggagccccatagttgaaatacattatgtagggggaacttatagaggtagatgtcaagaaggtgtccctgaaggaaagggacgtctaaccttcagtgacggaagcttttatgatggactctggagatatggtaagagatctggtttggggactctatttcacagtaacggtgatgtataccatggaacgtggagggatgaccttattcatggaaaggtggattgaagtttgggctgatggtgtacttatcaacagaactaaaatggagaaataaggttcagatctaaatacattttcctgatgtttctaaaacttgactcctcggatggctacgcttcaaagtctcagatgttgcatggcactctggttcggagcctctctactgtacacgaagtcgtcctatcttcagtcttgaaagtcgtaaataggtgcactgtggtctgtggaggtttcgatgccctaatttcaaaggggcagactgcaggcgtttctgtatataccactagactacaagtatgggaggatgcctttgttcatacggctgatggatcaagctgggaacagctatatacccaactgtacctgaacgtgaagtgtgtttgattagttccactgataacccatagatattttcttgtcaaggttacatggacgaaacaggctctcgtggccgtgctcctttttctccccccaattgagtgcttgagtttccacgaatgtgggcccaaactgtatcctttaccctttttaatgtttccatcaatattatctgcccgttgtatttcgataaaaaaaaaaaaaaaaaaaaaaaaaaaaaaaaaaaaaaaaagggcggccctagttaaagataacga

SEQ ID NO: 1905 - DNA, 1368 bp, Zea mays
  Clone ID: ZEAMA-23APR03-CLUSTER15345_1
aaactgctggaatatacttacaccgggaagaaggcgaaggccgtcgcgctctcggcggcggcggcggcggcggcagcggcgatgcttgcgttcgagcagcaggtgttggcggatctggtggaagatccgaacggaggtctggtggtgctctcctcgggtctccactctcgcttccctagccgctaccctcctcctccatctccaccagacccccggcaacgcggctggaggaggatgtctcctcgtcctctccgccaccgataccctcaaggcccggatccggcgccgcctccaagacaagctgcaggttcacgacgtgccccctgacctcgccgcgcagcagcgcgccaaccctttacgcctctggcgctgctctcttcctctctccccgcgcactcgccgccgacctcctcaactcccgcctcctcccctcccgcgtccaagccctactcctcctctccgcccgaccgctccaccgatacctcctccgatgccttcatctgcgatgtgggcattgtattggaagaggttttggaggaggcaccgaaatggaaagtgctatgggaggtcgccggtttctccaaggccgagcggatgaagaagagcctctacgtccgccgtctccacctctggccccgcttccacgttctcgccgcagccgacctggaacgcgccccgcctgacgtcgtagacgtgcgcgttcccatgacgccgcccatgaggggtatccaggctgctgtcctcgctaccatggacgcttgtctcaaggaacttaggcgcaccaacaaggtggatgttgaggacctcaccgtcgacaagggcctcttcaagtccttcgatgagatcgtccggaggcagctcgaccccatctggcacactcttgggaagaagacaaagcagcttgtggctgacctcaggacgctacgcaagctgcttgattacctcgtcaggatgaacctgatgagaaaaaagcaacaagagttggcgtgccatccgaggatggtatcgtggaggatgatgtgaggtctgaaaattacaacacatcagccattgagttcttaagaaggcttcctggggtgacggattctaactaccgagcaatcatggatggatgcaatagcttggccgagctggccctgcttccagtggaaaggttggcggagctaatgggtggtcagaaagctgcgcggacgctcaaggagtttctcgatgccaagtgcccaaccatgttgtagccagagtgacgctgtactgtttgtattgtgtcctgtgggatacaaatacttcagttgatgtgccttatatatatattaaaaaaaaaaaaaaaaagtaatgccaattccaatgcctccccccgttgttgtttgt

SEQ ID NO: 1906 - DNA, 1358 bp, Zea mays
  Clone ID: ZEAMA-23APR03-CLUSTER15348_2
gcacgagaccattacctagaacatcctaatcgaaaactcctcgactgctcccctccttccagagtcacggtgcctcgccgtccttccctgatctgacaacccgtttaccttgcccggccggtccactccgacggctggcccgcccttctttaaccccgccaccccgatccagcccagccgcactccaacacggtagcagcagtcaacagactcccaccgcaatggccgcggcgctcctcttgctgctcgtgccgcccgtcggcctactcgccgcgctcgcattcctcacgcggccccgcgcccggatcgcgctcaaagacagccacgtcttcatcacgggcgggtccagcggcatcgggctcgccatggccacggccgctgcgcgggagggcgcgcgggtctccatcctggcccgcaaccttgcccgcctcgaggaggcgcgcgccgccatccagcgcgactcgggccgcgacgacgtcggcgtccacgcggccgacgtgcgggacgccgacgccgtggcccgtgctctccaggaggccggccccgtcgacgtcctggtctgcaaccacggcgtgttcgtgccgcaggagctcgagaggcaggacatggatgagatcaagtggatggtggacatcaacctcatgggcaccttccacctcattaaggccgcgcttcccgccatgaaggcacgcacccgcgagacgcggctccctgggtccattgcgatcatgtcctcccaggccggccaggttggtatttatggttacactgcctactcagcgagcaagtttgctcttcgtggattgggtgaggcgttgcagcacgaggtcgtcggggacaacattaatgtctcgttgatattccctcctgacactgaaactccaggattggaagaggagcataagaggaggccagaattgacaaacatcatagcaggattgtctggtggaatgaaggccgacgatgttgccaagaaggctcttgatggtatcaaatctgcaaaattcattgtcccatgcaatttcgagggcacaatgttagctgtagccactgctggtttatccccacagagctctgcattaatggcattcatagaggtgattggcaccggactcatgcggtttgcggcactttgtttccaatggaattggttctctaccatagagagctattatgccaagaacaagaagagccagtgataacacaaaccatacctggaccttaggtcagttgcatgtaaataaagtttattatagtcgaccttactatgttgaccacctacaatttgatgtataagattcaaatgaaatttgaataaaattttagttttcctggaaaaaaaaaaaaaaaaagcggcc

SEQ ID NO: 1907 - DNA, 2441 bp, Zea mays
  Clone ID: ZEAMA-23APR03-CLUSTER15360_2
agaaaacgaaacagaacggccagtggaagccgccgtgccgtgccgaggcggacggacagtcggacactgtccgaggaagccaggaaggatacccacccgcaccgactccgccgcggaggaatgcggcgacgaccagcgccgccgccgccgctgtaacggtagctagctggccgctcgggtcggagggaggaggaggaggaggctaatgggggtgtggagggagggcgcgggctggtgcttctgctccggcgggggcggcgacgacgggggccggtcggagcgggtcaaggcggcgatcttctccgccagggcctccgcgctggcggccgtccgtgcgcaggggcggcatcacggcagcgggctcctgatccaccggaacctgctgctcaccacgcacggcaacctgccctccgcggccgccgccgaggacgccgacgcgctgctcggccagggccgcctcgtcgcgcggctcgagccgcacagatttttcatcagcagctcgattcttgatcttacaatagttggtattgattatacacagggtgactcgaccctacagggtcagcaacctcactatttgaaaacaagctgcaaaccaagcctagatcatggaagtcccgtgtacttgctgggacatacagggaaaaaagaactggtgattggtgagggcaaggtggttattggcacagacaacctcataaaactctcagccgagggggtgacatggtgccctgggtctgctggttttgatgcccaagggaacctagctttcatgatctgtgatccaatgaagctggcctcttctcccaccgcaagatcatcctcggcatcctcatcctcatcacattcatggaagaaggatcagccaatgcaatttgggattcccatatctgtagtttgtgattggttatatcagcactggcagggcagcttggacgaggttagcaagccaaagttacctcttgttcggctgatgtccagcaggagtgatcactcaagcacctcgttcactcgtcgtcatgtgttcaagcctgacgatgagaacgatgatgcatccgtttgttcaaagcctaaacatcagcaggtatcaggtagcacagccactgcaaggatttcacatgaagcaaatcctatagttgatctgcgcacaagctgtgagcagggtgttacgactccagaaatatatgaatcgccaaggcgaagttcttgtcaggctcagaagaacgctgctgcaccaattcaactcttggacatcaacttcccacccagggttccaaagactatatttctaccattgcctctgaagcaaatgctttctgacgagaacaatgttgaaacgtcgaagccaaaaaatcggtcaaaagacaatggcttcccatcagggctgatatggcaccgcaatattgaggctgagtgtagggaccctccagtagctcttcagcatatggattgcagcagcgagggacagtcgagctcgtcacctgctgagataccggagtatggatgccaagaccagtacaatagcgaggaggaaacaatgtactcagctgaaaccatggaaagcaggaacattccaagccccagggagaaacatgtggggaggagccagagctgtgtcacctacagcaggtggagctctccaaggacctcatcaatgcagaatggaaccttgcgaaagcagcatacactgatccctgtgcggaagacgctctcgcagaacacgactcttccgcagaggagtcatgactacttaagcccaacagtctcctcagccatgaagaagaggaactccatggaacagcagcagcccacaaagcctcgacggagcaccatccagtcttctccaaaatggatgttttgatggttctatctatatctggttttgtggtggaaacaatgaagaaagcaagtgcctactcggtgaaagctactgctcctatgtttcctactcaaaacttacatgtaagtctgctccccttccctcagttctctacttctctccctgggttcctgtgtgcagaatggcatggataaataaagagaaccaaaaaggaaaagaaaagcaaaaaaatcttcccaaaagattccagatgaaatgtgttgaaggcggcatttgtgaggtgcgatgaggactgttatattcctgccgactttagtgttcagcttacaattttcaactaaacatttttaaaatgttttttttgggattttgctattcacccaaagccatgatgcctgtaatcattttgtttgctaccgcctgcggccttatgtaccatgtgtgtcaccctgaattagcccaggaaataggttgagagttggctcccaagtgagtttttttttcccccccccccccttgtccccagtgttggctgtgtcccatactataaagcaatgtaaaaagcttttatttgaatgatgcggcaaagttcattgtggtc

SEQ ID NO: 1908 - DNA, 748 bp, Zea mays
  Clone ID: ZEAMA-23APR03-CLUSTER15367_4
agttccaactccaacctacgcagcagaggccagccacctccccgtcgctctcacgctcttcgtgcccgccgcctcccctccgtctctccctctcccctcccgtctgacgcacatggcctccatcgccggatcttccgccctctccttcgccaggcccgtcaaggcaatcaacacaaattctctagctttctcaccgttgaggaagggcaacacattcctccgcctgcaaccaatgcctatgagatctgtttcctgcgctgccaagaaggatacaacagacaaggtttgtgagattgtgaagaagcagcttgctcttcctgaccatactgaagtgttccggcgaacccgggtggagaagtcgcgagcgaggagggaccatggacatcaccagggcggtataagacctggcgatttcggcgcatcccagtcttcccttccagccgctccagctatcaggctgttgcagcagtaaggccggcgctcgaacaagatcggttggcgttggaacctccgatgtgtctcggtcccacgctttgtccgggaggggatgtgtagcatacgctatgctatgctgtgctatgctatgacctatgtacagggacaggaaggcagcagcagcagccgtgtagagactctgaaggtgaggagagggggaggtgatttgtttattggcggcgattcgagtgtctcggtgaccaaactcgtgtatcgtcaggtggttttgagatgttcgctgcaactgcaatgc

SEQ ID NO: 1909 - DNA, 1168 bp, Zea mays
  Clone ID: ZEAMA-23APR03-CLUSTER1537_1
atccagtgccagtcttccatcgcaagacggggcaaaagtgagcacattcttgcaacgaagcttgccgccgccgagctggggagctgggaagaggacgagatcttgcctaggtctagcgaggaggaggtcgatcgatcgattggctaggactctaggaggaggagctggttcataagcagccactaccgacccacccatcgactgtaattggtcggaggaagggatggccgatctgctgagcgttcctgaagacgatcttggaggccgggttcagtataatgagcgcgctggagaaggctggccacaacgggacgacccgcaggatcggtggtcagctcctgcaaacactaaatggctcaggcaaagccaacggcctgggggagaggctggcaatgcgtacaacggaaagacacaagtgagcctacactttcaccgcgacgaagccgccgacgacctacgcgggcagtgctttcaagtactgtcgaatcggggtgggggtccgcccgaccgcgacgcccatattaagaaaactgtcttctacaaaaactctaaagctgcccacatgggggaaatcggtaccgccaattgagtgccatcgctaacgccaagtacctggaggacaacacgaccaaaggtctgaaggagaccctccagcgcgcgtccgagatcgtcaagacgtgcaaccgcaagaccttggtgagccgtgccttcaaggccaatcaaatcgccgacgagctgcgcggggtttgcattgacatattgctgaacctgaatacggtgctccttgccaacgtggccgacattaagaaaactgttacccacactaactcaatgttggcccaaattttggaaatatgtgctgctaatcccgatgttcgtctgctacggcaaaaggtatagttgtttttgttgtctgtaatcctgatgattgaataaccggccaattagttgtggctgaacgagtctagtgcctgacgcatgccagttcatgcggggcgagttcgagtctcaggggagtgcgcgagtgcttgcagatcgtgggatggcacggccagtaaacgcggcatggagtgcatgtaaacgagtcgagtctgtttattaattcagagcaatacaacagaaaaggctgtgagtaatccagcaccaaaaaaaaaaaaaaaaagcggcc

SEQ ID NO: 1910 - DNA, 1406 bp, Zea mays
  Clone ID: ZEAMA-23APR03-CLUSTER154232_1
tttttttttttttttttgtcaactgtcactgcctgtcctgattcagttttcatttatgcaatacaagcaagcaattgtgccccgctgacatgtacccatcacaaactgggatatgatattggaccggtgatttctggagctgtagttcagctacaagatcaagttcagcaaaagcctctgaaagcatggaccgcgctgtcatagcgccgagatctccagcgctgcgctgtcatggcatccatctcagaccccgtatcggtttatgatctgcgccatgaggaggtcgtagcccctctccgtgaggtggtaggtgtcccagaagaggaacttgctggggtccctgcagggttccgccgtgtaccggttgcacgtcagcgtcacctcgaacacccccgtgccgcagcacccccggttcgtgacgttgaatccgtaggcgtcagggcgctgaatcatgtcgagcagcggcgtgtagaggtcgatgtactggagcacggaggccgggagcgcgtcgctgccgttgagccgcttgatctccttctccagcgccgcgttgaacacgacggccgcctggttgtacagcggcacgcactcccgctccagcccgccggcgttggtccgctgcgacggcacgcacccgatgggcggcgcgccggcgatgttgatgcgccgcgcgcccagaccgtacagcttcttgatgaagtcggaggcgcactgcacgacgaactcgatgtaggactcgaggtcgtagtcgcggcggaacggcgtggtgaagtaggtgttggcgaggtcgtcggtgcccgtgaccaccatgtacaggctcctggacacgatgtcggcggcccggtgggcgccgctggcgacgcgctccagcttctccttgtactccttgaacaggtccagctggttgtccatggtgagcacggacacgagctcggcggtgagggggtcgaagccgcagccgccggacgcgaagctgacgccggtgaggaggtcgaagtcgctgagctccgtgccgaggtacgccggcaggtgctccttgatgcccagccggctggcgacgatgtcgctgggcaccctgccgttgctgaacctgccggtggcgttgtggccggggaagtcctggccgtagggcgggaagttgcagcgcaccgtggtggtgagggcgttgttgttgcccgggtccacgatggagtccccgaacacgaacagggccggggtccgcgcctgcttcgtcgtcgccggcggcgctgcagccgccgaggcagcagcgcagagagtccgactccgatgcagaaccactaccgtcgccatcatgacgaggagagtgcgcctgctcaccatcttcggtgctgcgactgcgatctgcctgattttggattaggatgttctaggtaatggtctcgtgc

SEQ ID NO: 1911 - DNA, 1520 bp, Zea mays
  Clone ID: ZEAMA-23APR03-CLUSTER1542_2
gcacgagaccattacctagaacatcctaatcgaaaaaacgacagcgcgcacttggattcggcgaccaccggagcgcggaggaggcacaggcgccgatctaaagacgatggccgccgcgggctcctcgccgtccttctcctcctcgagtaagcggtgcgtgccctgcttctttcttcaattttcccccgatccatggctcgtgcgtgggttccctgctcctagctccactcccccgtccatggcttgcatctatgctgcacggctcggttgcggctgcagttgaacctacttgttactccaagcagagggcgggctcatgcaagatcctggtcgaagttgcgccccttccgcgtcgaaggccgatagattgcaggatccgcccagtgcaagcacaggtgctctgtgcttatcttttagcgagcgaagtggtcatttccccctctcttctttatgggaggaaaataggaaatggtgtgccaagtgtatcctcaaccattctactgttccaaacgtgcagtatacatcggcatacagtcgatccagttgcaacaccatagctggaagggaaggtggccctcgtcactggtggcgccaccggcatcggtgaggccatcgttcgcctcttcatggagcacggcgccaaggtctgcatcgcggacatccaggatgaggctgggcagcagctgcgcgacgccctgggaggtgacgcgcagggcgccatgttcgtccactgcgacgtgacgtcggaggaggacgtgagccgcgccgtggacgctgcggcggagcggttcggcgcgctggacgtgatggtgaacaacgccggcgtgacgggcaccaaggtgacggacatccgcaacgtggacttcgcggaggcgcgcagggtgctcgacgtcaacgtgcacggcgtgttcctggggatgaagcacgcggcgcgcgctatgatcccgcggaagcggggctccatcgtgtcgctggccagcgtggccagcgccatcggcgggacgggcccgcacgtctacacggcgtccaagcacgccgtggtcgggctcaccaagagcgtcgccgcggagctcggccgccacggggtgcgcgtcaactgcgtgtccccctatgccgtgcccacggcgctgtcgatgccgcacctgccccagggcgcgcgcgcagatgacgcgctcaaggacttcctggcctttgtcggcggcgaggccaacctcaagggcgtcgacgccatgcccgaggacgtcgcccaggcggtgctctacctggccagcgacgaggcgaggtacgtcagcgcggtcaacctcatggtggacggaggcttcacagccgtaaacaataacctcagggcgtttgaggattagttgaggcatttatgccagctctgggattgggagggagtattaccgctatttcttctgctgttgtgacaagtgtgtgcaagactaataaaccgcagcatgttcatgtagccaacagatgattgaacattccaagtataaaaaaaaaaaaaaaaagcggcc

SEQ ID NO: 1912 - DNA, 799 bp, Zea mays
  Clone ID: ZEAMA-23APR03-CLUSTER1548_24
tttttttgtggggaaaatttggggggggggaaaaacaattttcccccccaaggaaaacacgtttttgcgcccctgttttcgcccaaaggcgggccaatttaccccccccttaaaagggggacaaaaaaggggggagctccccccccggggtgggggccctcttttagaatttagggggttcccccggggttcccgggaaattcccccggaaacccattccttagaactttcttaatcaaaaactggctccctgcgttgcgtcttgggggagagagagaagtgggagacccgcgagaggctgccgtgtagggactagggaccgtagagtaagcgacagcgaaggagggagagggggatggccgggatcgggccgatcagacaggactgggagccggtggttgtgcggaagaaggcacccaccgccgctgccaagaaggatgagaaggccgtcaacgccgcgcgccgctccggcgcggagatcgagaccatgaagaagtacaacgctggtatgaacaaggcggcgtccagcggcacatccctcaacaccaagcgcctcgacgatgacacagagaacctcgcccgtgagcaatcatctgtctcgggccatttttcccatgaacaatctgatcgacgtttttttgtgcctaggatcccagtagataaattcgggcacttgtccaccgttgatgtgataaatgatttatatatgttcatgttcacatctgtcgctgttgatgatgttttcttttaagatggattctgaaaaaaaaaaaaaaaaaagcttatcgataccgtcgac

SEQ ID NO: 1913 - DNA, 1288 bp, Zea mays
  unsure (1)..(1288): unsure at all n locations
  Clone ID: ZEAMA-23APR03-CLUSTER15497_2
aacatcctaatcgaaaaactcggagtcggaggcgccacgcgcgcgtgtataaataactgcgcctcactgctgcggtgcacggtgtccccctccctccccgctgtctgtggctgcaggccacccccatagcccccgagctctgtgtgcgatggactactcgggcaccaaggagtcgcctcctgccggggcttggtggtcgagggagacggtggccgtggtgaccggcgcgaaccgcggcatcggccacgcgctcgccgcccgcctggccgagcacggcctcaccgtggtgctcaccgcgcgggacggcgagcgcggggaggccgccgcggcgccgctcctcgcgcgcgggctcgcagtcgtcttccgcaggctcgacgtctccgannnngcctccgtcgccgagttcgccgcgtggatccgcgacgccctcggcgngcctcgacatcctggtgaacaacgcagccgtgtcgtttaacgagatngacaccaacctccgtggagcacgccgaggctgtcctcaggaccaacttctacggggccaagatgctcaccgaagcgctcctgccgctgttccggcagtcgtcggcgaccagcaggatcctcaacgtcagctcccagcttggccttctcaacaaggtgagcgacccgtcgctgagggcgctgctgctggacgaggacgggctgacggaggcggggatagaggcgatggtgtcgcggttcctggcgcaggtgaaggacgggacgtggggcgggcagggttggcccaaggtgtggacggactactcggtctccaagctggccctgaacgcctactcgcggctgctggcgcggcggctgcagngcgcgcggcgcgcgcgtgagcgtcaactgcttctgccccgggttcacgcgcacgggcatgaccaagggctgggggaagcgcaccgccgaggaggcggccgacgtcgccgcgcggctcgcgctgctggcgcccgccgagctccccacggggaccttcttcaagtggtgcacgccgcagctctactccaagctgtgactgtgactggatagctacgcctaccgtcgtcggcagtgtgtgcgtgcgctccgtgaacgctggagtatatatatatagttcggttcctttagctactctgctcagaagtcagaaacgggagtgtcgatctgccaaggtgctttcggttgaacacagctcgtttgtgacctctccgcaatgtaccatgtacctagttgtctaagatctaggtcaactttctgtgcactggttgaatggttgccttgcctctgc

SEQ ID NO: 1914 - DNA, 1168 bp, Zea mays
  Clone ID: ZEAMA-23APR03-CLUSTER1552_4
ctgtttgccgtgccggcttgctctcacacccgctgtgccccccgcgccgccaacctcgatgctcgccgccaccaccgcctcccttcggccgcccatccgcagcttcccgcgcgtagcctctcacccgggtgcctcccatggaggcgcctgcggagcgaacccgctcctcacacggcgcaggcggcgagcgctagtatgccgcgcggacctgcagcaggacgcgccgttcgcggccgccatcggcgcctgcgtactcgcctcgctcgtgctgcctcctccgaggtcccgaggggaggcgggcgacgaggtggaggatgaaggggagtttggcgcgacggacacgaggatggccgtgatggggatcatctccttcctgccttacttcaactggctgagctggatctttgcgtggctggacagcgggaggcggcggtacctggtctacgctgccgtctacttggctccgtaccttagaactaactcccacgcgtccgctgatgagacctggttacctgtcgctagcatctttatctgcattctacatattcagctagaagcaagcatcaggagtggtgatatcgagagtttcaagttcatccaaagagcttggaacctcgtctttcctagagctgctaaagagaaggatgcccaccatggaaacaagagagactcaatcggaatgggcgacagacacaataggaggataccgacggcgcatgaatccagggagaggcttcgcaattcagatatcttcaagaggaaacttgatgatcccaacgatgagaagcaaaagaagtcagattggaactgaggctcaaaaggctctttttctcctgcattttcctgaaactacaaaaaatggtatttggggtggggtgaggggtgcatttgtagggagcccacaggtgaaactgaaatggagatgtggctgtctgcggtttcaaatgggtctgaatcgtcagatttttcttctggttccaaacagtagatcttaggtatagctagatttttacattttagtgcgcacaaataacttgtcagccaaagctaatgggacatatcacatatggcgactttgaggcttgtgaagctccgttgtgtactcgtaagaatgaaatcattttgctgtctactcgtatgaatgaaaacatgtttgtttttagtttcc

SEQ ID NO: 1915 - DNA, 1752 bp, Zea mays
  Clone ID: ZEAMA-23APR03-CLUSTER15563_1
aagaactcggaagtcggaagcagagcaagggatggatagcaagtcggtgggaatcgtcggcgcaggcgtgagcggcctagcagcctgcaagcacgccctcgacaaggggttcaggccggtggtgttcgaggccgacgggagcgttggcggagtgtgggcgcacaccctggagtccacgaggctccaggcgccgacgacggcgttccggttctcggacctggcgtggccgccggagagcgcgagggaggcgtacccaggccaccgcagggtcatggagtacataaggtcgtacgcgcgtgcgttcgacctcctcaagcacatcaggttccacagccaggtgctgggcgtcgagtacctcggtgcgaccgaggaagaggtcatgggctgggatcagtggtccggcgatgggacggcgttcggagccgtgaagggtggcggatggcgcctcaccgtccaggacttgaaagtcggtagcactgaggtttttgtggtggattttctcatcctgtgcattggaaggcacagtggaaccccaaacatcccagagttcccagcgaatgggcctgagctgttcaaggggaagatactgcactcgctggactactcctacatggacgacggcgacgctgctgagttcgtgagggggaagcgcgtgacggtgatcggctccggtaaatcggcgttcgacatcgccgcggaggtcgccaaggtgaacggtgccgcgcagccatgcaccatcgtgtacagaacaaggcactggctggtccacaagtccagcgtgtggggagtcgacctcagctacttctacctgaaccgcatctcgcagctcctggttcacaaacctggtgaaggattcttgcgctgcatgctggccgccgcactctctcccttgagatgggcgatctctaaagcgatcgaaacgtactacaagtggagcgttcctctgcggaagcacgggatggtcccggactacagcttctccttcgccatgtcctcgtgcctgatcgcgatgctgccggaaggtttctacgacagggtcgacgaaggcagcatcgttctcaggaaatccaaggcggtcggcttctctagcgacggagtcgtcctgcgagacagaaacgaaagcgtgagaagcgatatcgtgatcctggcgacggggttcagaggagaccagaagcttagggacatcttcactgcgaactggtgcagggagatagtggcagggtcaccggatacagcagctcctctgtacagagaatgcatccatccccggattcctcagctggctatagtgggttactccgagagcctcaccaacatatacgcctcggagaggatgagcaactgggtagctcaatttctggccggcggcttccagttgccaagcgtgagatgcatggaggagagcgtggcggagtgggcagagtacaagaaccgatacaacgggaggtatttccgcaggtcctgcgtaagcaccgctaacatctggcttaatgatctgctgtgccgagatatggggtgcaaccctagaaggaagaaagggttcctggccgaatggttccagccatatggacctgcggactatgcaggtctttgctgaagatggttgcattgcatgcctgtcagtgcatactcctaggaagagatgacagagttgctacctccatgggtgtaatactgcaatgtgaaacgtacaagcaaaatatgtctgatgtttgaactgtaaaaatcaggccctacggcccgcggcgctct

SEQ ID NO: 1916 - DNA, 1624 bp, Zea mays
  Clone ID: ZEAMA-23APR03-CLUSTER15588_1
acccaatgcaatcccgcttccacctcctccgtcctcttcactctcccccatcccagtcagtcctctccatgacctccgccgcggccgcttccccggaccccatggtggcgtaatttctgccgccaattcccttgcctccagacttcaaatccccaccaccatcgaacctccccaacccggcaaatcccgtatccaaatccaatagggtaaacctagccgcccatctgcccgccatgaaggcgtcgatcaagttccgcgacgacgaccgcccgctgctgcgcgccaaggtgccggtcggcgtgctggggctgcctttcttctcgggcctcgtggcggggggagacgccaaggacctccgcttcgacctctccaccgccttcacctccggcccggcgctccgcctctcgtaccgccccaacgaaccgctccagccctttgccctctctgctgcgcgccaaggtgcgcattggcgtgctggggccggcgttcccctcgggccccccgccgaattcaacctcacctcctcgaacccgcccgccttctcgctcgttttcaagccccggatcggagacttcgccgtcgccagctccgtccgctccccgccgccgccgccgcccgcatcaactctgcccccgctgtcggtcaagatgtccgacctcgtcaccaacggcgacgaccacgaccgcaaagcgcacggtaacgggttctccttctctgggaatgggttcgcggcgaacgtggcggccgccgccgggaccggcggcggcggcgtgggcgcgctgctgtccaggatgcggctcacgaccaggagtgtgctgccactgtggagtaaggcgagcctgcggttccagtgggggctgcgcgtgccgccggagatcaaggccgcgctcgcagacgacgggtacgggcgcaaggctgggagcctcgccatcagcaagctgccgctgctggtgatgaacaagatcaccatcgagcacacgcccaaggtgccttcgcagtctgaaacggataagaagaggaagaaagatgccccaccagcagccgagggcgaggtgttctcactaatgaagaggcaattggaggagctgaatgctgagagcaccatgctgcgtctggcagtcgaggacttgcgtgcagaggttggagccagcaaaggcgatggacgtaagctgccagcaacagtgccacatccacagcgttcattcgtgtcgaaaccagatcaccattttcacagcgatgctaaggatttgggagacagtgggacgaaaccggcctccaatgatgcaagtgaggggttgaagaaggcgctggaggccagacgaaagtaggaaacacctagataggggggccatagggcttgctgacactgcaagcgctacaatatgatatggctgctgacggctgtgtcaagttttgtgcttaataataatgcttcctcaatggagaagattggtaagggctgtgaggttgccatttgccataggtgatgtagtagttttgcctatattctatttccattgtttgtgttaggatattatccgttctgtataaatccgcaacttgcgatctaaaatgaatgaaggattagttttttttttccaaaaaaaaaaaaaaaaaagcggcc

SEQ ID NO: 1917 - DNA, 1051 bp, Zea mays
  unsure (1)..(1051): unsure at all n locations
  Clone ID: ZEAMA-23APR03-CLUSTER1572_26
ggtccgtggccatggcgtcgtccatgctctccgctaccaccgtgccactccagcaggggggcggcctgtccgagttctccgggctcaggagctccgcgtcgctgcccatgcgccggaatgccacctccgacgacttcatgtccgccgtctccttcaggacccacgcggtcggtacgagcggcgggccgcggcgggcgccgacggaggcaaagctgaaggtggccatcaacgggttcggccgcatcgggcgcaacttcctgcggtgctggcacgggcgcggcgacgcgtcgcccctcgacgtcatcgccatcaacgacaccggaggcgtcaagcaggcgtcccacctgctcaagtacgactccacgctcggcatcttcgatgccgatcgggtgcccaccccgaacgtctccgtcgtcgacctcgtcgtgcaggtctccaagaagaccctcgccgaggaggtgaaccaggcgttccgcgacgccgcggccaacgagctcacgggcatcctcgaggtctgcgacgtgccgctcgtgtccgtcgacttcaggtgctccgacgtctcctccaccatcgacgcctccctcaccatggtcatgggcgacgacatggtcaaggtcatctcctggtacgacaacgagtggggctactcgcagagggtcgtcgacctcgctgacatctgcgccaaccagtggaagtgaagcgttgcattgtaatagcactttgtaactcctcaccctccacagggctttgggattcaccccgaaatgactcactttcggtgaaattcacccgtttcggcgaggtcgtccgaatataccggccaaatgtttccattggatttcaattattagtcaactctagagttgaaacaaacatacaagttcttcattcaataatcaatatagaagtgcatatctgtttcctcttcatgcctcttgaccaagttttggccaaaaattcagtaaaatattagttaaatatgtttcaatctttttttatataatataacgtgaattgtaataggtatgaatggtagganaaatagaagata

SEQ ID NO: 1918 - DNA, 1531 bp, Zea mays
  Clone ID: ZEAMA-23APR03-CLUSTER157979_1
ttttttttttttttttaatcaaatgcacaacatcgtctattatatatattggtcatggacttaacaacactgtaagcacgcatgccatcgagcaaccttgacggccctctagttgcatcaagtacaaaattggtagccaccggctaatataccctctcgggggtacccacgatcgaggagagcctgtgtctacctggtcttgcaacaggggctggttgctaccggcagcagctagctttgcgttcctttgcttcccccagccagcttcctccctctcaagtctcgtcaaaacactgcaggggagatgcatggccctagctggaaaaaggccatccatccctctcagggcaaccaaccaaccaaccactaaccagcaccgccaacctctctgtctctctctcactctcactctctacataggattacacttaagcaatgttgctaacaacactgctaactaagggtggtagtaataaacgacataattaacaggcaggacacacacacatatatatatatatagcggcaaggcgacgtgacggcggtggagtccgtccgacatctgtgcatgaaggtccgttacgcgagcggcgccctatggggcgcgcccttccgcctgttgccgagcgagaggacgatctgagggaagaaccctcctccgcccccgccgctcttcttcttcctcgtcgggacgtcgacgtcgcgccgcgcgtggttcctggccgagccgccgttgctggatcctccgctggcgctggcgctgcccccgtgctcgacggggtcttcgaggatggagctgggcgtggcctgcccgtactgcccggggtcgtcgtcgaagcggaggttctcgaagcgcgggaagccgcagcccaggtccggcggcccgcccggcacgtacaggaggatgttggacaggtccccgccctgcatcatcacatggtccaccttgcaggagaggcagcagaagtggaagggctcctggaggatcctgtcacaggccaagcagacgttgccagagcccttgaagggcctggactgcggccgcggcttgaggaagatcaccttggcactgttgatcgtgtagggctggaaggagcagtcgatgagcctctcgaggtcgtcaaggcgcaccacgtcattgtacacgtacctccgcacctggaggaggaggtggtggcggtgcgcgggggcgcagtgcgggcagatgctggcgcagcagcccaggcagaagatgttcttctcgttcttcttccggtcctcgtgcgccgcgcaccccacgaagaagctctcctccaccagcccgcccacccacccgggcctcatccccatctctatctcgcctccgcaattccctcgctcccagatgcttctcccggcgggcgggcgagcgatccgtcccccgctccggtcctccgtacggagcggtgtctgtacgtacgcgggccggccggccggccggacgggcaagcgcaccgcggcgagtgagtcggtctggaggagattattggctagatgggagtggaggaggcgt

SEQ ID NO: 1919 - DNA, 1547 bp, Zea mays
  unsure (1)..(1547): unsure at all n locations
  Clone ID: ZEAMA-23APR03-CLUSTER15839_2
gctagtttcgttcttatctccgtttctctggattgtcccccgctcccctcttccggtcttccccatgtcggatgcgtataggaaagccaagcccggccgcctcgtcttcaagggcggcgaagccgcctccatccacaagccaaagaagcacaagaagaataagaagcccgcgtcggcgagggcgtcctccccgggcgaggggctgaccctgttctacaacccggcggcgagcaagatggccccgaacgacgtgttcggcgtggcgttcaacggcggcttcaaccagcccatcatgtgcggcggcgagccgaggcagatgacgctgcaggtccgcgggaaagccgacccgcccatctacaccatcaggatacgcgtgccgcagcacgccacaagcttgatcttctccttcaccaacggggccgagtgggacgggccgtacacgctcaagttcactcgtccgcgttcagctcagctactccaatttcgcaacaagttgcaagcaataaccgaccaaggacgacgaacgggtcgatggccacgctctcctcctgcagccgcctgagtagcggcaccggcgccgcggccatccaccggcagccggcccgtgctggagccgtcctcgtcgtcacctgcaggcggagctcctccgcgaccgtccgcgccgcagccgctgccacggcggcggcgccggctgccgtagagctgcagaacaagggggtgtcgctgccgacgtgggcggagttcgagctcgggcgggcgccggtctactggaagaccagcagcggcctcccgccctcgccgggcgaggggctgaccctgttctacaacccggcggcgacgaagatggccccgaacgaggtgttcggcgtggcgttcaacggcggcttcaaccagcccatcatgtgcggcggggagccgaggcagatgacgctgcaggagcggggcaaagccgacccgcccatctacaccatcaggatacgcgtgccgcagcacgccgtaagcttgatcttctccttcaccaacggggccgagtgggacgggccgtacacgctcaagttcagggtccccaagccatggcagaacaagccgctgagcttcttcaacgagggcctggcggacgaactcaacagggagggcgcctgcgacctggccatctacccggacgagaacatcgccatcaccagctgcgccatggacggctacctcgaggaggggggggatcggtgcaagctggacatcgtgagcggatgcacggaccccagctccgacatgttcgacccgctggccaccgtcgacgacggctcctgccccctcgagtctgattccgaggaatgatggtggagctccatctcaatccgagggagggaggcagcagcagcaaacgtgatccacacatacatcatatacgatgtctgtcaagtttgtcatcatgtgatacatgaagcatacctgtatttagccagaataccacagtaaaaacgcatcaatgagcaagatgatctggatacatggtatccatctttgcaaactctgatacnnnnnnaana

SEQ ID NO: 1920 - DNA, 2529 bp, Zea mays
  Clone ID: ZEAMA-23APR03-CLUSTER15937_1
gcacgagaccattacctagaacatcctaatcgaaaaagtttctcgttcccggcgtggtgtggcctggccactggccacccgtgccctatcctcttccgcacggcgtcctatatataaggaaaggaaaaatctgccactccacacgcgctcctctctcgccgtcgccaaccatcgccgcctcgcgtccggacccgccgttcctccgaggaaatggctgcactgcaaccctcattttcaccagcaatgactttgaagagtagctgcagcgccctgaagttcccaaaaactgcactgttatctggttttggtggcattccacgccttcaagatgcgcaagacaggaacactagcgtcgcttatttgatccccaaggctgcttcagtgactgaccagtcaatagcagagccaccaaaaaccaagcaaaataggcacacagtcgacccaacagctccagaatttctgccactcccatcttttgaagaatgctttccaaggagtaccaaagaatcaagtgaaatcatccacgaggaatcaggtcatgtcctcaaggttccattccggagagtccatttgactggagatcagaagcactttgatacatatgacaccagcggtcctcaaaatataagcccaaggattggactcccaaagataaggaaggaatggattgataggagggaaaagctgggtagtcctcggtacacacaaatgtattatgctaaacagggaattgtaacagaggagatgttatactgtgccagccgtgagaaccttagtcctgaatttgttcggacagaagttgcccgtggacgagccataattccttccaacaagaggcacctggaattggaacccatgattgttggaagaaacttccttgtaaaggtgaatgcaaatattgggaattcagctgttgtgagctccattgaggaggaagttcacaagctccagtgggccacgatgtggggagctgatactgtcatggacctttcaacagggcgacatatccatgagacgcgggaatggattattcgcaactctccggttcctattgggactgttcctatttaccaagcacttgagaaagtaaatggtattgctgaaaatctgagctgggaaatttttagggataccttgattgaacaagctgagcagggcgttgattacttcacaatccatgctggtgtcctgcttcgttacattcctcttacagcaaagagaatgacgggcatagtttcacgtggtggctcaatccatgcaaaatggtgcttaacttatcacaaggagaactttgcatatgaacattgggatgacattcttgacatatgcaatcagtatgatgtggcattatcaattggtgatggtttgaggcctggttccatttatgatgcaaatgatagtgcacagtttgcagaactgctgactcaaggtgaactaacacgtcgagcatgggcgaaagatgtgcaggtaatgaatgaaggcccgggtcacatcccaatgcataaaattcctgaaaacatggagaaacagttggagtggtgtaatgaagcgcctttctatacattgggtcctttgacaactgatattgcacctggttatgatcacatcacttcagccattggtgctgccaacattggagctcttggcactgcacttctttgctatgtaacaccaaaggagcaccttgggttgcccaatcgtgatgatgtcaagactggtgtaatatcctacaaaatttctgctcatgctgctgatttggcgaagggtcatccctatgcacaagcttgggatgatgcacttagcaaggcaaggtttgagtttagatggcttgaccaatttgctttatctctggatccagtaactgctatggctttccatgatgaaacattgccctctgagggtgccaaagtggcacatttctgctcaatgtgtgggcccaagttttgttcaatgaaaatcacggaggatatcaggaagtatgctgatgaaaatggttatggaacagtagaggaagctgtgatacaaggaatgaatgctatgagtgctgaatttttggctgcaaggaaaacaattagtggggaacaacatggtgaagcaggaggggagatctatgtaccagaaagctatgcagctcagaaataaggtttcctcggagccatccattctaaatgaggctaaggcatcagcagctgttctggctagtggctaaggcatcagcagctgttctaccatcttatctaatgagatggtaagcagtatgtgaataaagctggtgttgcttaccttcagtttgtgaatgccattatgtactgtaataaaaaactctgtattgtactccctagcattatcattatgcttttgtcttctttgtatcacaatgggattgttagtgatgaaaattgcaccaggggtgcctgtgttctctaaaaaaaaaaaaaaaaaagcggccgactgttgtgagatgggctgagaaagaccctttgaacctgaacacgataacgcctgccaagggagtgttgtaattgtatt

SEQ ID NO: 1921 - DNA, 861 bp, Zea mays
  Clone ID: ZEAMA-23APR03-CLUSTER1594_15
agaccattacctagaacatcstaatcgaaaaatcgaaaacccacccgcacccctgtccactgttggcttggtgacttcctccgctcggctcccctccgctcccgaacggtcgatctttgcatggcagcagcagctggctccaaggggcgggcgatcgctgaaagcttcgtcagccgcgtcctcgccggcaaggccgcctcgccgaggagggccgtgcacgcctcggcgtacgacaagaacctggaggaccaggtgcgcccggcgttcgtgccggacgatgtgatcggcagcgccgggagccccgacaagtactggagcccccaccccaagaccggcgtgttcggcccggcggcggtggaccccaagctggccgctggtggcgcgccggacgccggcgcggatgctgcaggaggcacggtgctggaccagaaggtgtggttccgcccgctcgaggacgtcgagaagccgccccccgccgcgtgagccgcgcggcgctgctaggccagcccacactgctgctcgctcataaaaagggcggcgggagagcctggcagtggcaggcactctgctcgtgctcggcggggctgggctccctgcttatatcactacaatattatactactagtagtggtgcttgatagcagtgtgtggctgtgctaataccagtataatactggttctactataatacagtcgtatcaggcatggcgtgcatcaggactggttgtgatagtagcaacgtgatgctcgtgcctgtaataagaacaagcaggcgatgtgtgcctgtgatgtaccggtgtcttcagtgttataagtacttgggtcaaatggtttctgaaaaaaaaaaaaaaaaaagcggcc

SEQ ID NO: 1922 - DNA, 1438 bp, Zea mays
  Clone ID: ZEAMA-23APR03-CLUSTER1595_14
cctgaaaatatttcgaatcataattttattactcgaatttctaattatctgaattaccctacccggaaatatcagctcaccccagaccgcccaacaccagctccaccctcgccaccaaccgcccccgcaccacggccagaaccctagtcacttccccgccgcccactccatggaggacgacgccatctcgacgctcatggacatcgacgactcgccgctcagcgctgcgggggccgggttcctcgacgaggaggacggggagggcgagatgttcttcgccccggcaccgcgcggcccgcgggcggcgctggcgatggcccgcgggcccctccccttttccgggttcttcaacagcttcgacgggcgccgatttcgacgacgacgacctcgcctgagggaactgccgcccggttcggtaacggatgttgttcgtggatcgcgaatcgtgttatgtcgataccgtgatggggtctcttaattagcgcatcgattcagactcgtttgggcaatctgaagatgtttagggatcaacattacctttgtgtacctttgtggcctatggttcgtggatgcacagggatcaatataagtacctttgtgccccatggttcgtggatcactgtgcatgtgttcttccgcgtctttgttgttattttggctccatctgtatgatttaacaaaggaaggttcattagatgggccacatttacacactgtttatccacacgggtccactgatactcttccttttgccaccatgggctctggttctcttgctgcaatgtcagtgtttgaatcgaagtacaaagaaggccttactagggaggagggaatacagattgtgtgcgaagcaatctgtgctggtattttcaatgacttgggtagtgggagcaacgtggacgtctgcgtgataaccaaggggaagacagaatacttgagaaaccaccagttgccgaatcccaggacttatgctagttcaaagggatacagtttcaccaaggggcagactgaggtactgtcttcaaaggtcacacttctaaagcagaaggttgaggtcgccgagggtggtgatgctatggaggagtgatcttgcatcctgcattcatacaagcatattctgaatctgtgtaactttgcttagtggatcagctagaacaagaaaaaagaaaatttggagatctttgctgtactcgctggaccaaagccagggttcttatgctaaatgtgtttctaatgtttggcacattttaaattgcttgttgtttccgaatgtttaaaaccggtgaaggtatggtatttgcttggagatgttattactgtcgcgtcggttgtttgtcgaacgactaggtaatggcgcaatgaaaatcatgcctgatgcagtggtttacatgacacatctgtctggattacaaaaaaaaaaaaaaaaaaaaaaggtgac

SEQ ID NO: 1923 - DNA, 1392 bp, Zea mays
  Clone ID: ZEAMA-23APR03-CLUSTER160108_2
cgaatattcacatttctttataccaaaagcagacgatacgcaaaaaacgagcatatctgacagtaacatgcaacgggtagcgctacaacatagatctagcataaccctggcagtttagtaacttggacccatgctacaagaacgggacagtcgcttttccatctctcgtccagtcccaactgttgctcttgagccacctccaccgccgccttctgctgcagaaactgtgttgtattgcttcctgcaacctgggcagcgcccatcttccaccaagatcctgttgtggcagaagaggcacatgtgaaacccacaaggacagggacagaagctcgaatctgtcaggtcaagatcgtcacagcaaatggggcacgacagcggcaatgaaagaattccctgctgcgcagcactcattcccatatcctgccagcggttaccaatgcttgttgggaagctggtctgcttggagatgctgggtaagctctgtggtcgaaatatgtcatccggtgcccaagcccttgtcttgctttgaatcggttctggtttcgctgcatgagaaggttctgcagtggtcggagcttgtgggagtgtcggtgtgggacctgaactctggttacaagaactgtcatcgacataaagcgcatcagcagccatttcccaatcatcgaagacttcactctcatcctcagggccgcctgtatcctcctcagcatcactcacactccttgagctggaccatacactgcttccactgctgaggctgggaccaccgccattgccagggaaccccttcctctgagggcagtcaccactttggcgcttgtctgagcctggggagtcaaggccactgccatctgcctcaaggccagcagcaatagcctcatccctatcctccggatcactgccccttgatctggaatcagcacggcgacgaggaagtggagggtgcggggaagcgagtatgggcgacccagaaactgctcctgttggcgaagctgcagatttggcatccttattgccttgccccctagacagaaactgctcacggcgtgtgtcgcgcttgctctgcttcagcttcgccgccgagcggctccccctcttcttcttggagtcgcgcgcggcggccgccgatgcgggcgatgcagcgtcgctgttgcccatttctccttgtagtgagtggcggcggcggacagatgcgcggctgccggtcgtcgtcgacgcgcgtgcgttgggaggagcgagggtgcggaggatgggggagcaggagcgagaaaaccctaaaaagcgatgcggcgagcggcgagaggaaggcgaaccgatgggtggatagataacacggcacacgggggcggagttttagtggaaagaaaggaggaaatggagacgaaatctgtt

SEQ ID NO: 1924 - DNA, 1350 bp, Zea mays
  Clone ID: ZEAMA-23APR03-CLUSTER1605_20
ctctctgtcgcatttcccgtcctgtccttcccttacccggcggcttaaaccctagttctcactcccatcgccgcttcagctccgccgcagcagatggagttctggggtctcgaggtcaagcctggttccactgttaagtgtgagcctggatatggctttgtgctgcacctttcccaggctgctcttggggaatcgaagaagagtgataatgccttgatgtatgtcaaaattgatgatcagaaacttgccattggaaccctctctgttgacaagaacccacacatacaatttgatctggttttcgataaagagtttgagctgtcgcacacatcaaaaactaccagcgtcttcttcactggctacaaggttgagcagccattcgaggaagatgagccttcttccacaatggatcttgattctgaagatgaagacgaggagcgggatgttccagtagtcaaggaaaatggcaaagctgatgggaagaaacagaaaagtcaagaaaaggcagttgctgcaccttcaaaatcaagtccggattccaagaagagcaaggatgacgatgattctgatgaggacgagactgatgattctgatgaggatgagacggacgattctgatgagggtttatcttctgaagaaggcgatgatgattcaagtgatgaagatgataccagtgacgatgaggaggaagacactccaactcctaagaagcctgaggtaggcaagaagagagctgctgaaagttccgtgctgaaaactcctctatctgataagaaagcaaaggttgccacaccgtcatctcagaagacaggtggcaagaagggcgccgccgtccatgtggcaactccacacccagcaaaaggcaagaccattgtaaacaatgacaaatcggtcaagtctccaaaatctgcgccaaaatctggtgtcccttgcaaatcgtgcagcaagtcattcatcagtgagacggcacttcaggctcactcgaaggcgaagcatgggggcaagtgagtcgcaggtccaatagagtcaacaacaaatgcgaaacatgggagaggagggtaagcgagagtctcgaaagagtgtcggtggaagtaggcctaaccttattttgtttagagacgggctatgcgttcgatgtagcaaaacaaggctgtggtttgtgtacttcaatatttgggttgtgtgtttcgaatttttttttgaacgtgtctcggattgttgtggtgcgaattggttgtttctgtcgctatggtgagatagtgtcacgtttctttctctatttgaaagacctgtcgcattctatttcttgggaactgccagtgcttgccttgttgaaaaaaaaaaaaaaaa

SEQ ID NO: 1925 - DNA, 1682 bp, Zea mays
  Clone ID: ZEAMA-23APR03-CLUSTER1606_1
gcacgagaccattacctagaacatcctaatcgaaaagctcctccctctatccacttgcaacggtcgagaggaagcggaggtccatccgctcattcccgcccgtcccgcaaccacccaccgcggccgcggtgccatggcatccgccgccggcgccgccttgtgcccatgctctttctccaccgtactctcctcctccccctcaactcccttccgtcccgcaaggacgacgcctcgcccttctctccgcccgctgccgcgccgcgccaggctaccgctgcggccgggccactcgcgagtcggatcgtgtctgcaggtactgaggtgcctcccgaaatgcgactcggggaagccggacggaggaggagatgctgggttatcgggtcggaaggcggcccggccagcgggtcagggaggacccaggcggcccgcgcagttcggcgcgtcgtcgtgcgggctcgcattcacgacggtggtgggggtgataatgctccaggcatcgcagcaggcgcttgccgccacgcagttcgctggcctgcagcctgcggacgtgctgggggatctcggggacgtcagtacaggttttgccttcagcctttcctgttgatcttcttttctgagctaggggacagaacgttcttcattgcggcactgttagcagctagaagttctggagctgtcatttttctaggcacatttggagctcttgcggtaatgaccattatatctgtagttcttggtcgagcattccactatgttgatggcatcattccgttcagctttggtggtactgatttcccagttgatgacattgctgcggcatgtctcttggtttattatggggttactacattacttgatgcagcctcaggtgatgatgaaaagatcaatgaggagcaagaggagattgagttagcttgggggccatttggcccgcgcagttcggcgcgtcgtcgtgcgggctcgcattcacgacggtggtgggggtgataatgctccaggcatcgcagcaggcgcttgccgccacgcagttcgctgggctgggaacattcctgtctgaaaagattatagcatacattggagggagcctattcttggcctttgctgcgattaccatagttgagatagtgacttgaaaagggagttccagcttccacaattcataaaaagtactgatcttttgccggggcactgagaagtcagcttgatcgtaatggtagtacattgatcagttatcgtggttgattgtccacaggaacttcattgttcgtaggggacgtcctaggcttgcgtagagtgttttgtttctggtgatgagatttctgcttctttatccaagaatataaaaagtactgatcttttgtcagggcaatgaacaatcagcttgatcgtaatggtagtacattgatgtgttaccgaacatgattgtccacaggaacttcattgttcgcatgggacgtcctaggcttgcgtagagtgttttgtttctggtgatgagaatttctgcttctttatccaagaacaatgtttttgtcatcatcatgatttgtagtggaaacactgatagtcaggttggtcggaagatgggactgggaggaaactatgaattccatgtagcttttgaacttcctcttacattatttacaagtatatgaatcagtcttttcgcaaaaaaaaaaaaaaaa

SEQ ID NO: 1926 - DNA, 709 bp, Zea mays
  unsure (1)..(709): unsure at all n locations
  Clone ID: ZEAMA-23APR03-CLUSTER1611_15
atcggtcaatcagnaatcaccccaaatcctagggttctagtcgcttctcgtcgtttcgttcgtagagacaatggtgaaggcagttgctgtcctcgccggcactgatgtcaagggcaccatcttcttttcacaggagggggatggtccgaccaccgtgactggaagtatctctggcctcaagccagggctccatgggttccatgtgcacgcgcttggcgacaccaccaacggctgcatgtcgactgggccacacttcaatcctgttggcaaggagcatggcgcaccggaagatgaggaccgccatgccggtgatcttgggaatgtgacagcgggagaagatggtgttgttaatgtcaatattactgacagccagatacctcttgctggaccccactcgatcattggccgagctgttgttgtccatgctgatccggatgatcttggcaaaggtggacatgagcttagcaagagcaccggaaatgctggcggacgtgttgcctgtggtatcattgggctccaaggctaaagcggttaacctccgaggcaaacaccatagaaggtcgaagcgagcacctcaggaagttgctgttccatttcctctgtattggcaacacaatttgagtactccaaataagcgcctgatccatgatcagagagcactattcatgtcattttgtatatgaacaaaaaaaaaaaaaaaaaagcggcc

SEQ ID NO: 1927 - DNA, 1088 bp, Zea mays
  Clone ID: ZEAMA-23APR03-CLUSTER1611_7
agcgtcagacattccagtgcgtgcctggcaagtggcaaactcgagctgtctagtcctcggttcgcgaatcttccacagagaggcagacggcaggactcgcttcaagctcctcatctcgcgcaggggggtcgcctgagatcacagagacaatggtgaaggcagttgctgtcctcgccggcactgatgtcaagggcaccatcttcttttcacaggagggggatggtaattcccggcacatgtttttgacttacaatgaggatctctgtggtctaacgagaatatctgcttcatgggtaggtccgaccaccgtgactggaagtatctctggcctcaagccagggctccatgggttccatgtgcacgcgcttggcgacaccaccaacggctgcatgtcgactgggccacacttcaatcctgttggcaaggagcatggcgcaccggaagatgaggaccgccatgccggtgatcttgggaatgtgacagcgggagaagatggtatttttgtctcactgccttgcgtcattgtttggttcatttgaactggagaaatctttataaagttggctgcgaagactagatttattcattttccaatgtacgttgttgcattgaaactgcagcgcaatagctcataatcccactgacaatttacttctttgcttctcaggtgttgttaatgtcaatattactgacagccagatacctcttgctggaccccactcgatcattggccgagctgttgttgtccatgctgatccggatgatcttggcaaaggtggacatgagcttagcaagagcacgggaaatgctggcggacgtgttgcctgtggtatcattgggctccaaggctaaagcagttaacctccgaggcaaacaccatagaaggtcgaagcgagcacctcaggatgttgctgttccatttcccctgtattggcaacacaatttgagtactccaaataagcgcctgatccatgatcagagagcactattcatgccattttgtatatgaacaatgttgcgcacctgcttaagtgtctgttccaacaaatgcttaagaagacaaaaaaaaaaaaaaaaaacccgcggcc

SEQ ID NO: 1928 - DNA, 618 bp, Zea mays
  Clone ID: ZEAMA-23APR03-CLUSTER161639_1
ttttttttttttttttgcttcacagctgcgctttatttgctagtagctagcggtggaagaagaagaagcaatctataagctagtacatagtactcctactacggtagtaacaacattcttggatccaatccatcgacgttaacatgcataaaaaaaagaaaagactactagaaagggcagcagcaattaattaactaaaacacacaagagctatagctgctagccagcttaattagctaatactaaaaatatatgtgatgcgttactgccggccggctggcagcttgccgttgccgccgcggaggaagtgcagcagcacggggctcttgcaccgcgggcacttgggctgctgctcctccccggacaccatcacgtacatgaggcactgcgggcaccccaccaccaccatcggcttcggcgccaccgcctgctgtacctcgtcctccgcgtccgacgacacgcacgagctcgccggcgactcggccgccgacccgccgccggacatcgtcgtcgtcggcctcttgccctgcttgctcatgcacgcacggttacctagctacctagccagccagtcacagacgacggggattttgttgttccggcccggccggcctcgag

SEQ ID NO: 1929 - DNA, 1386 bp, Zea mays
  Clone ID: ZEAMA-23APR03-CLUSTER161_8
gaaggaaggaagccatgatgatgatgggcgaaggcgtgagcatgccgccgtggtcccaccacgtccctgtgagcggcgtcgacgaaggcgacgagatgacgccgtacctgctcgcggcgctgcgccagtacctgccgtgcaacgacgccggcgccgaggccgaggaggatgaggcggccgccgccatggcggcgggcgtggacggctacggctgcgacgagttccgcatgtacgagttcaaggtccggcggtgcgcgcgcgcgcgcagccacgactggaccgagtgccccttcgcgcacccgggggagaaggcgcggcgccgcgacccgcgcaagtaccactactccggcgccacctgcccggacttccgcaagggcgggtgcaagcgcggcgacggctgcgacatggcgcacggcgtcttcgagtgctggctccacccggcgcgctaccgcacccagccctgcaaggacggcacggcctgccgccgccgggtctgcttcttcgcgcacaccgcggaccagctgcgcgtgctcccgcccacgccgcagcagcagtccagccccagggggcgccgcctgctcttcccccgctcgccgagtcctacgacggctccccgctccggcgccaggcgttcgagagctacctcaccaagagcatcatgtgctcgtcgccgaccagcaccctcctatcgccgcccaagtcgcccccgtcggagtccccgccattgtcgcccgacttccgccgtgggtgctggccgggcgccgggtcccccgtcaacgacgtgctcgcctcgctccgtcagctccgcctcagcagggccaactcgtccccgtcgggcggctggtgcagctaccctgcatccgcggtcgcgtacggatcgcctacggggggcgcgctctacggcctgtcctccaccccgagggccaccgccggctccggctacatggccaacctggaccctctcgacgtcaccttcggcggcgacgaggagcccgtggagagggtggagtccggccgcgcactccgcgcgaaggtgttcgagcggcttagcagggagggcgctgtttccggcgacgccggtggccccgacgtcgggtgggtctccgacctcatcaactgaggcggcggcgggtccctggcatggcaggtggcaatggcaatgggcatgggcatggagaaaggtgatggtgagccgtatcggagaaggatggcatccaaaaaaatatttccctgcatttgatttcgttcctcagttaattccgctaatccccgtgtacatatctatcaccctgtgaatattctcggttggtaagagggaggatgatgctaggcggtggatggatgggtggatttgttttggggttcttgaggtagcggaaaatatcc

SEQ ID NO: 1930 - DNA, 2295 bp, Zea mays
  unsure (1)..(2295): unsure at all n locations
  Clone ID: ZEAMA-23APR03-CLUSTER16276_1
tgccgcacgacggttaccgttggtgcgagtgcacctctaccccaccccagctgctaaacccgagaccgaacctcgtatcgtccagcttaaccgcacccaccttttgcgactgggatttttctcgagatcgatcgatcgctttccatcagagagcagcatcaccttcttgccttgcccacgccccagttgtgactgcctgccggttgcgaatcgaagcgtaaacatgacgacgctgtcgtccggcgtcctcctgaagctcctggacggcatgaagagcggcgccgccaagcccgtgggcgagcaccggacggcggtcctgcaggtgacggacatcgtgccagcggagctggacgagaaggacctcttccccaagcacggcaagttctacgtcaaggtctccgatgcgtcgcactccatctacgccacgctcccgctggcgcaggcagacctcgtgctctccaacaagctccacctcggccagttcgtccacgtggaccgccttgacccggcctcccccgtccccgtcatcgtcggcgccaggccgctccctggccgccacccgctcgtcgtcggcacgcccgacccggcagcgagggccaagcccgccgcgccgtagagggggtcctggggccccgagcagaatgccgncatcaagcctaccacgctcaacttcgacgccgagaggacgacgccggtcaaggagcggccggccttgtcgactccggtcaaggaccgcgctggtggcgcgacgcctgccagggagcgcggggctgcggcgacgcctggtagggagcggaccgccgcggcgtcgccggcgctgagctctgcgtcgttgaggaagagcagcagcgtgctgcccaggctgaccaggagcaagagctttgtcgcggacagggatcagcagcatcccaggatccccaagagcccattccccactgagaagagctcggtgagctgcacagcctcgagggcgacgaggagggtggccaaggaggaagagccctcctcgcctccttctgatgatgagctcggaagctcggccacatccaccaagaagcgatcggcgacagctgctcgcgtgccagtgccggggaagctcagtctactcgggaaggacgcaatggagcagagagagcaggcgcagaaggttgccctggaggcactgcgcaacgcatcagccaccgacaacgtggctaggatctacaagttgttctcggaagtgagcaagacggcgaggccggaagcgccggccacctgttttgacagcttcctcagctttcaccaagaggccgtgcaggccgtcaccgacattgaggcgatccaggcggccacctcgatggccgcggccgtggcgagtgacgagcagcagctcgaagatgcgccgccggtcctgcaggagatagcacagaacaggacggtggtgcgtcggagaggcatcggcttggggagcgtgtccaagtcagtgtcgttcgcgcccggcacgttggacccgaagcaggacgatggaggcggcaaggccatccggagctcgagtgccagcaggaagtgcctcgccacggacaagatcggcgaagacggtggcgacgagaagagatcatcttcttctggtccttcctctgccaccaccaccactgcgcactctgctctgggctcctcgctgaagctggctaagaagatacaggccgaagcagggagctggttcatggacttcttggaggccgcgctcgagaccgggctgaagaagagcaaggcgtcttccatgggggacgggcggaagcaaagcagctgctgttgcccgcagtcgttgatgctgcgggtgatcaactgggtggagatggaacagagcggcggcgacagcagcggcaggaagactgcccacccaagagctgcggccgttgcgcggaagctcagaatcaaggccaaaaacccctcctgatgcgctgctgccctctgattcttgtgagaagctagtttgcctctgattcttgtgacaaaggtacccagatagaatccgtagaataagaaagtgattgcctccattgttcttgtcacggcatagcagattgtttcaagtgttcttgaagtaggatgacctgttcccttatcactaatcttaaacagcactacagcagcagaacaatggaggtgttgtaccgtagttacgatattcagtgtttgaattcgctgcccattcttatttgttattctgctgatgtttcagaccacctctgcggcagtcattcggtcggccagcaaatcgatatcaaaattctgttttgaaaaaaaaaaaaaaaa

SEQ ID NO: 1931 - DNA, 1884 bp, Zea mays
  Clone ID: ZEAMA-23APR03-CLUSTER1627_1
gcacgagaccattacctagaacatcctaatcaaaaaaccaaccaacgcaccagccacaagtgacaagtccaatcaccaacaggccgcgtgcgggcagcggccggccactgcaccatgtcgtccagcagggaggtgatggtgctcagcgacagcgaggtgcagtccgccccgccaacgccgcgaccaccgccgccggtgtcggccccgccatcgcagatacactcaccgtcgcccgcccgctcgccgctcgccagcccggtcaggaaggcggtggcgggcgtcaaggcgggctgcctggaggaggaggtgggcggccacgtcacgcggctcgcggacccgcgcgacgcctggctgcccgtcaccgagtccaggagcggcaacgcctactacgccgcgttccacagcctcagctccggcatcgggttccaggcgctcgtgctccccacggccttcgcctccctcggatggacgtgggcgatcatctgcctgacgctggcgttcgggtggcagctctacacgctgtggctgctcgtcaggctccacgagcctgtcgcgggcgccacccgctacagccggtacatgcacctcgccaccaccgtgcttcggcgacagatgggccaatatcctggcgctgctcccggtgacgtacctgtcggcggggatctgcacggcgctcatcatcgtcggcggcggcagcatgaagatgctgttcggcatcgcgtacggcgggtcgtgcctggcgcggccgctcaccgccgtggagtggtacctcgtcttcgtgtgcgcggccgtggtgctgtcccagctccccaacctcaactccatcgccggcgtgtctctggtggccgccgtcgccgccgtcgcctactgcaccatgatctgggccgtgtccgtggccaggggtagggtagccggcgtctcctacgaccccgtccacaaggcccccgacgacgtggacgccgcactcggcgtcctgaatggccttggcatcattgccttcgccttcaggggccacaatgtggtgctggagatccagggcacgatgccgtcgactctgaaacacccgtctcatgtgcccatgtggaagggcgttaaggtagcatacgccatcattgcgctctgcctgtaccccatcgccatcggtggcttttgggcatacggcaaccagatacctcccaatggcatcctgagcgccctgtacaagttccacagccgcgacgcgtccaggcttgtgctgggggtcaccacactgctggtcatcatcaactgcctgaccacgttccagatctacgccatgccggtgtacgacaacatggaggccgggtacgtgcacaagaagaaccggccgtgcccgtgtggatgcgctcgggcttccgcgccttcttcggcgcggtcaacctcctcgtcgccgtcgcgatgccgttcctgtcggagctcgccggcctcttcggagggatctcgctgccggtcaccctggcctacccgtgcttcatgtgggtggcgatcaagaagccgcggaagggcaccgccacgtggaacgtcaactgggcgctgggaatccttggcatgaggcataaggccttgtcctcatagtcgggaacctgtggggtctcgtggagaaaggcatgcgtgtcaagttcttcaagcctgccgatttccagtgataaaaagatgcagatttgtcactcagttggattcgtaatcgtaatgcaatgcttttagatatgttgatttcttcctcaggaatgtataatgttgtgtacatattagcaatttgcaagaagcaacgtcgtctgaaaaaaaaaaaaaaaaggtactcgtggtcgttcctcgtgccattgtgccttttgctcatttttttttctttatttatgcgctttatat

SEQ ID NO: 1932 - DNA, 7110 bp, Zea mays
  Clone ID: ZEAMA-23APR03-CLUSTER1632_20
cttgcaggctatccatgatttttgcctacaaaaggtgattgaaaaggggggaggatggaaggggagggacaccacggagttgttttggcatgcagcatctgtgggttcctcttcgctgtccttagccctttcagcttttgggttttatgggctgtgaattggaggccatggaggttatacagttggatatatgcaaggaaatggccaacatatgttcaaggacctcaattgagcacactttgcagccttttgactctttgtgcatggcttgttgtcatttcccctatagcagttctgctcgtgtggggaagcgtccttattgctcttctggaaaggaatataattggtttagctgttataatggcgggtgttgctttgctcctgtcattctactctataatgctctggtggagaacacaatggcaaagctcaaaggctgttgcttaccttctcctcctggcagtaggcctgctatgtgcctacgatttttgtgctatttatgtgacagctggtgctagtgcttccgagcttaattctccatcagggttcttcttcggggtgtctgtaatatcattggccatcaatatgctttttatatgtaaaatactgtttaatgtaagtggatttgatgttgatgaatatgtgcggaggtcatacaaatttgcctattctgactgtgttgaagtggctcctgtttcatgctctcctgagccaccggatcctagtgaattatacatgacaaaatccagcagggtcaagcatttagggcttctgtacattagctctctgcttgtgcttgttggttattccatcttgtacggtcttacgtcaaaagaagctcgttggttgggtgctttaacttcagttgcagttgttatccttgactggaatctgggcttatgttcatttagatttgagcttcttaaaagtaggatgatagtgttatttgtggctggaacatcaagggctttccttgtatcctttggagtgcattactggtaccttggccattgcatcagctatgcttttgtagcatctgtgcttttatctgctgctgtttcttcctggctttctatttcaaacccctcagttgcaaggatagacgctctaagaagtacggtaataaagctacgagagggatttcgaagaaaaggacaaaatagttcttcaaattcatcagaaggctgtggctctagtgtgaagcgtagtagcggtagtgttgaagctggtcaaaatggtaatgcaacggattctatgtacagaagcaactcacaaagcgatggtgtcaattggagcagtattccttttgatcgatcaaacagttgtcaagaaggccggagctccgacaagaacatagatagtgcacgtgcaagcttagctcatcggagtaattcatgcttatctgccgtccaagactctgaaaccgctgttgtttcagtagataggcatggagatcccactacttcacttgtttgttctagcagtggtttggaaagtcatggctgtgagcctagtggatcagccaccacctcaggtaatcaacagctattggatttgaacctggcagcgatatttcaggacagattaaatgatccaaggatttcatctatgctaaaaaagaatggtggacttggagatgtagaactggctaatcttcttcaggataaaggactagatccaaatttttcgtacatgctgaaagacaaagttatggatccacgtattttagctttgctacagaggagcagcttggatgcagatagagagcatcaagatgacgtagatgtcacagctactgattcagatagattggataccactattgcaaatcagatttctctgtcagaagaactaaggagaagtggtctagaaaaatggttgaacatttcaaggctaatattccatcatttagctggatctccaatacgtgcttttattgttttcacagtaatgtttataatagagactgctactgtggctatctatcggccagagaccatcaaggtgataaatgcaacacatgaacagtttgaatttggtttctcgatactgcttctgtcaccagttgtctgctccattatggcattcatttggtctctgcgtgctgaagaaatgttgatgacatccaagccccagaagtatggtttcattgcatggctactgagcacatgtgttggtttgtttctctctttcttaagcaaatcatctgttatattgggcctgtctctcacggtaccacttatggtggcttgcctctcatttgctgttcccatatggatacgcaatggttacagtttctggattcctggaagggagtttgcaaatcgtgaaaatgttagtcaagctccaggagagaaagagcgggctctctttgttatcaccattgctgttttcactgcatcaattattggccttggtgcaatagtgtcagcaaagcctttagacgctctaggctataaaggatgggatgctgataagaacagctcctattctccctatgcaacatcaatgtatcttggatgggcattgtcttcaacaattgctgtgattaccacagggttgatacctattgttgcttggtttgcaacataccggttttcaccttcatcagctatatgtgttggcctctttgcaactgttcttgtgtctttttgcggtgcatcctactggggagtggtaaattcacgagaggatggtgttcctctaaaggctgatttccttgcagcattacttcccttgctttgcattccagcatttttctcactgttcactgggctttacaaatggaaggatgatgattggaagatttctcgtggtgtttacctttttgttggcatgggaatgttgctgttgtttggtgcagttgcagctgttattgtcacaatcaggccctggactgttggagttgcttgcctcgtagccattctgttccttgtatttgttattggggtcatccactactggacatctaacaacttctatctaacgaggactcagatgttgcttgtttgttccattgcttttctcttagccttggctgccttcctgatgggtttatttcacggaaagccttttgttggagcatctataggttatttctcatttatatttcttctcactggaagggctttgactgtccttctatcaccgccaatcgtagtgtattcgccaagagtattgcctgtatacgtttatgatgctcatgcagactctgctaaaaatgttagctatgcctttcttattctgtatgggattgcattagcaactgaagtttggggtgttattgctagtctaataatgaatccaccatttgttggggctggcgtttctgctactactcttgtaattgctttcagttttgctgtttctcgaccatgcctgactcttaagatgatggaggatgcagttcattttctcagcaaggatacagttgtgcaagcgatgtcacggtctgctaataaaactagaaatgctatatctgggacttactcagcacctcagaggtccgcaagttctgctgctcttttggttggagatcctgctcttacattggacagggctgggaactttgtgcttcctagggctgatgttatgaaactgagagatcgtttgagaaatgaagaaattgctgcaggatctttcttatgtggagtaaaagattgtttactaatttgcccccagtccctgtcaaacatagattatcggaggaatatgtgtgcccatgcacgtattttggctttggaagaagcaattgatacagaatgggtgtatatgtgggacaaatttggtggttatttacttctgttgcttggattgactgccaaagctgaacaaatacaggatgaagttcgtctaagactctttttggatagcataggcctttccgatttgagtgccaaagaaattaagaaatggatgcctgaagatcggaggcaatttgagcttattcaagaaagctacataagggaaaaagaaatggaagaggaggctttgatgcaaagacgagaggaagaagggaagggaagagaaaggaggagggcattgctagagagagaggagcgaaaatggaaggagctcgaaatatcattgctttcttccattccaaatactggaagcagggatgctgcagctatggcagcagctgtcagagctgttggaggtgattctgccctggaagattcttttgcaagagatagggtctcttcaatagccaatcacatacgaaaggcacaattggctcggcgagcagaacagactggtattccaggcactatatgcatactcgatgatgaaccgaggagtactggtcgtcattgtggagaacttgacttgtgcctctgtcaaagtcaaaaggttactttgtctattgctgtcatggttcagcctgtatctggcccagtgtgtctttttggaagtgaattccaaaaggtttgctgggaaatcttagtggcaggatcagaacagggtatggaagctggacaagttggtcttcgattagtgactaagggtgaaaggatgactactgttgctaaagagtggaatattggtgcgtctagtattgcagatggcaggtggcatcttgtaactgtaactttagatgccgacctaggtgaagcaacttctttcattgatggagtttatgatggatatcagaatgggttgccgttgccaacagataacggtatttgggaacctggaactgatatttgggttggtgctaggccacccatggacttagatgcctttggtaggtcagatagcgaaggttctgactcaaagatgcagatcatggatgcttttctatggggaagatgtctcagtgaagatgaggttactgttttacatactgccatgtctcctgctgagtatggattttttgaccttgcacccggcgatgcttggcatggaagttattctgcaagggtggatgactgggaaagcgaagaagcttatgagctttatgatcaaggggatgtcgaatgggatggacagtactcaagtggtaggaaacgtccggtacatgatgctgtagctattgaccttgactcctttgctaggagaccaagaaaaccaaggtttgagacacgtgatgaagtcaaccagcgtatgctttctgttgaaagggctgtcagggatgctcttatcgcgaaaggagagagaaacttcactgatcaagagttccctccagaggatcgttctttatttgtagatccgatgaatccacctctgaaactgcaggttgtttctgagtggatgaggccttctgacatagcaaaggatatatctatcagttgtcagccttgcttgttttcgggttctgtgaattcctcagatgtgtgtcagggtcggttgggagactgttggttcctaagtgcagtcgcagttttaactgagatgtctcggatatcagaagttataatcactcccgagtacaatgatgaagggatttatacagtcagattctgtattcagggtgagtgggtggccgtggttgttgatgattggattccttgcgagtctccggggaaaccagcatttgctactagtagaaagcaaaacgagctttgggtatccattcttgagaaggcttatgcaaaacttcatggctcttatgaggcattggaaggtgggcttgttcaagatgctctagtcgatctcacaggaggagctggtgaagagattgatatgcgaagtcctcaagcccaacttgatcttgctagtggaagattgtggtcgcagttgttgcatttcaaacaagaaggttttcttcttggtgctggaagtccttctggatctgatgctcacatctcatcaagtggcattgttcagggacatgcgtactcaattttgcaggtaagagaagttgatggccacaaactcatccaaatcagaaatccatgggcaaatgaagttgaatggaatggaccatggtcagactcgtcaccagagtggacggaacggatgaagcataagctcatgcatgttccacagtcgaagaatggggtattctggatgtcctggcaagattttcagattcactttcggtcaatatatgtttgtcgtgtttatccacctgagatgcgttactctgtccatgggcaatggcgtggctacaatgcaggtggttgccaagattatgactcgtggcaccaaaatccacagtatcgacttagagtaacaggacgtgatgcactataccctgttcacgtttttattacccttactcagggtgttggtttctctagaaagacgaatggttttcggaactaccaatctagccatgattcttcaatgttttacattggaatgaggatactcaagacacagggctgccgtgctgcttacaatatctacatgcatgaaagcgctggtggaacagattacgttaactcgagggagatatcatgcgaactggtcttggatccttatcccaaagggtacacaattgtgccaactaccatccaccctggggaggaagcaccttttgttttgtcagttttttcaaaagcatcaatcagactagaggctgtttagttcaagattgagatcccatgtgtttgatggtagctgcgtctgctgggcacccgtgcacgcaggatccagctgtgggttctcgggaactagataatgggtataggaattgcctcctggacaacttcaatcaatcttgctgcatgcaagtacctaagttcggttgcttgttgcagatctgacaaacggcaatgcttcttgtgctgaagggaaaggagagaaggcatgatccatggttctttggtagctgcgcaaagtgcagggtgagaggcttggttcaatgtttgtagatagccgtggtaactgacctggtagcccatcctatgtataggtgtcccgtttaccctgtaaatgctatagagttaggttaggtagcctgtcgttcctgttaacgcatagggctcttatgcagctgtgaaatgtcttgttagcaagctgcagttttgctgatttgagcgtggagtagtcggccatagctgttcccattggtttgccctgtatgtaatcggaatctgatgtcattcaatgaacctattttttgggtgccatgcgaagctgtctaaaaaaaaaaaaaaaaaa

SEQ ID NO: 1933 - DNA, 1470 bp, Zea mays
  Clone ID: ZEAMA-23APR03-CLUSTER16337_1
aactccaaacctccttgcccctacgtgactcgccttcctctcctgactcctccgccttggcccgccgtctctcgccgccccggccccaacccctctcggactaggtgagggggccggctgcccagcgtcgtcgccggcgagatcttcccaccgccgctggcaatggctgccccgcacgacgaggccgcggcgtgggcggaggaggcggcgcgccgggtctgggccggcgccgtgccgctccaggtccacctccacgacgccgacgtcaccgcgctacccccgccgccgcccttcctgactttgggaccaagaattgggtatttgcccctcttgatacctgttataagggctcatttcagcaatgcactcccacctggtgttgacactgtttggtttgaatataaagggctgcctttgaaatggtatgtaccaattggtgttctttttgatcttctatgtgcagatccagaaagaccatggaatctaatagtccattttaggggatatccctcagaaatcttgtcaccatgcgagggtgaagatagtgtgaagtggagctacatgaattccctgaaagaggccaccttcatcattactgggaacagtaagagtgtgatgaatatgtcgcatgctgatcaagtcgctctgtgggaatctgtaatgaaaggtaacttagatgggtataaaaatatctccaccaggcttaagcttggaccatttgaagatgatgtgttagtacggacagcctccgtggagcggcaacgtcaacaaaattctgatgaacctgaatctcctggatctagcaaaccgtgcagggtccctgttcgattatacgtacgcaatgttcaagaagaccttgagtacatagaacatgcagttcctgtcagtgactgggaaaacgtgtcctacataaatcggccatttgagactcgcaaggctgaaggtagaagctacatcaccctggaacatgcgttgcaaacattgcttccggagttcttcagctcaaagcccccaggcagcgctgacggctcccaacacgcaggcgcaatggacgcagccgcagacagttcagatgccaccaactcttcaagtcgttctcaggaggcagagcaagccctggcaagtccagcagaggcgggttctgccaagagagcgaaagtgaagctggtgagggtgcaaggtgttgagctcgacatggacatcccgttcctgtgggtcgccgaccacctcaagaaccccgaatactacgtccacatctgtgtatacgtcggcactagaaaacaatagagataagagtacatggggaaattgttagatactgcgttaggagtgtgtcccagaaatcattttctttgttctttggttattacatgtgctatcctgtgtgcagatacagacgctgaaatttgtaacccttttggatgcacagtcatggaaggatggaattggatggcgaaaaaaaaaaaaaaa

SEQ ID NO: 1934 - DNA, 1912 bp, Zea mays
  Clone ID: ZEAMA-23APR03-CLUSTER163427_1
aacacagcgccacgccacacgcaacgcaacagcctccttcccccttccccccccgcaggccgcagcgcccatcaaggccgagaagccggtggcgcgcgcggagacgatgaaggcccggggcgcgggggggggagagaagggccgcgggcgcagggggcggggcagggggttgaggggggtgtgtgtgttctgcgggacaagcgggtgtgcgcgttctgcggacggggaccccgccggcgcgctcggcaaggagctggtgtcgggggaggtggatttggtgcagggcggagagagcggggggctcatcggggaggtctccgaggccgtgcacaggggcggcggccatgtcattggcatcataccgaccagtctcatgggaaaggagatcaccggggagacggtgggcgaggtgcgggccgtggcggggatgcaccagcgcaaggcggagatggcgcgcaactccgatgccttcatcgcgctcccgggtaatcctcctgcctgttgcatgatcaccgcccctagctccggacactagctagcagccggcagcaccgttgagccatgcatgtacggtatatgggtttgttattaattgcaggcgggtacgggacgctggacgagctcctggaggtgatcgcgtgggcgcagctgggcatccacagcaagccggtgggcctgctgaacgtggacgggtactacgacttcctgctggcgttcatcgacaaggcggtggacgacgggttcatcaagccctcccagcgccacatcttcgtcagcgcccccgacgccagggaactcgtccagaagctggaggtatgtatagtttagattgatttggcgaatcatcatcaccatttaaagtcgcttggtccgcctgggtccgcttggtgccgctgcatgccgccacgggactcgctggccgtccttgatggatgatgacttggtcaggcctggcacgacggcacgcacggcctctttttttttggtctggtcgtcatccaaacagaacagccacacacaggcggcgcggcagtgtcacattccacgctcgcctgctttctctctgcctgctgcttgctgctgcgctgccctgtgcgcaacggcatcggttcctttggtttccacacgcacgcacgctccccaaaagcgtccacagactgagattatgcttctcttctatctttcatttcacctctacgtacactcgctagagatgaattgaaacagtcttggccggtattgcatcttaagatactactcgatggtgaaaacagtgatgagtttctctgagcgtacacgcaggggtacgaggccgtgcaggacgaggacccggcgacgcccaagctgcggtgggagatcgagcaggtcggctataacgcctcgctcctggccgagatcgcccgctgatcggccgcgcgacgatcgctgctgctgcgggagctctggtggctccagtccacgcatcgtctgccggccaggccactggcctccacctgctgctatctaccctacccctactaccccatcgatgatcgatgcgatgatcctgcgtatcagatcaacagaagcacgcattcatatgtgtgtgtttctcaagtgtgaccgcagaaacggggcaccggtgagcaagacgcacgcgaggacttgttttttttaggggtgtgcgttctgctcctagtcctagcagctagcagcggcttgatcgtcctgccgcatgtactctgctcctagccacgtactcgtacacatattcctgatcgacgatcacgtgtttgtttactacccagcagcagctagtactaatgtactaagttaatcgtcgtcccctggtaatgtaactgacctccagctccagctagctagctgcgacattattctgtgctcaaaaaaaaaaaaaaaagcccctagggcc

SEQ ID NO: 1935 - DNA, 1662 bp, Zea mays
  Clone ID: ZEAMA-23APR03-CLUSTER16403_6
gcacgagaccattacctagaacatcctaatcgaaaatacccgggcaccaaactagccctcagagggtgtttggttccctgactaaggtttagttcgtgtcacatgaaatgtttgaatatcaattatgagtaataggcttaattaggtttaataaatttgtatcgtcttttagtcttcgtctatgtaatgagttttataattagactatatttaatactcgtaattatcatagaaccattcgaggtgatcgggactaacctttacctgggaggaccgaaacacctcggtattaatagggcatgcgtgtacttaaattttttttcgagtggagaaaccaccagatttcctatactgagtaacccagtggcggacatgggaacatcaaagccggtgcaatcacgttatgggtctgccacggggttcagatctcaggcatatccaagagagttcagggagggggtgcaacctatgaaagctagataaatgaaatatggtatattctctgaaattttttcatataggtgagtcaaaagtcaatctagcagttcggttatatagattgatgtaatatcaacatggcctggaaaacagggaaagcgctaaattgtagtgggctatgccggtcatatgcttatatgtttgatttctagtcttattagtatatcgtattgctatagttgcaggataaatctaatttacagtgaaatacttgactagataaatggacaactgcatttgttctaaattatgagtctcactgtctctttccaaggtgacagagataatgagatttaaaatgttgacctgcttatacatcttgatgcttaatatgtgctgtattattggtctattttcagttaaacattgagccactgtgtgcatcgtgtaatgcatgtcatatctttgtgatgatctttatgcaccatactattgtaatttgtaaatgcattcctttccaattgagaagctttgtctcactgcaaaatgctggggtaaggcttgcctcggttattccttacccaaaccctactggttctgtccttcctttccaatcgatggcagaaagttatcatctagttgaccaatggacttcagtaataataagctacagagatccaaagaatgaaatgagtcttgttatgtatgtttgcaatccataataaagtatggtcttacggtatatactcacttatcagctctcgttttgtgcagaccgttccagttaacccaaaaccttttctgaacaacctgacaggaaagcctgttattgtcaaactcaagtggggtatggagtacaagggttatcttgcttctgtggactcatatatgaatctccagcttgccaacactgaggagtacattgatggtcaattctctggaaacctgggagagattctgatcaggtgcaacaacgtcatgtatctccgaggcgttccagaggatgcagagatagaggatgcagagtgagaagatgcgatcaatgttagattgataaatgtaatatggttctgacatctatgttcgaatatgccggtgacaagtagatctatcggatcgctttgttctcttgagtgatgaaacatgatggcggtcgggctaagggtgaagctgctttcagttagactatgctgtcattctgctgaatatatatcagatttcttg

SEQ ID NO: 1936 - DNA, 1371 bp, Zea mays
  Clone ID: ZEAMA-23APR03-CLUSTER16415_7
acgcctgcacatccccactcctaaaaatagtagccggcggcatgcaaatacgataccccacgccttcttcccgttcatgatatggagctctcctcagatcaataatgggcctatatatgagacgcacgagcaacgccagttagcaaccagccaccactaccaaccctccagtctcagtctccgtctcctgctgagcaacaaggcttcagcagttcagagattctgctggagcctggaggaagcttctctacccaccactccgacgcggccgccgtcgacgagatcagccgcgccgtcgccaccaaaggcaaaagaagagatcgagctcgaggctcgagctcgagcaggcagcagggagggggcacccagatatatagatccccaaaaggtgcatgtaatcatcggctgcgtcgtcacgtcagtcgttcatgtgtttgtatctgattcgtggatgccagattaattgatggacctgtccccgaaccccgagagcccgggaagcggtggtgatggcggcggtggcggaggcggagccgggggatcgagcagcggcggggcgtctccgtcggggggcttcggcacgccgcagacgccgagccggtacgaggcgcagaagcggcgggactggaacacgttcgggcagtacctgcggaaccaccggccgccgctgagcctggcgcagtgcagcggtgcgcacgtgctggagttcctgcgctacctggaccagttcggcaagaccaaggtgcacacgccggcgtgccccttcttcggccacccgaacccgcccgcgccgtgcccctgcccgctgcgccaggcctggggtagcctcgacgcgctggtcggcaggctgcgcgccgcctacgaggagaacggcgggcggcccgagaacaaccccttcggcgcgcgcgccgtcagactgtacctccgcgaggtccgcgaccatcagtcccgcgccaggggcgtcagctacgagaagaagaagaagcgaaagaaggccccgccgcaccccgtccctgccgccgtcatctcctcctcccacgacggcaacggacaccactacgagcaccagatgccgccgccaccaccgcccggcgcagcggcttgactagccggccggccccatgtatgctactactaccactgtaccacatgcactactggtcgatctctctagctagctgaagctcctgtcaccgactactatatatggagtacccatctatctatctatagttattggcttcttgctactgtatatctatcgatcgatcgatcgatctgtagttatagtttagcgcgctgccactactagtacaaagacaaaccccctgctgctgctacaaattacttagccggttgctctttcatatg

SEQ ID NO: 1937 - DNA, 1722 bp, Zea mays
  Clone ID: ZEAMA-23APR03-CLUSTER16430_3
aaaaatagtccaattagttgatactttatcaaataaccccctaaatggcattttatctgtaatccagtgtttgaaaatggcgtaataacgaagcgtgttctcataatggcattcgagcgaatccgtagtttgataatggcataaatccaattttctcctccaccgagccggccgaatcaaatcgaaccgcgggcagcgcgcacgcgcagcgactgccggcgatggcgagcctcaccctgccgccggcgccccccaacccacgccaggacgccatcgacctccacaaggccttcaaagggtttggatgtgacagtacaacagtgataaacatacttactcatcgcgattcggtgcagcgtggactcattcaacaggaatacagggctatgtatcatgaggaactctcccaccgtatttcatctgaactcagtggaaaccacaagaaagctatgtcgctgtggattcttgatcctgctggacgtgatgcaactgttttgagagaagctctaaatggtgacactatggatctgagagcagccactgagattatatgttccaggacaccatcacagttgcaaataatgaaacagacttattatgctagattcggtacttatcttgagcatgacattgctcaccacacatccggtgatcaccagaagcttttacttgcatatatggggattccacgctatgaaggtcccgaggttgatcctacaattgtgacacatgatgcaaaggatttgtacaaagctggtgagaaaaggctgggtacggacgagaagatttttatccgtgttttcactgaacgcagttgggcacacttggcatctgtttcttctgcttaccatcatatgtatgaccggaaattagagaaggttatcaagagcgaaacttctggaaactttgaatttgcacttttgactatcctcagatgcgcggaaaacccagcaaagtattttgctaagctcttacgaaaggccatgaaaggtttaggcactgatgacatgacacttataagggtggtggtgacgaggaccgagattgacatgcaatatatcaaggcagagtacttgaagaagtacaagaagccattagctgaggctatcaactccgagacatcaggaaactatcggacgttccttctttcacttgttggtcatggccattaggctatgtttcgaccatgggacatgatatttctatcgatccaccctaaatgcagcgacctacctggaaaacttatgatgttgccatttatctgtcgtgactcctggatctaactgccacatatcacatatgcggttcctagtatgcttgtttaaagtattcgtgtatatatttccatccgggtttcttgttggaagattctggatgggataccagatcagctgttgctggtcacagtgggcttgactggtgtctctatgacgccaatattattatgtcatgttcttgtggtatttccttcatttgttattctgtttttcgctgcttatcccatatccctgttttctccgtccttcacggagaccaacgtcttaggacataacccagagatataggggtacgtttcttggagtataaaagataggttttgtatcttattgtaagatatgactcatacgagggttgtatatatgaagctgtttgttggacttaaaaaaaaaaaaaaaaaaaaaaaaaaaaaaaaaaaactcgaggggggaacccgggtaccca

SEQ ID NO: 1938 - DNA, 1552 bp, Zea mays
  Clone ID: ZEAMA-23APR03-CLUSTER1647_13
gcacgagaccattacctagaacatcctaatcgaaaaaagtcgcatcgcacgccatcagcagctagcgcgctcctcgagcccagcagagaaaggccggcagcgctaatcgtaatagccatgggctccaccgccgccgacgtggccgcggtggtggacgaggaggcgtgcatgtacgcgatgcagctggcgtcgtcgtccatcctgccctgaagaacgccatcraactgggcctgctggaggtgctgcagaaggaggccggcggcggcaaggcggcgctggcrcccgaagaggtggtggcgcggatgcccgcggcgcccagcgaccccgccgccgccgcgscattggtggaccgcatgctccgcctgctcgcctcctacgacgtcgtccggtgccagatggaggaccgggacggccggtacgagcgccgctactccgccgcgcccgtctgcaagtggctcacccccaacgaggacggcgtgtccatggccgccctcgcgctcatgaaccaggacaaggtcctcatggagagctggtactatctcaaggacgcggtgctggacggcggcatcccgttcaacaaggcgtacgggatgacggcgttcgagtaccacggcacggacgcgcgcttcaaccgcgtgttcaacgagggcatgaagaaccactcggtgatcatcaccaagaagctgctggacttctacacgggcttcgagggcgtgtcgacgctggtggacgtgggcggcggcgtgggcgccacgctgcacgccatcacgtcccgccacccgcacatctccggggtcaacttcgacctgccgcacgtcatctccgaggcgccgccgttccccggcgtgcgccacgtgggcggggacatgttcgcgtccgtgcccgccggcgacgccatcctcatgaagtggatcctccacgactggagcgacgcgcactgcgccacgctgctcaagaactgctacgacgcgctgccggaaaatggcaaggtcatcgtcgtcgagtgcgtgctgccggtcaacacggaggccacccccaaggcgcagggcgtgttccacgtcgacatgatcatgctcgcgcacaaccccggcggcaaggagcggtacgagcgcgagttccgcgagctcgccaagggcgccggcttctccgggttcaaggccacctacatctacgccaacgcctgggccatcgagttcatcaagtgaatacggctaccaccgtcgccgcgatgagatgcatggctgccacatgcatgcttgcttgcttggtcctcgtatcgtacgtcgccgtcgtcgtcttcttctggttgcgctgctaccttgctgctctcgccctcgcgtatgcatgtacttttgcttaattttctttcttcatatcatgcactctggctggcctagactgcccccgatccatggtggccatgtcttcggtacgtcttgtcgagctcttgcatgtcgtggattctaaattcttcttctgcgtcgaattgtctctgccatgtgcgagtaataacaatcaaggttatacttaccatacaaaaaaaaaaaaaaaa

SEQ ID NO: 1939 - DNA, 2616 bp, Zea mays
  Clone ID: ZEAMA-23APR03-CLUSTER16551_3
accgcaccgcacaatcgaccgtccccgcgacggtccagactgcagagagaccagaccccaacgccgctcgcgttcgggcgcggcccttcccccgccgccctcaccaccctccctccccgccgcttccgccccgtaggacgcggccacgttcgccgcctcaaactgttggtgctgtggctggggcgagaggagcggcggcgctagggtttcccatggacggcggcgaggatcggacgttcaaggcgaactttaccggcgagggggtgacgatgctgcaggaccgcgtcaaggagaagctcagggagctcatgggcgactactccgacgacacccttgccgagtatgttgtagtgttgctaaggaatgggagacgcaaggatgaggctgcaaaggagctacaggtttttttaggcgatgacaatgatgcatttgtatcctggttatgggaccatctgtcctcaaatctgcacctttatgttcatgctaaatctgcctcttctaaggatgatgttaaaagcactcacagtgctgccagaggattgcctgttcacagtgtgacaagcagcatgcaagttaatcatgaacctgaagctgaaacccagaagacagtggtgactcataaaaaaagagattggggtcatcaaaaaagagattggggaacaattgatcgaggtcaatcagaagcagttcctcttagaagcgttgtagccaatgtttctcatgtggatgaaaaggattttcacaaatcacatgcagatgaaaaggcttttcataaatcacattctctaagacgaacccgctcgcctgacatgcataaccacagaaagaggagcagagaggcagatgtgcagtctaccaagaggtcatcccacccagttgttagtgcaccacgtcggcttcttcagtttgctgttcgtgatgctgtcagaactgtgcagccagttacttctagttctgaatcagattccaagcgtattcgttctgtagtgtcaacattggcatcagattccacacttgatatcactcatattaggttacagaaaataaattcagatttgagagtaccaggtgccacagcagcactaagagctgcagctgaggctgctggagatgctctcaaggatagcttttctagaagtgtttttagtagattgggcagaatgcccacaataaattctactgaacaatcaccttatcacagagaacaagatctcaaaggcaaagaatatgagaatatagataatatacaagcagaaaatcaagttgaatttgacgaaagaaatcaacatggtggcagcgatgtttacatgcgcgatcagagaacagaggaagctactggttttattcccaatattgatgagtatgatcagaacagtgcagttaggtctaatggattgggttctcgccaaagcgcattgcctgctagtggaggtaaagagtcattagtactggggtatgtaagaggagcttctgaaataagaagcagaagattgatagcccaggggccacatgctggttcaggaccaagaccatctgaaaagacccaaaatgtttctggtaacactaacatgcagaagcttccaattcatgtaactggagatgccgttgcatttgatcatcaagtgccaatggagaaggttgctgatgcaaggaaatcacatgtgaagaccgcacaggctaatgatgtatccatgatgactgataagtccaaagatttgatacagccgagttcaatgctgcaggcacagaaggcttctggtgctgctggatcaaatactacaggccaacctgaaggtggccctgattctagaactgtctttgttagtaatgtacattttggttcatcaaaagatgctctttctcgtcacttcaataagtttggagcggtcttaaagacccatattgtgactgatggtgtcactggtcagtcaactggctcagcatatattgagtttttgcacaaagaatcagcagaacaggcattaaccctgaacgggacatcatttatgtcacgcattttgaaggtcgttcggaaaagctccactgaagtaacccagctgcctgtcttgccccgtgcttcttggggatcaccatttgcttcaaggctcattagaactgcatacccaaggccgaactatcccggtgcaattcgtgggcgactatcactcaggggtgctgcccggagtttacagtggaagcgtggtgttgctgattcaggagatgttggaaaacctagtccaactgcacctgggaatcagttggtcaccccggccacacgaaacttcacctacacacgcacggagccaaaaacaaatgcgggagcgatggcatgactgatcagctgtagcatgccgcagcgtcgcagaaagagatcgtgattgatgactgtttcgtagtccattcagctgcttttggtaaatatttaagtagctgcagatcttagtttgtagcaggctggtttttgtggacctcaaccttgagtaatattctgtgaggttttctgtgctgatttttcaccgtcagcacacccgttgttctgctggctgttcggagttcgtggatagagggtaaaatatataaaaagtagttttaaatgagaaacaaaaaaaaaaaaaa

SEQ ID NO: 1940 - DNA, 1860 bp, Zea mays
  Clone ID: ZEAMA-23APR03-CLUSTER16562_1
acaactacttcactcgctcgctcgtgaagcgtctcgctgccctgcccccaccgatccaccacccccccactcatcacccctcagccaccgcccaccggccatgtcgtcgccgtcggtagccagcctccgtctcccgatgctcccagcgtcgccgcccctctcccgccgcgctatcgccggagttaccccgagcgcggccgcaccccgcgctcttctcctacaacccctcgcgcccaaggcgctcgcggcgtaccaccagcctgcgctcctcctccaccagcgacgccggcatggaccgccccccgtcgccgctgtcactgcctccaagccggttctcaaggacccgaagaagtaccaggagtgggactccatgacggccaagttcgctggcgccgccaacatccccttcctactgctccagctcccgcagatcgtcctcaacacccgcaacctcctcgccggcaacaagaccgcgctcttcgccgtgccgtggcttggaatgctcactgggctgctgggcaacctctcgctcctctcctatttcgccaagaagaaggaaacggaggctgtcatcgtgcagactcttggcgtcatctccacctatgcggtcctcgtgcagctcgcaatggcggagtccatgccggtgccgcagttcgtggccacttcggttgttgtggccgcagggctcatcctaaacttcctcaactactttggctggatccctggaaccctcttgctgctgtgggaggatttcattacagtcggcggccttgccgtgctccctcaggtcatgtggtcaacttttgttcccttcatccccaatagcgtactgcctggcataatctctggttctttagctgttgcagctgttgcgatggcaaggatgggcaagctttccaatgcaggggttaaatttgttgggtcattgtctggttggacagccacacttctcttcatgtggatgccagtggcacagatgtggacaaattaccttaacccaagtaacatcaaagggctgtcagctttcagcatgttgcttgcaatgcttggaaacggacttatgattcctcgcgctgtattcatccgtgatttgatgtggttcactggttctgcatgggcatctgtcctacagggttggggtaacctggcgtgcatgtactgctttaatagcatcagcggagaagttttctttgcaacatcagctggtctgcttctatggctaggatttactctatggagagatgccattgcctatggcaacagctcgcccttgtcttccttgaaggagctgttttttgggaagtgatgaaccgtcggcaaccttgtttctcttgcactttaagcagctaactgttcccgggtaggacgctctcctgcaataaatcatggtagctgttaagaacggtggttcagttgctctcatatggtctgaagaaacggtgcttcagtctttagcattttgaggaggaaacgtgaaacttactggtcagctgaaggctataaacattgccatggccctggactggaagccccaactttcccaagcctgtagaaagcgccgtgtgcctctacagaagccaccgcgtgatgaccagcttcatccggcagggtgggtacagtagcaagctatagccctagtctgatgtaagaacaaatttatattatccatcccatattgtctttaattagattcttttttgaaaccaatgcaatttcagctcttgctgtcgtgcgaatttgtaccattgtccatggatgagtagatgacctgggagaatcacacaatacatattgtaattgtaaaggctctcaggcctactggctatatatataacctatagttcttaggaactaatcatc

SEQ ID NO: 1941 - DNA, 1204 bp, Zea mays
  Clone ID: ZEAMA-23APR03-CLUSTER165_2
ataggctaacatttgggttcatatgtgaagcaggaagtccgccgtgggcgtttgccataaacttttaaaaattgtatcttctttttgacgaggggaggcgtgtgccagagcgagctcgcagtcgccgtccactccgttgagctttttctcaggcttcgcatggcctgattcatcctacagtctccaacaagccaaggaaacgccgcaccgcgctttctccgcttccttccactcagagggtctgaccccaacgccgggagaataggggattaggagccagacctggcggcgccgggcgtccaagaaacgctgcctaataaaatccctccggcgtctgtcgtcttgaccgcggcgacgcaggcttcttcttttcgctctccacggcagcgtcatgaagattaaggggaacttgcatgtttgatgtacctctgtagcaaaaaattcttgtgataaaatttgttgaattagtcactgtcagggagggatctagttgtcagttgtttgtaaagctgctggcactttccttgcagggtatctgtagaataaatgggagaagcacacttggatgaatgttgtcattgccaggggtgtgctggcaagtatacactactcagagatgaagaaaaccccacggtggacaatctttgagaggcggcttccttgctgtggttgtgggataggatggtcttcttttcttttagggttcttgtgtcctttgatttggtactttgcagccactctttactgctgtaagtactacaacaaggatcctcgagagcgccctgggctagctgcatcagctgttgcggcactcatcttcacagtcctagcactcatcgctctctctgtggcactgataatctatatataaaacgaggaatgaacttgcgcttgcttgaaatgcgtactcaggcactcatcttcacagccctggcaaccatacatcgctctctgtggcacagatcatctgaaacccaaagcgaggaaaacgcggtagctggacttggcattcagaaggaacttgtaatttcagtgatagtagcatatcgttgcaatcatccttcatgtatcgccatatcaagttgttgatttaaatgctgcaaccgtccctgttgtcggttgacctgtcggctgctgttgtctatcaacgaggatgatcattgctctatcgcaaactgtgtgctccgtgatctgtgatgcttct

SEQ ID NO: 1942 - DNA, 2744 bp, Zea mays
  Clone ID: ZEAMA-23APR03-CLUSTER1660_1
gcacgagaccattacctagaacatcctaatcgaaaaattatcgatcccagccccaggccatggcgacgaggtggaggaggtcgctgctctgggtcgccgtcgtccagttcctgaccctgtgcgtcgccgagcatctcgtagtggaagcatacaaaaagtcctacattgtgtatctgggatcacatgcatatggccgtgatgcgtcggcggaggagcatgctcgcgcaacccagtctcaccaccacctcctggcatcgatcctcggcggcgacgacgaccaccaccatgagacggcgcggcagtccatcttctactcctacaccaagagcagcatcaatggcttcgcggcgcacctggaggagtcggtcgcgcagcagatcgcggagcaccctgaggtggtggcggtgctggagagcaagatgctcaagctgcacaccacgcggtcctgggacttcatggacctggagcgcgacggtcacgtcctccctggctccatctggaaccacgctaggttcggacaggacgtcatcatcgccagtctcgacagcggagtgtggcccgagtcccacagcttccaagacgacggcggccaagtgccagctcgctggaagggctcctgtcaagacaccgttaagtacggtgtcgcctgcaaccgcaaactcatcggcgctaggttcttcaacaaagacatgctctttagcaacccagccgtggtgaacgccaactggacgcgcgacaccgagggccacggcacccacacgctctccaccgccgccggtggctttgtgccccgtgccagtctcttcggctatgccactggcacagccaaaggcggcgcgccgcgtgcgcgcgtcgccgcttataaggtttgctggtcgggagagtgcgccgccgccgacgtccttgcgggcttcgagtccgccatccatgacggcgccgacgtcatttccgtctccttcggtcaggacgcgcccctcgccgatgacgtcaagtcactcttccacgagcctgtcatgctcggctcgctccacgccgccatccacggtgtctccgtcatctgctccgccggcaactccggcccgtacgatgacaccgtcgtcaatgccgcgccatgggtcaccacagtcgccgccaccaccgtcgacagagacttccccaacgttctcaccctcggcaatagcgtgcgccttaggggaacgagcctcgagtctactacgctgcactccagcatgctctacccgatgatcgacgccgcgcgcgccgcgcgcaccacctctaacccgtacgacgcggccagctgcgggctcggcaccctcgaccctgctgccatcaggggcaagatcgtcgtgtgtcgccgcggcggcggaggcggaggcgacgtctcccgagtcagcaaggggatggccgtgctcgaggccgggggagccgggatgatcctcgccaacgacaggatggacggtgacgacatcgtcgcagacccgcacgtcctcccggccaccatgatcacctacagcgaggccgtctctctgtacggctacatggagtccaccagcaaccccgtcgccaacatctcacccgccaagacggaggtgggcgtcaagaactcgccgtccgtggcgggcttctcctcccgcgggcccagcgggactctgccgtacgtgctcaagcccgacatcgccgcgccgggggtcgacatcctggccgccttcaccgagtacgtcggccccacggagctcgcctccgacaagcgccgctccgagtacgccatcctgtccggcacgtccatggcctgcccacacgtctccggcgtcatcgctctcctcaaggcggcgcgccccgagtggagccccgccgcgatgcgctccgcgatcatgaccacggcgcgcacccaggacaacacgggagcgcccatgcgcgaccacgatggcaaggaggccaacgccttcgcctacggcgccggcaacgtgcaccccaaccgcgccgtcgacccgggcctcgtgtacgacgccggccccgacgactacttcaccttcctctgcgccatgggcatctccgcggcagacatgaagcggctcagcgccggcaagttcgcgtgcccagctaatagcgctaaggaggcgcccgccatggaggacctcaactacccgtccatcgtggtgccgtcgctgcgcggcacgcagacggtgacgcgacggctgaagaacgtcggccgtccggccaagtacctcgcgtcctggcgcgcgccggttgggatcaccatggaggtgaagccgagggtgcttgagttcagcaaggtcggtgaggaaaaggagttcaaggtgacggtgacgtcgcagcaggacaagctcgggatgggctacgtctttgggaggctcgtctggacagacgggacccactatgtcagaagccccgtcgtcgtcaacgccctcgcatgatctatccagttcgtgctaactagagtacactacctactactactacttgagggccttgtggatttttgtgacatcttagataagtagtaaggctctaaaatatatttttatttcttcttgttattattagtaaagaaatgagataggtttttttttgcttagctaaaagacatatcatctataataaattttggctctttgcatgggaacttgaattaatggtaaaaaactgcatataatataatgaagggaaaagggcacttctagtttcaaaaaaaaaaagaaaaaaaaaaaaaaaatgtcaatgta

SEQ ID NO: 1943 - DNA, 1713 bp, Zea mays
  unsure (1)..(1713): unsure at all n locations
  Clone ID: ZEAMA-23APR03-CLUSTER16616_2
atattccttgtcgatgcgactcccgccgcaccctcgctagccacctcctctccgtcgtcgcagcaccgtagctaggccgtggtcgcatcgttacatcctcccaaccgaggcaccacagctactcctcctcttccccccactgttgccataagcaggcgccagaggaggcatgcactgcggcgaggcatggagacggcggttaaaccctagcgagaaagctcggggtgaggcagcggatgctgctgtaggtcctcgagggccggctccgccgcccgcgcaaggcgctcatcgacctcgtcacgcttctcgtataaataaacagcaaccccctctcaatccaaatccaccaagcccactcctctgctgccgcattccaacccattcccatcgtcttcaacaaccaacccagcgccaccagcagcgccatcagcaggagagagatcgccggagccatgacaaggggcggcggaggcgacatgaagtccttctaccgtcagcagaagacgcacgccgccgctgctgccgccgccactaccaagcccactggtggcgtctccaagaaggcggcggcgcaccaccacaagaaggccgcgctcgccaccaacgtccacccagccccagatcacggcgctggcagccgccggaggcggaggcggagcagcgagagagggcgggccgcgagttcgacatggacacgcgctacgggccatgcctcgacgtcacccgcgcccagcggtggcgccgcgccgacgaacagccctgcctctgggagggtcgcgtctaggctactggcgggatggacattccttccccgcgtttcgccgacatgctccatcagtgttcagtactagctctgtgttggagatgcggtgtcgcatccatccgttctgctcccgtctaccgcatttcgtggtagcagtggcacccgtagtagtaccatctgtgcctgtcacaagaaggagaaaccgagtaacatatttgtcctgatcaccgtaaaaaaataggcatgttctgcacaaaaacgctaatgaagacgtaccaatgggatcttggttcatcggattgtacgtcgatgatcgccgtctttgctgcagcaagccaccggattgcgaatggaaagacgcaggcaggaacatgtgtgttgcatccttccactggagttgcagtggcatctgcaaatctgctgattggatcagtaaagtccatcaacgttgcgtgagagtgagaatgcacttttgggctgtgattccattgcaatggcatctgtaactgataagaaagctaagatggagagtttaatatcttctgcggcctttgtggagggtggcattcaggaggcatgtggtgatgcatgcaacatttgccttgaggttttctgtgagagtgacccttctgcagtttggtgtatccttctcagtgacaaagtaccttttaaaatgcactgcccctgtacactctgacatgcaagacaatggtatatggattggcttatttatgtatagtgagtcatattttgataggtttttggtacagacttatttagttaaaaacttatagtgacatctgtttgattttttacaatatgtacaagattggaagatcctctttatttttttgttcttctttatgatttgattgtcacaacatcaattttaaattagtgtcatatgttacctgcattctattttggtttgcccnnnnnnnannccacac

SEQ ID NO: 1944 - DNA, 941 bp, Zea mays
  Clone ID: ZEAMA-23APR03-CLUSTER16616_4
caaatcctccaagcccactcctctgctgccgcattccaagtttccaacccattcccatcctcttcaacggtcaacccagcgccaccagcagcgccatcagcaggagagagatcgccggagcccatgacgaggggcggcggaggcgacatgaagtccttcttccgtcagcagaagacgcacgccgccgccgccactaccaagcccactggcggcgtctccaagaaggcggcggcgcaccaccacaagaaggccgcgctcgccaccaacgtccacccggccccagatcacggcgccggcagccgccagcagggggaggcggaggcggagcagcgggagagggcgggccgcgagttcgacatggacacgcgctacgggccatgcctcggcgtcacccgcccccagcggtggcgccgcgccgccgcgctcggcctcgcaccgccgccggcgctcctcgccctctgcgccgacgaacagccctgcctctgggagggccgcgtctaggctactggcggcggcggggtgcacattccccgcgtttcgccgacatgctccatcagtgttcagtactagctctgtgttggagatgcggtgtcgcgtccatccgttctgctcccgtctaccgcatctcgtggtagcagtggcaccagtagtagtaccatctgtgcctgtcacgtgttgtgttgcctctagtatccacatgatgatgaacccttcatgtctggtgtgttgtttgtgatcagagcagaaatggcatgtcttccagcaacatggcatttctttcgtgtgttcttctgttgcagtttcattggattgttctagtactgctgaatactgcccagcatagtttgttctacattatacgacgaattaagtttgtactaagtttgaccaaatttatacagaactggatcaaacatccagtacattaactcgtttgagtc

SEQ ID NO: 1945 - DNA, 1204 bp, Zea mays
  Clone ID: ZEAMA-23APR03-CLUSTER1665_15
acaagcaccagaccaattaactagcttcttctagctctagctaggctcgtctgctgcaagaaggtaacagcgcaggcatggaggggaaggaggaggacgtccgcctgggcgccaacaagttctcggagcgccacgccatcggcacggcggcgcagggcacggacgacaaggactacaaggagcccccgccggcgccgctcttcgagcccggggagctcaagtcctggtccttctaccgccccggcatcgccgagttcgtcgccaccttcctcttcctctacatctccatcctcaccgtcatgggcgtctccaagtccacctccaagtgcgccaccgtcggcatccagggcatcgcctggtccttcggcggcatgatcttggccctcgtctactgcaccgccggcatctccggccacatcaacccggcggtgaccttcgggctgttcctggcgaggaagttgtccctcaccagggcggtgttttacatcatcatgcagtgcctgggcgccatctgcggccggggcgtcgtcaaggggttccagcaggggctgtacatgggcaacggcggccggcgcaacgtcgtcgcgcccggctacaccaagggcgacggcctcggcgcggagatcgtcggcaccttcatcctcgtctacaccgtcttctccgccaccgacgccaagaggagggcaagggactcccatgtgccgatcctggcccctcttccaatcgggtttgccgtgttcctcgtccacctggccaccatgggtatcaccggcaccggcatcaaccccgcgcggagccttggcgccgccgtaatttacaaccagcaccatgcctgggctgaccactggatcttctgggtcggccccttcatcggcgctgcgctggctgccatctaccaccaggtgatcatcagggcgatcccgttcaagagtaggtcttaaaggagccgatgctgctgcttcgagatgctgccggtcttgaaaggatggattcgtggctgtttcaaatgatcccctactatgttacgtggagttccattcctctttcaaagttcggagctgcttttatccgaacccagacttgtaattcatctgtaccaattgtgtaatatgccgcgcctctgttatgtgcaattcaaaattatgagacagcgagtcaagctttaagagttcatcccaaaaaaaaaaaaaaaaaatttgcggcc

SEQ ID NO: 1946 - DNA, 1266 bp, Zea mays
  Clone ID: ZEAMA-23APR03-CLUSTER1665_42
acgccgctgctccaagaaaccaccgccgagcccaaccgcacaagcgcgcgaggcaggagagagagagagagagagagagagagagagaggcggggagcaaaacaatggaggggaaagaggaggacgtgcgcctgggcgccaacaagttctcggagcgccagcccatcgggacggcggcgcagggcgccgctgacgacaaggactacaaggagcccccgccggcgccgctgttcgagcccggggagctcaagtcctggtccttctaccgcgcgggcatcgccgagttcgtcgccaccttcctcttcctctacatcaccatcctcaccgtcatgggcgtctccaagtccacctccaagtgcgccaccgtcggcatccagggcatcgcctggtccttcggaggaatgatcttcgcgctcgtctactgcaccgccggcatctccggaggacacatcaacccagctgtgactttcgggctgttcttagccaggaagctgtccctgactaggggccctcttctacatcatcatgcaatgcctgggtgccatctgtggagctggagtggtgaagggcttccagcagggactttacatgggcaacggtggtggcgccaatgttgtcgcacctggctacaccaagggtgatggccttggcgctgagattgttggcaccttcatcctagtctacaccgtcttctcagccaccgatgccaagaggaatgccagggactcccatgttcctatccttgccccactgccaattgggttcgcggtgttcctggtccaccttgccaccatccccattactggcactggcatcaacccagctaggagccttggcgctgccatcatctacaacagggatcacgcctggaacgaccattggatcttctgggtcggccccttcattggcgctgccctggctgccatctaccaccaggtgatcatcagagccatcccgttcaagagcaggtcttaagctgccgtggccgtgccgagacatgccagtccgaagaacgggcgtcttcctgtgatgtcttcttgtctgcccacgcctagtttctctgtcgattcctattcgtcgtctcttcagggctggtgctcactgctgcgccgttctgttaaccgaaacaagaactctgtgtattcctgtaccgagctgtgcatgtttttttttttttctttccatcgtggagaatttaagttattatccgtttgctgcaaaaaaaaaaaaaaaaaaaaaaaaaaaactcgagaaggggccggtacc

SEQ ID NO: 1947 - DNA, 1383 bp, Zea mays
  Clone ID: ZEAMA-23APR03-CLUSTER16664_2
aaccaaagctagctactttgttgctgtttttattcgtttgtcacataagcagtggtggtcggtcggccggcgacaatgagcggccgtgtgttcgtcctggccgctgccttcggcgtgctgctcgccgcagccgccgtgtcctcgaggcccgtcctgactccgctgggtactagccgccctgctgccggcgacctgtccgtgtacttccacgcggactcgtgcccgcagctggagacgatcgtgcggtccagcgtggacgcgggcgctccagcagaacgtccgtctgacggcgggtctcctccgcctcttgttccacgactgcttcccgcagggctgcgacgcgtccatcctcctggacaacggcgagcgcggcctcccgcccaacgtggggctgcagcaggaggccgtgcagctggtggaggacatccgcgggaaggtgcacgcggcgtgcgggcccaccgtgtcgtgcgccgacatcacggtgctggccacccgcgacgccgtgagcctgtccggcgggccttccttcacggtgccgctggggcggctggacagcgcggcgccggcgtccagcaacgacgtgttcacgctgccgccgccgacggcgacggtggacgagctgctgacggcgttcgggagcaagaacctgtcggacccggcggacctggtggcgctgtcgggcgcgcacacggtggggaaggcgcggtgcagctcgttcggcgacgtggcgggcccggccaccgacgacgtgacgcggtgcgtgacggcgacgtgctcggcccccgggagcggcgacacgctgcgggacctggacttcctgacgcccgccgtgttcgacaacctctacttcgtggagctgacgctgaggaagaacaagggggtgatgctgccgtcggaccaagggctggtgagcgacccgcgcacgagctggctcgtccagggcttcgccgacaaccactggtggttcttcgaccagttcaggacctccatgatcaagatgagccagctcaggggaccccaggggaacgtcggcgagatccgccgtaactgcttccgccccaacaccaacggcatcgccgcctctgcttgagttgactgaccaggcaccgatccatccgccggtgactgtcactcatgactcatcacttcactttcactgtgtctgtgtgtaataattaataataataaaacaacaacaacaaccccagcccgtacgtgccgtgtgaggggggcacgtggttgtgccgtcaccaccatgtcggcgtcgtccatgcatgtcgcattaccgatttttgttcatgttccgatctcatctcatcatctcgctatcaataacaattatactagtgtttttattaaaaaaaaaaaaaaaaaaggccccta

SEQ ID NO: 1948 - DNA, 472 bp, Zea mays
  Clone ID: ZEAMA-23APR03-CLUSTER1672_19
atatcgtgaacccgccgccgacgcagcagcaggagacgcgccaaggagagcccgcaaggaggcgactatgagggccaagtggaagaagaagcgcatgaggaggctgaagaggaagcgccgaaagatgaggcagagatccaagtaggctgatggggattgtggatggtggtgtgaagcttgagaggcctgtcgagggtgatgaggctatgcaggaggttgctgctgccgagtagtttatttgctacttctttatctagacgaatctggacaggaggtcccttatgacgcgaacttcataaaattgtctggcgacatgttttcttctgtccctgccctaaactctaaacccaaaggttattcgtaacaagtgttttaagattatttttgtttatgtttgggttcgaaaaaaaaaaaaaaaaacaaaaataaaaaaaaaaaaaaaaaaaaaaaaaataaaaaaaaaaaggggggg

SEQ ID NO: 1949 - DNA, 1084 bp, Zea mays
  Clone ID: ZEAMA-23APR03-CLUSTER1672_25
agagtcgtatataggtagtccgctgccccaaagtgctttctcccgcagagccgccgacaacgctctctaccgtccgagaccccaagcaccagcgcggcggcgggggcggcggcgaccatggctgtcggaaagaacaagaggatctccaagggaaagaagggtggcaagaaaaagaccgtcgaccctttctctaagaaggattggtatgacatcaaggcaccgtcggtgttcagtgtgcgcaacatcgggaagactctcgtatccaggacacagggtaccaggattgcttctgagggtctgaagcacagagtctttgaggtttgcctagctgatcttcagggcgacgaggatcaagcttacaggaaaatcaggctccgtgctgaagatgtgcagggcaggaatgtgctcacaaactttttggggcatgaattttaccactgataaactcagatccctagtgaagaagtggcaggacattaatcgaagcccatgtttgatgttcaagacaaccgacaactacatgttgcgtttgttctgcatcggcttcacgaagaggcgcccaaaccagggtcaagagaacctgctatgctcaggcatcccagatccgtcagatccgccgtaagatggttgagattatgatcaaccaggcttctacatgtgacctgaaagaacttgtttcgaagttcattccagaagttattggtaaggagattgagaagtctacctccagcatcttcccacttcaaaacgtcttcatccgcaaggtgaagatactcaaggcccccaagttcgatcttgggaagctcatggaggttcatggcgactacaaagaggatgttggtgtgaagcttgagaggcctgtcgagggagatgaggctgtgcaggaggttgctgctgccgagtagtttgtttgctacttctatatctaggctgagtctggacatgaggttgcttatgacgtgaacttagagttgtctacttgttttcatccgcccctaagattttgtctggaaacaagtttaaaattaagattattctcaacaagtgtttaagagcaaaaaaaaaaaaaaaaaaatttgcggcc

SEQ ID NO: 1950 - DNA, 1685 bp, Zea mays
  Clone ID: ZEAMA-23APR03-CLUSTER167444_1
ctggcaggggggcctcggcgcggcgcccgccccaaaaaccgcaccaccttcaacttttttttttttttttgggtttttttttttttttttttttttttttttttttttttttttttttttttttttttttttttttttttttttttttttttttttttttttttttttttaatcataccatggaattgagtcatgggatttggtgtgaggtatggattcatccaattcagactcgaattaaatctacgatgagatttcatcctttaacaaaacaagaccttaatcacctccttgatgactaaaaaactttagtcaccctatttacttctttaggggctaaaaatgactaaagttcagttagtcaccccaaaccaaaccccaaaccaaacaggggctaagtgagggtaaccaaccaagcatgcacaaaacaacataagatgtactttatcatgtgataagatacatttgaccatttgttgcaaaaggaaaataaaatgcaagggctactccaacaacctagtatacactacacaccgtatatgtacaaccaagaagaacagagaagacattcgccgtgggttcttagagtatgaaccatcaatcgtctatcagttcttaacggcaaacttatcatcacctcgtctgaaaggttatcagagcagcacgaattttgcagtacggccagaagccagtagtgtgtgcttcagcacagtccccgtgcagatattactactatgttcacgagatatcatcaggcggacatgtggaacagatttccagctctcaccaagagcaggcttgacagcaccattgccagctgaaaccatatgattggtcaccagaacagctagattatgctcataggctaacttctttagaatcatcgccagtgatatcatcatcgatcgcccttgtggatacttgcctccaataatgggagcaagtaaggatgatattgagtcaattataagtaagcaaattctcctgccgtcacctattaccttttcattcagtagagaaacttcaagttgatgtagtacttcaaacataccaaatatatcaaacacagactcgcagatgatgctttgcatcacagtcttgagcctctccttcgacagcaagtcaaaaccttttcgatcagataggtcgttagttccatcaattatggtggcaatacgactaggagagaaagaattagtagtatccaagtacataaccacacccatatgcttcactggagcatgtgaagcagaatgtagacaaacctgtgttttaccagaagatgatggtccagtaacctctgtgagctgaccttggcgcagcccgcccccaagaagtctgtcaatgccttcaagtccagtaggtaggacatgcttgttttcagtgacgtccttgagcaagtcgatcccactccaaattcgcccacaccgatcttccttagaaggctgatcttgattcatcgtctcctcctcctggtcgtgtggtgcgtagcggcgcttgagaccacagccggatgtggtggcttcccttccgccaccggccgccgccatgacggcgccgagtaactgtcttccacggacactaccgttggagacctccaccagcacgcggtgcccctggaaggtaaccactagggcaagataggacgcctgcccctacggaaccccctcgagccgctcgagccg

SEQ ID NO: 1951 - DNA, 1110 bp, Zea mays
  unsure (1)..(1110): unsure at all n locations
  Clone ID: ZEAMA-23APR03-CLUSTER16750_2
tcctatatactctgctcgcgtgctacgctactcatcgccccgagatccatcactcgcattctcaccggcgagctcagggctcagcatccgcgcgcctcctctccaagcagaccaccaccgccggaagcatggccgcgccgctgcttcggcaatggcgcagcctcgccgtgctcggcgccctcctcgggctccacctcatcgccgccgtggctcagtcgccgccaactacacccacgacccctgccgcaccaacgactccggccgcacccacgacccctgccgcacccacgactccggctacacccacgacccctgccgcaccaacgactccggccgcacccacgaccccggccgcacccacgactccggctgcaccgacgacacctatcgcacccacgactccggctgnacgcnncnacccntgncgccgcccgcggtgctcccacccgccgtgctgccgcccgccgcggcgcctccgccgacggcgacgcctccggccgaggcgcccgcgtcgctgcctcccgngacgacgcccccgcccgtggccgaggcccccgcggagctgccgcccgccgaggcgccgtccaagggcaagaacaagcacaagaggaggaggaagcagcacggcaagaaggaggcgcccgcggaagcgccgcagccgctgagcccgccagctcccgccgcgccgtcgccggctgatctggaggacgtgtccggccctgcaccgtcagccgatgtgaatgcgagttgccggcagcaccagcactgggcctccgtcgtcgtgcagaccgccatggcggcgcttttgttatcgctagcgtggtaaactaataaatcccagagagaaacgagagatccatatatcagcgtaccagctcagctcatggtttaattatttccgccctttctgttcatgccgcaccatcatacataggccggtgagattatctgcgggatttgttataggaaccgttggattgtggcctgtggtatttgttttcggtattttaagatggtgcccatttgtttttgacacattctgtatccattttttcgttaatttttggaataaagacgcacacttgctcaaaaaaaaaaaaaaaagcggcc

SEQ ID NO: 1952 - DNA, 1359 bp, Zea mays
  unsure (1)..(1359): unsure at all n locations
  Clone ID: ZEAMA-23APR03-CLUSTER16773_2
atcatcggcatcgcctgctctgctggtgaagagcgaaggccgaaggggccaagaccacacgccttccaaggtccacacctaccccaagagccgcccgccccatcagccgccacgatgtgcaccctggagcagcgcggccgcgtcttcgtcctcacccttaccggcgacggcgagcaccgcctgggccacgccctcatctcctcgctccgatccgccgtcgcctccgcggcggctggtgcggccaaggcggggcccggggccgcgctcgtcaccgtcggcgagggccgcttcttctccaacggcctcgacatcgggtgggcgggaacctctcgcgcgcgcctaggcgagctcgtcgacgcgctccgcccgctcgttgccgacctcctcgcgctccccatgcccaccgtcgccgccgtcaccggccacgcctccgcgggcgggtgcctcctcgcgctctgccacgactaccgcatcatgcgcggggaccgcggagtgctctacatgagcgaggtcgacatcggcctccccctcccgccctacttcatggccgtgctccgcgccaagatcaccgccgccaacgcgctccgcgacgtcgtgctcaggggcaagaaggtcagggccgcggagggcaaggatatgggcatagtggatgccgtctacccctctgcgctcgagacggcggaccaggccttcaagtttgccgagcagctcgcggcgaggaagtgggacggaggcgtctacgcgtccataaggatgtccatgtaccctgaggcctgcaggtcagttggaatcgtcgaggagagcgatgaggagaagcggaagcacttcgcttctaagctctaacttcgtgattggctgatgagagggtttctgtggaagcatggaggaacctacacattctgtatctgtacatcgtccaaccattgccgctgtcgctacgtgtgaagtacacaccgtgtacttgtgcagaccttgtaatttttacttgcctggtagcgggaaataaatcgaagctcctctcaccctttcttgaataatttgccccagtaacattatcgatatgtgttcatgtgttgtgcttgattccacataatttcttggtcctgggagtttggaagcttagaacttgcgaatggtcccgtggtggggtatcttgcaagttgcaagcgggtacactccttggctgcagctcgccatggattagctcttttccggctttgattgaccggaaaatttccataacgaaattgtcgcatcatgtctaacatgagatgacgagagtgcctcgatcatgtcagtgtcatgctggctgtnactattaggcttggttcaaggaaaganaaatgaccatgatttttg

SEQ ID NO: 1953 - DNA, 1251 bp, Zea mays
  Clone ID: ZEAMA-23APR03-CLUSTER16826_1
aaaattactgattgattgaattgcgaagcatatatatggcggccttctcctccagcaacggcgtgccgccgggcttccggttccacccgaccgacgaggagctgctgctatactacctcaagaagaaggtcggattcgagaagttcgaactcgaggtcatcagggaggtcgacctcaacaagatcgagccatgggagctgcaagagacgtgccggatcgggtcggcgccgcagaacgagtggtacttcttcagccacaaggaccgcaagtacccgacggggtcgaggacgaaccgcgccacgacggccggcttctggaaggccacgggccgggacaagtgcatccggaccagctaccgcaagatcggcatgcgaaagacgctcgtcttctaccgcggccgcgcccctcacggccagaagaccgactggatcatgcacgagtaccgcctcgaggacgccgacgacgacgcccagggcggcacccagcgaggacggatgggtggtgtgccgcgtgttcaagaagaagtgcttcttcaagattggcggaggcgaagggagcaccaccagcagccagggcgcggatgccggcggccacctggccaccatgtcgccgccgctcggcggacaccacgacctggcgtacatgcacccgcacccgtactaccaccacgccgcctcctactactcccagatgcagaccccggggccgcacgccaccgcatactcgcaccacgtgcaggtccaggacctcctcaccaaccaccgacccacggacgacgacggcgccggcaccggctacgacttctccggcctgcatgtcgagcatcaacccggtggcggccttgacgtcggcagcagcgatggcgtcgccacagacgacggtggccagctggccggcgaaaggagggatcagaccaccggtacagccgcagatcatcagtggcaggcgatggatggtttcagcaacggcgggagcgccgaggtgcagcaaatgaccggcgcccaacgaggcggggagatggatttgtggggttacggaaggtaaaaacttgatgaccaccacctatacgatcgaaaacatggacgtcaagtgagcatctttcatgcatacatgatcgaagatatggtgcaaattgatgcatgcgttcattgggagtttatatatagcttgatgacttgtttggactagttttggtgtttacgatgtgtttgtatatgttggttaatttgttggtacaataagagccaaagg

SEQ ID NO: 1954 - DNA, 983 bp, Zea mays
  Clone ID: ZEAMA-23APR03-CLUSTER16889_6
aaatcccccaaacatttcgtcgaatccgccgtgagatccgcccgactctcgctccgttccggcgctctcggtcgggcgaaggctccaccttcctccgacaagatggcggggaagggagccaaggccacggccgccaagtcggcggacaaggacaaggggaagaagaccggcggccccgtctcgcgctcctcccgcgccgcaccccaggagaagtcagctccgaagaaagatgtttatcaattgttcgctgagaaggtcagggataacaaacaactggaatcaagatgggcgatcatgcaagaaacccgcgtggagtatttccgtggaaaagatttcaataccttcgtcaaaaatcatccagaagtcagggaaattttggggccagataaggatttagaggtggaagacattgttaacactttgctgaccaagaaccttgtgataaggtgtgatcgagtcatgaaaactgtgaggcctggcaagaaaaagctatcgtcatggcctgctcatttggagatacataatgaacaagtgtttactgaaaatgatgggttttttgcttggatgtttctgaaaagaaggaccttgtggcagacaattccttcttttcagaaacatcctgcccttgttgctctatttctggaatgattgaaaagcacactggggctaatattacagaagaaagcaattacaccagcagggcggcgagtagtcacatgcctccatccaccgaaggcaaagcttcagaagatatggacgttgatggggataccgaggctagcttagatgaaacccaagataatgaatatgctgatgatacaagatcaagcggagcttaaaatcagagtttttttttgtttgagcaatctttgttgttgtgaatctgcagaattatatagatagcttactgctggcaacaaaagaaatcagggtgtcatgttttgatgttacatccatatattccctgcaattggttgtgttct

SEQ ID NO: 1955 - DNA, 1066 bp, Zea mays
  Clone ID: ZEAMA-23APR03-CLUSTER168951_1
gttgaagcgttatcccgcagcgggcaaccacggtcacgtacgcgaaatctctctctctcgtggtcgtgcgcttccttcccgagactccaatgcccctgcctcccctgctcccgcgcctttaccccacgccgcctccacttcgcgccggggacaggggtaacgccgtccctctctctcctggaagaagaaggccggcgcttctcgctgtcgtccgcgcaaagagaaaggacgaggcaagcttcaccgaccgcatccttgactacatcgagggagggccaaagttaaggagatggtatggagcacccgatttgcttcccaaggatggggctgcggaggatgaggaggacgagtctcaagatattgaggagtctcgggacgctgtgctagtcaccaatggcgacagtgagattggacagatggtgatattagcactaattctgaaaagcgctagaacaaaagcacttgttaaggataaacgaaccactgaagaagcttttggaacttatgtggagtgcatggttggtgatatcggagataagtccttcacaaagagagcactaaggggcgttcgtgctataatttgtccagctgatgatggttttttctctgaaccgatcgacctcaagggtgttcaacacattgttctgctatcacagctggctgtctacagaaatagtggtggtttgcaagctattatgaacagcaagctgaagacgctagcagagaaggatgaagaagtggttcttgcatctggcatcccatgtacaataatcagaacaggttctctgcaaagcactcctggtcgcgagagagggcatagcaagcaagggaagaataagcaaagaggatgctgctaccatatgtgtggaagctctgaatagcattcccctaaagacacacatttttgaggttgcaaatggtaaggagaaggtgatagactggaaagcatggtttgaagagcagaccaaaagagaagaagaaatacagtaaaaaacaaattggaagtgtttttcgcttgttggtccatgagaaaggaaaatagaaaagagcaaaaaaaaaaaaaaaa

SEQ ID NO: 1956 - DNA, 874 bp, Zea mays
  Clone ID: ZEAMA-23APR03-CLUSTER168951_3
gaaatctctctctctcgtggtcgtgcgcttccttcccgagactccaatgcccctgcctcccctgctcccgcgcctttaccccacgccgcctccacttcgcgccggggacaggggtaacgccgtccctctctctcctggaagaagaaggccggcgcttctcgctgtcgtccgcgcaaagagaaaggacgaggcaagcttcaccgaccgcatccttgactacatcgagggagggccaaagttaaggagatggtatggagcacccgatttgcttcccaaggatggggctgcggaggatgaggaggacgagtctcaaggtacatagagaaagcactctgtaaatttgaactccttggcggctgtgtcttcttatttgttggcagatctggggtgacaaatagatattgaggagtctcgggacgctgtgctagtcaccaatggcgacagtgagattggacagatggtgatattagcactaattctgaaaagggctagaacaaaagcacttgttaaggataaacgaaccactgaagaagcttttggaacttatgtggagtgcatggttggtgatatcggagataagtccttcacaaagagagcactaaggggcgttcgtgctataatttgtccagctgatgatggttttttctctgaaccgatcgacctcaagggtgttcaacacattgttctgctatcacagctggctgtctacagaaatagtggtggtttgcaagctattatgaacagcaagctgaagacgctagcagagaaggatgaagaagtggttcttgcatctggcatcccatgtacaataatcagaacaggttctctgcaaagcactcctggtggtgagagagggcatagcaagcaagggaag

SEQ ID NO: 1957 - DNA, 1296 bp, Zea mays
  Clone ID: ZEAMA-23APR03-CLUSTER169422_1
aagtcgttcggctcggcgcactgggtatagcagcactgccgcggttgattttcgagctgtggtgctggagaagtgaagagctcatgctgttctcccgttccccggctgccacaaatcagccactcgccccttcccgccggacgctgctcctatcgccatgcccgcgagccggcgcgaccccggcaccggtggccgacgctgcgctcctaccgggcgggctgcgtgcggagtcgctgccgcggcacgtggctgtggtcatggacgggaactcgcggtgggcgcgcgcgcgcgggctgccgtccgcggccgggcacgaggccgggcgccgcgcgctggaggaggtggtgcggctctcccgcgcctggggcgtccgcacgctcaccgccttcgccttctcccacgagaactggagccggcccaaggtggaggtggaattcttgatggggcagtttgagcgagaggtccgcgaaagcctatctgaatttttgagagaaggaattcggctacgcgtaatcggcgactcctcaaggctgccggtttctcttcagaggaccgcgagataagccgaggaggccacgcggaacaactcgcagctcgatctagcactggcaatcagctacagcgggcggagggacatagtgcaggcgtgccggagccgtggcccagaagaaaagcgacaacctgctcgagccggaggacatcgacgagtcgctgttcgccggtgagctcgagacgagccacgccaacgccaacggcaacgagctcccttatcccgacctggtcatcagaaccagcggcgaactgcggctgagcaacttcctgctgtggcagtcggcgtacgcggagctcttcttcacggacacgctgtggcccgacttcggagaggccgattacctccaagcgctggtctcgttccagagcagagacaggcggttcggcgtaaggaaattgtagcggcgcagaggcagcgccatgtggaaggcgtgcttcaatagcaactgtcaatagcaggaaagcgtcggtcaataaatcgtaacgcgagaccaagatgggtagatggagtattaaagtggtggtttgcatgcagcggtgagagtgagagtaatgtagcatatcaactcaagatggtaggtactacagctagagttcaagctcacagacagcagtcgtcgttgatgatggtggctagcagctatctgccgatggccacagatttattgttaaaaaccctttgctattgcaagagtacgtcaaatgccctttattaagtcaaaaaaaagaaaaaaaaaaaaaaaa

SEQ ID NO: 1958 - DNA, 1344 bp, Zea mays
  Clone ID: ZEAMA-23APR03-CLUSTER16987_1
cttttctaccccgagcgagtccagcgaaaaaaaaagatggtcgaaaggagactccttttcagcggtctcggtgccatgtccgtgctcccgtgttcgtagatagcacaacattttcgtatcggagatggtcgctgtcacctggttttaaaattcagatgagtttggcggcgtttgttcttaactctgagaagaaacttcgtttcagcgttccagcgatcgccgccgcatgccgaccacgggtttgtgctgatgattccacctctccagagacagcgtgcgtctaggaagcagcgccgaggatggcggaccacttcgcgttgatgacgggccggctgctgacggagtcgacgctccagtccgccatccaggaggcctttgccgatgccgtagcctcaacagccgccggctacgaccgtacagatccctccgctgttcctgaagatgttcagccgggcatgggcgtgggcaagggcaagggcaagagtggtgtcatggtggagtgcagaatctgccaagaggaaggcgacgaggcttacatggagacaccctgctgctgcaagggcagcttgaagtacgctcaccacagatgcgtccagcggtggtgcaacgagaagggagacaccatatgtgagatatgcttgcagcaattcgaaccaaattacactgctcctttgtttcggcatggaaggagcctaataaattcaaggggagctggagaagtacgggaaaacgtcggtgctagtcatggtcaaacctcggatcaggctgatggtgcatcaagcgttgattctcagaacctccacctgaaaggagtcgtatattgccgagtagttgccattgctttgatgattttgttggtgctccgtgacgcgatcttgcttatgctccgcgacgatgaaatgtgctcagtagagctaatcactctgctgctgttcagaacggctggaattgtcataccagtctacatcatcttggtatcagttaccgcattgcttcattggtgcaatcaacgacggatctttagaatccaggttgtgcacgagacgacggtttcagaacctcgtggagcagggggcctgcagcatatcatcaacattcggtaggaagctgcacggacgcacggtggttcctggtcaggcagcctctgtaaatacctgaaaagtgtttgagattcaggcttgtcgtaatggggtttggaagagacagaaccattgcgagactgtatagtttcatagcatagtttctatgtacaaaagaaattctgaaaacacatccactcaacttcaccaaatgatgaagacgaagttggatcggtgtctgttaagaaaaaaaaaaaaaaaattt

SEQ ID NO: 1959 - DNA, 1591 bp, Zea mays
  Clone ID: ZEAMA-23APR03-CLUSTER17024_1
ccgctgaccccctctctcccctctccctccgacgctccgccgcccccgtctctctcgtcttcctggctctccccgcgcaccaaaccctccccaaaacccaaacgcttctcgccctcccgtcctgtccccaccaggccaccacgcttctcggccgtcccgttctcgaccatgtcggtggccgacggggacgacgacgaggccttcctcatcgccctcgacgccgcggaggccgccgcgctggactcctccaagcgccgccgcctctccaccacctcgacctcaccgaccccctcaacctcaccctcacccgccgccaccgaggggccctacctggccgcgctcaagggaagccacagctccacctggaagcagcagctgcaagaccttggctatgcccacaagcggcccgacggctctaaacccttagccccgggtacgggcgcgagcggatcgtgcttcaagtgcggggaccccgggcactgggcacgggagtgccctcaatccgtgccaaacacggggggaggaggtcagatcggcggtggcggtgacggtggcggtggtggcggcggcggatatgtaaatgcgggcgtggaggtggaggacaaggcgtgcccctgcggtgtcgggagctgcctcgtgctcacgtccaacacgccgaagaaccccggtcgcaagttctacaagtgccccatgcgggatgggggttgcaacttctttgagtggtgcgatgctccatctcccgcccctgccaatgcacgaaataacatggttgtacactcagagacatcagcaacagatatgctttgcccatgcagtgctggaacttgcttaattctcaccacaaagacagggaaaaatgttgggaggcagttcttttgctgcccattaaatcagggtggtggtggtggctcttgtggctttttcaagtggtgtgacgagctacagcctagggttggtgcaccactgcaagcttcagcgcaataccaagcggattccatgccaagcatccaaaaccccagccagaggagctcgtcttcctgcttcaagtgcgggcaggagaaccactgggctcgagactgtccgaatcaaccgtcggatccttatcctgacaagggtgggagaccagtagctccagcgggctcacctggtgcgtgctacaactgtggtcggtccggccactggtcccgcgactgcccaacctcgaatagtggtggtggtggtggtaccggcaccagccgtgccaggtcgtcctcagccttgagctcgtggaatagtcagagatactgataggaggctcctgtgaactcaattgaactgacatggacatgctgtacgaaacttggacaattgcccccctccacgtgttgcttaggtatgtgctcacgccgatgccttttgctgctctacgctatctctatatgtaagagagaactgttgctgttctctgtcttcaccctcaccctgttttatactcctatctctgtcgaacttgggtatactgtttttttatctactctaggatttttttcacataaaatattgtatgtgtgggtctaaggagaaccatatcgtccaagcatttctttccatg

SEQ ID NO: 1960 - DNA, 1028 bp, Zea mays
  Clone ID: ZEAMA-23APR03-CLUSTER17046_1
atcggccatcgccgtctccagcagagaggaagcgacacagctcaaggacagcgcagcacgcaagcgggaccgcaccgaagcagcacacaagatcacacatcctactgctgcgccgcacaatgggcatctgcgtgtcgtgcgacgcggcggacgagggcgccgcgacggcgagggtggtgctccccagcggcgagctccgggagtacgccccgccggccacggccgggacggcgctgcaggcggccggcggcgagggcccctggctcctctgcgacgccgacgggatggcgttcgagggccccgtcgccgtcgcggcggtcgcccccggcgaggagctccaggccgggcagatctacttcgtgctccccgccgagatgcggcgccgccgcctcacccgcgaggaggtcgccgcgctcgccgtcagggccagctcggcgctcgtcaaggccgcgcagccgtcctcgccctgccgccggctccggcgcggcgcggtggcgccgctcgtgttcccggtcccagaggaggagtacgcggcggcggacgcggtctcgccccgtcgcgcggcgaagccgcaccagaagcggagggtggcgtgccggggcgggagggcgtccaggttctcccccgacctgaccgcgatcccggagagcgagtagatcgagcctccgctcggcatgtgatatgtctctggtggtcagtggtgacgggtcgctcgccggcgcttggtcggacggtgtggccgcgccggagcggagatcgacggtgcgggaagtgttgtagatgcagagcccagaaatgagaaatgtgagtaggtgtttttggcgcggcggcaacaggatgcgcgtgtagagtgtacgttacgtgtaggtccaggtgcatgcaagtgtaaatacacgggatctccgtgcggtgtgcccagtcacagtttggaactcagcttttattagtgcccgtgttcaggctttgtgtcgtgcatcatggaataaatctctccctgtttgtgaaaaaggaaatctctccttgtcgcc

SEQ ID NO: 1961 - DNA, 904 bp, Zea mays
  Clone ID: ZEAMA-23APR03-CLUSTER17066_4
agttcttgcacctcacgattcgttcggtttcttttcgttctagcatcgtccagctctcacacgcagcctatttgtccctgcgccctctgatgaatataccagctcaaagttagaacaggcatgggtggatcggtttgtgattttaatagttagagcagccatgaataaacaactccggtctctgtcatctgtttatcatggcagtcgctctcgaccagcgtcggggatggagcgaaatggctggtgaacaagctgaagggcaagatgcagaagccgctggcggacctgctcaaggagcacaacctccccgtgggcctgttcccgcgcgaggcgaccaactacgagttcgtgccagagacgcggcgcctgacggtgtacatcccgtccccctgcgaggtcggctaccgcgacggctccgagctgcggttcgacgccacggtgtcgggcacgctgggcgagggccgcctcacggaggtggaagggatcaagaccaaggtgctcgtctgggccagggtcaccgccgtcaaggccgacgccgccaaggtccacttcaccgctgggatcaagaggtcgcgcagccgggacgcctacgaggtcgtcaggggcggcatcaccgtcgacgagttctagcttagttttgctttcgcggctcacatggatggacgggcttcctcttgctcgctgcacgctgagatggacaagattgttgctttcagttgcaagaataaattctacacccattagctatgtgggagatctgcgtgcactgtacatcgtgtgttttgtgctttgttgtgagaatgtaacacctgaaggattcagaacgtgtgctcattgcttatgatatatgtctcgtgtcaggttttagcaacaaaatgtcccgagcagagctcgatgcagctct

SEQ ID NO: 1962 - DNA, 1185 bp, Zea mays
  unsure (1)..(1185): unsure at all n locations
  Clone ID: ZEAMA-23APR03-CLUSTER17113_1
accaccacacgtccacgcagcccaactcttcgcataatcacatcgcgccggcgggccattggcattcccaccactccaccatcgggggtcgactggggccccatcgccgatgggcttcttccgccggatcgccggcttcttcggcgtgtcgcgggacgacgccgaccactcggactccccgtcctccgcgggcgtcgccgcggaactcccgcgtgacagggcggccgcggcgcacggggcgaggcgcgggttcagcgtccaggttcccgtccccgtccccgtcgagcggcatgggcccgggcccgggcccgtgctgctgccctgcccgcagggggacggcggcgttcagggttttaggtggtatacaaggcagcttagtatggatgaagacggcgacgtggctgatgagttcttggatgaaattatcccagaaagctcagtcaacaacgccaaaagcccagtcggaaggttccaagtgaaatataacacgaaacgaactgctctagcattgaggaagcatgtcattgctgtcgatggcgagatccgccatagcttggaacaccaagggcaactgcggtgggtgtgaccgagtctgttgagcccatatgaaagtgcaggttgggcagaggcaggcgcgcacatgggcgaagcgaatgacctaggttacccatctttgaagtggacctagaggtagttcattgctgatttatccatcgttctccgctcagtgtgttggtacgcctgatctcgaggttattcagacaccttgtaccactagtagtttgtcacgatatacctgaggatagcttccagcctccaggccacgaagggaaagcatgcccaataggagaatttctgggccagaatgggtcctgtaagcggtgcagtggagagtttttctttttctgttggcagtagtgaacgggtttattatatatatgggagatggttcgtgtggatgagactaggctgggaactgaagattgaaccggctgcctccgggagggcgctcctccagataaatctccagtgattcgtgagaggaaacgaacaccgggagcggtgttcagattcctaccgagttcttacatagttgtacattattgaacagctaccgctggacaaattgaatgtgcttggctggcaatggagccaccgaatccgtgcaaaaaaaaaaaaaaaaan

SEQ ID NO: 1963 - DNA, 2296 bp, Zea mays
  Clone ID: ZEAMA-23APR03-CLUSTER17121_1
tgacctgttccatcccgccagcccttccgctcccacgacccaaccccactgcccggagcccccgagccttctcgaatcttgcgagaaccccaggggcgaggagcagatgtcggcgaggctacgggtggcggacgtccgcgcggagcttcagcgccgcggcctcgatgtatccggcaccaagcctgctctcgtgcggaggctggacgccgcaatttgcgaggcggagaaggccgtggtggctgctgcgccaaccagtgtggcaaatgggtatgacgtagccgtagatggcaaaaggaactgcgggaataataagaggaaaaggtccggggatgggggtgaagagggaaacggcgatacgtgtacagatgtgacaaaactagagggcatgagctatcgtgagctgcagggattggccaaggcacgtggagttgcggcaaatgggggcaagaaagatgttatccagaggttgctctcggcgactgctggtcctgctgcagttgcagatggtggtcctctgggcgccaaggaagtcataaaaggtggtgatgaggaggttgaggtgaaaaaggagaagatggttactgccacgaagaagggagctgcagtgctggatcagcacattcccgatcacataaaagtgaactatcatgtcttgcaagtgggcgatgaaatctatgatgccaccttgaaccagactaatgttggagacaacaacaataagttctatatcattcaagttttagaatctgatgctggtggaagctttatggtttacaatagatggggaagagttggggtacgaggtcaagataaactacatggtccctccccaacacgagaccaagcaatatatgaatttgaggggaagttccacaacaaaaccaataatcattggtctgatcgcaagaacttcaaatgttatgcaaagaaatacacttggcttgaaatggattatggtgaaactgagaaagaaatagagaaaggttccattactgatcagataaaagagacaaaacttgaaactagaattgcgcagttcatatccctgatctgcaatattagcatgatgaagcaaagaatggtggaaataggttataatgctgaaaagcttccccttggaaagctaaggaaagctacaatacttaagggttatcatgttttgaaaaggatatccgatgttatttcaaaggcggacaggagacatcttgagcaattgactggggaattctacaccgtgattcctcatgactttggtttcagaaagatgcgtgaatttattatcgatactcctcagaaactaaaagctaagctggagatggttgaagcccttggtgagattgaaattgcaactaaacttttggaggatgattcaagtgaccaggatgatccgttgtatgctcgatacaagcaacttcattgtgatttcacacctcttgaagctgattcagatgagtactctatgataaaatcatatttgagaaatacacatggaaaaacacactctggttatacggtggacatagtgcaaatatttaaggtttcaaggcatggtgaaacagagcgatttcaaaaatttgctagtacaagaaataggatgcttttgtggcatggttctcggttgagcaactgggctgggatcctttctcagggtctgcgaatcgctcctcctgaagcacctgttactggttacatgtttggcaagggtgtttactttgctgacatgttttcaaagagtgcaaactattgctacgcctctgaagcatgtagatctggagtactgcttttatgtgaggttgcattgggcgatatgaatgagctactgaatgcagattacgatgctaataacctgcccaaaggaaaattaagtaccaagggagttggtcaaacagcacctaacatggtcgagtctaaggtcgctgacgatggtgttgttgttccccttggcgaacccaaacaggaaccttccaaaaggggtggcttgctttataatgagtacatagtgtacaacgtagaccagataagaatgcggtatgtcttacatgttaacttcaatttcaagagacggtagatgttgcaaagagctgaaactgttgctgagatcttagcagaacatatgtggacttatagcaccaggtgccctcagcctcattttctgagcaaatttggtagcctttgcatttcgattttggtttcaggcttctagccccattgatgattgatactgagtgtatatatgaaccattgatatccaccttccatgtacttaagtttttttaacatgtcccatgcataataa

SEQ ID NO: 1964 - DNA, 2351 bp, Zea mays
  Clone ID: ZEAMA-23APR03-CLUSTER17151_2
gcacgagaccattacctagaacatcctaatcaaaaaaactccctcgcttcctgcacccacatccccgcggcgctacctgcctacccagatcccgctcgccggtggtgccctcctcagtcctcactctcccgccgctggcgccgccggagcgagggggactgcccaaaccctactaggactagcagtaggaggcggaggggcgagatccggcggaggccgccccgatgggggacttcaacgtggcactggtgatcgtggcggcggtggtcagcgtgctggtgctgctcgtcagcgtctaccttctcgtcaactaccagcaccccgacgacgtcaaccaggcctacttccccaagctcgtcgtcgtgctcggcctcaccgtcgccgtcctctccatcctcatgctccccgccgacgtcgccaaccgccaggcatgccgcaaggccgtctacaacggcgcctgcagcctcacgctccccatgaggacgctctggctcgtcgtttacatcgttgacgccgtcctcgtcttcctcgtcatccccttcgcaatgttctactacgagggcgaccaggacaagtccgtcgggaagaggctcaggaccgcgctcatctgggtcgtcgcgtccgcggtagtgtgcggcctcgtcctcggcatcctatacggacttgttggtaaagtggacttcactgtcaggcacctatcttcctcggtccagacatttccaaactcattttctggattctcaagtggccagccgtgcattagtccattgactcgtcagtgtgcggcttctactgcaccggctaactcgcaaacaacttggacaatgcgtgctaccttccctgaatatgtggttgctcttactacaattgttggatctgtgcttttcacgatatttggtggtgtcggaattgcctgccttccattgggacttatattctcatttgttcggcgtccaaaagctgtaattacacgctcacaatatataaaggaagcaactgaattggggaagaaggccagggagctgaaaaaggcggctgaagctcttcaccaagaagaaagaagtgggaacaagggccggaaatggcgaaaaaacgtgaaggctgtagagaaggagttactacttctggaagatgacatgaaggctctagaagagatgtatcctcaaggagaacaggcagaggctacttgggcattcacagtccttgggtacattggaaaacttatatttggtgttgttgggttaattgtttcaatagcttgggttgcacatatcgtcatatacttgttgattgatcctcctctatcttctttcctgaatgaagtcttcataaagttggatggtgtttggggtctccttgggactgctgctttcgcattcttttgcttctatctccttattgcagtgattgctggggagatgatgcttggtttgaaacttgttttcatcacaattcacccaatgaaatggggaggcactttaatgaactcctttctgtttaatgttgggctcatactactttgctccatcagtgtgattcagttctgtgccacggcttttgcctattatgcacaagcaactgctgctcaagagatctttggccacacattgcaatcccttcgtggaattaagtatctttacaagtacaatgttttccagtatggctttgttgctcttgccatcctcacactcttctactatgctatatttgggtggagaaaaaagaagccaacagggaggttccagctctcaaaatgattcatcacatttcccccctgagtgatagttcagttagcgtcgtacggatgtatatgaacgaaaccaaatcttttcaaagagctgaggagctgcaaatggtgtatattatcaactacgtgacctcaaagccgagaatgttggttaccacggacatggatgttagaagtagaacccagttaactttgcagcgtttggtgtgtttgggggcgctttaccgcccccagttcgatattcatttcttggttgtgtctggagttagtcagttcattgcttttgtatgtattatatactgtgattacaacacaaggttctaggttgtattaatgatatgtcctgatcattcctgtgccgttaaagtagaacccagttgactttgcaatgtacacatttcttgtatcggctcttcatttacgtctgtattatcgcttttatgattggatgatgatgttattcttgagagatgttcggtgtgtttgggggcgcttagcccccctttgatattcattcgtgttgggagttaggtcaattcattgcttttatatgtgttatatactgcgattaccgtgcgccatgatctcaatcacttacgacctg

SEQ ID NO: 1965 - DNA, 824 bp, Zea mays
  Clone ID: ZEAMA-23APR03-CLUSTER17256_2
agagcagggtgtactcgagacagacaggactgacggccacatccgccatattcaggcatggaagcaccggctgcgaagcgcgtcctccgcgtggcctccatcagcggctccattcgcaaggcctcctggcacagcggactcatccgcgccgccgcggaggtgtgcgaggactgcatcccggggctgcgcgtcgaccacctcgacgtcgccgacctgccgatgctcaacaccgacctcgagacgaacggcggcacgggcttcccgcccgccgtcgaggcgttccgcgccaaggtccgccacgccgactgcttcctcttcgcctcgcccgaatacaactactccatcaccagcccactgaagaacgcgcttgactgggcttctagaggagtgaactgctgggcagacaagccggccgccatcgtcagcgcgggaggcaacttcggcggcggcaggtccagctaccatctgcgccaggtcggggtgttcttggacatccatttcatcaacaagccggaactgttcgtcttcgccttcttcgagccggccaagtttttcgacagcgacgggaacctcatcgacgccgacaccagggagcgcctcaagcaggtgctcctgtcccttgaggccttcacgcgcaggctccagaacaacaaggactgaagcagcagctcccgggatcgtcgtgctaataataatagggacatttacatttcacccactagtttggatgcgctgctcaaatctatccccgtccaaattctctacttagtttttcccgcctacctccccacaaagctcccccatcacctcacgacggcattttc

SEQ ID NO: 1966 - DNA, 2962 bp, Zea mays
  unsure (1)..(2962): unsure at all n locations
  Clone ID: ZEAMA-23APR03-CLUSTER17332_1
ctgcacctcctcaccagttacctttgtcccatgttcatcttttcaggtggaaggagcgattcgtctgtgcctgcgcctgcgcctgcgcctcgccgggctcgtgccgctgtaccctccttctccaggagacctgtacggttatagctcgccccctgcgcaagcggaaaacactcatcgtttcagccgttagtagggattcgtcaatgcctgcgcctgcgcctgcgactagaggtgcccgtgtagatgtaccctccttctccgtgggacctgtacggtgacggggcgctcccgcgcgaggcctgaagcaaagcccgctggcgccctttttttggtatcacataacgccagcgcctaggtcaaacaccagagctcgctgatttcatagtccccccccccccccccccagaggagagggacccggagctgcgccatggggcctaccgccggctccggcgaggacaaggctatgttagagctccggaaaaaacatcgtgtggacctggagagactaacaattacatcacgaccgttcaagacattgtcattctttgtgttagccatcgctcagaatttggaaagaacatgttcatctgttctgaaaaaaggttaccagttaaaaaccgcaatgcttttggttgttgctacttgggttctgctcatgttcactgatggcctgaatgaaaaggtaccatcttgttttaaattaattagaacatatgtgttttgcaggattaagaacagtctgagttacataaatgctacatattagataatgacttgcaagaaagctttgcccttttttattctttttagcacgaatatttggaagtggatgataaactgcagtctgtttttactcttactctttaggccgctgtatttggggaagccctaaaactatctgccatttggcaaatttgcttgtatattgttcaagaaaatttcatatacatcgctacagcttggtcacattattaataatttgcttccaatatctcccgttgcatgcccaatatgcaccttggataaacatggtatgttgtcattgatgcagcatctgcaggagctactttggtatgtcaggtttggattgtggtggattatactaggggtcgcttcatccattggattaggttctggtttgcacactttcataatgtatttggctccccatgttgccctgttcactatcaaagcggttcagtgtggtagggttgatttgaaaagtgctccttatgacactattctccttgaaaggagaccatcctggttagagaaagactgtctgcaatttggacccccaatttatcatgaaacaattccattcagcaaaatactgcaagaagtttatcttgaagctattctttggggcattggaactgcacttggagagcttcctccatattttctctcaagaacagctagcatgtcaggccgcataattgatgagttagaagatttggatgcttccatttcagaaggctttctatcttcagctttacgtcaggccaaacgatggctcatgtctcattcacagtatttaagcttcactctaatattgctacttgcttcggtgccaaaccctctatttgatcttgccggtatcttgtgtggacaatttaacatccctttctggaagttttttctagcaactttgattggaaaggctattgttaaagtttgtatccagactacattggtgattactctctgcaataaccaacttcttgatttggtggagaaaaggcttatatgggcatttagcaatgttcctggagtggcatctgtccttccatcttttgtttccaaactgaagatggccaaaaataagtttttatcagcccatgttgctgcatcagcttctacttctgttaaggtatggattccactctactttagttacaaaaaatagaaatttaatgtatgcttcacttgcccactctttaaagtgatatgacaacagcccttagactatctccagcaacttacccatccctatactcatattcaaactcccctctgcgaacagtgcaaaactgtgtttttgggtaaactatggattgactgctgcagacggcctttgaggttgataatgttttgatatttttaccattggtcatgtaagtacatggcatggaagaacacaccatggaaaggtgtgcagtaagtggttataaaattaagttcttgatcttggggataattctggtgtttacatcgactcaaagaaaaataaaatgctccagtgatttactctgaccattttactatcttgttgtcatcttcgttgcattgtttaaaaatgctcatattgtttaatccatgtttagggaaagaagtggaatctgtcattctctttggtctggaataccctggtgtggctcatggttgcaaacttcattatccagatagttacttctacagcacagggttatctcaggacacaacaggagcgagagatcagtaaaaagttggaaaccgagctttctgcctcttaacgttcttctggcgcaccaaaatgattcgccctgggtatcgatctggtttcttcaatcttttacatacttatatcgagtttagagaggaatattaacatgaataatgtggtaactgactgggaaattcaaaccgtgttcaccaactatttgctgctactgttcttcaggaaagtccaatcatacattgtacataaccatgcatcaaccatcagctcaaggctaaaggctctcctgcagtattgtggtgcactgactattgatctatttctttcgaaagagagagagaggaaagctattagctagtgctagaaatataatgctgccccagctacaattgtaagtttgtggccttgtacatagcatcaaatattattaggggacaaaaatatctaatgatataagttaatacctgattttgctccgcaaaaaaaaaaaanctcgagggggggcccggtacccaatcg

SEQ ID NO: 1967 - DNA, 2410 bp, Zea mays
  unsure (1)..(2410): unsure at all n locations
  Clone ID: ZEAMA-23APR03-CLUSTER1745_8
gcacgagaccattacctagaacatcctaatcgaaaaaacccatgccgattgccccgggaaccactgcctacggaaagcttacgcacgacgagagaagattgccgccgtgaaccgccatcgacgatccccaattccgttgccgcgttgaccttggtgctgatctgagacgcctctgcgtgtctcgacagtgggggccgaagaactggagtggaggaagggcttgcagcgaccccggaattccacgccggatctcgacgtccgccgctgctcgtgtgcaaccatgcctacgcttcgtatcgcgaagagcccgttgctgaggatcctggtgagcagcaggttgaagtagctgagcagaagctcattgaaggagaagagcaggtggttcaggagtcgctgcaanccttcctccactccactccttcgacaccccgctgtaccggttcaacgtcccggacctccgcgtcggcaccctcgactccctcctcgcgctcagcgatgacctcgtcaagtcaaacgtgttcgtcgagggcgtttcgcacaagatccggaggcagatcgaagacctcgagcgcgccggaggcgtcgacagcggggccctcaccgtcgatggcgttcccgtcgacacctacctcaccaggttcgtgtgggatgagggcaagtaccccacaatgtcgtcgctcaaggagatcgtcggcagcatccagtcgcaggtcgccaagatcgaggatgacatgaaggttcgagcagcggaatataacaatgtaaggagccagcttactgcaatcaacagaaagcaaagtgggagcttagcagttcgtgacctttccaatctggtaaaaccagaggatatggtctgctcagagcatctagtaacacttcttgctattgttccgaagtactcccaaaaagactggttgtcaagctatgaatcactcgacacatttgtggtacccaggtcatctaaacagctctatgaagacaatgagtacgcactctataccataacactttttgctaaggttgttgacaactttaaggtccgtgctcgcgagaagggtttccagattcgtgattttgagtatagtcctgaagcacaagaaagtagaaagcaggagatggagaagttactgctagagcaggaagttatgaggacctcgcttctgcaatggtgctatgccagctacagtgaggttttcagttcctggatgcacttctgcgccgtgcgcatatttgtagagagcattcttagatacggtctgccaccatcgttcctgtctgccgttcttgctccgtctacaaagggcgagaagaaagtaaggagcatcttagaggacctttgcggcaatgtccatagtatttattggaaaggcgaagatgacgtggcagttgctggtctgggaggtgaatcagaggtccatccttacgtctcattcaccataaactttgtctgagcattactggtgttacgccctcaagtaaatcgaaacgatggaatggttctgtacattactagtgttacggcaattctttgttgatctgtcagcttttatctgatcatgtaatttatatattggacatataagccgatcaataatgtagcttttgaggagactggaagtagatggatcacgatcaccatgtaatttgtaaaatggggctactgttactgtaataaaggcacatgtcaaatatcttcagctgcggtggtctcttgctgagctccctcggcctcctcggtactacgactagtactgggcgcctcaaccaccaccgtcttccttacacggaacatggccaagtggatgtcaccgaagatgagtaggctgccggggtcgacggacgcggggaagcccgggttgagccggcgctcgttgatgtaggtgccgttggtgctgtccaggtccgtcaccagcaggctgccacccttcttctccagccgggcgtgagcgcctgaaactgtggcgatggggagcacgatgtccgccttgtcggcgacccggcccacggtcaccgccgtgtcctccgagactatctcgatcgccccagggcgcgcgactttgtagccgatgtggcgccagtcaccgtctcctgcagggtcgagaacccatctttccgacgacgacgagacggcggtcgaccggccgccggtggcactggaagagcgcctccagctacccctcttgctgtccagcggcctcgttcttgcagcgaggcagaaaataaccagacgctgctgctggggccagggggaaggaggcaaggttgctggccacctcctggagccggaggcaaggagtagggaggacgtggcagccattgctgcttccatcaggacaggacaggacaggacacggaatgcaccggagccggagaagaatgggggctggctagctcccggccggcctcgagg

SEQ ID NO: 1968 - DNA, 1853 bp, Zea mays
  Clone ID: ZEAMA-23APR03-CLUSTER17498_5
aaatcgcggtcactgctccgaagtccgaaccttcatacacatcgtctcgtttccgatttccccaaattcaggccacaggcgctacaggacccaggcaccactcggtcggcggccaccgcgtcgccccgcctgctcgattggggtcgcgtgtgcgataggaagtattgtgttgtgtttgcaacgtgatagcttgtactgggaacaaaggtcaagatgggcgccttggacctacaccttgactttgcttctgctcaacatggacaagccaagttaaaggaatatgccaagagctctctgttgtctgatggaaactacaatacagacaagatcaatggttcaaaccctgatgactatgagaaatttgagaaagggataatgcactatgggtgtccacattatagaaggagatgccgcataagagctccttgctgcaatgaaatttttgattgccgacactgccacaatgaaactaagaattccattaaaattgataaaatgaagaggcatgaacttccacgccatgaagtgcagcaggttgtatgctcattgtgtggcactgaacaggaggtgcgacaagtatgtatcaattgcggtgtttgcatggggaagtacttctgtggtttgtgcaaactcttcgacgatgatgtctctaaacagcagtatcactgcaacggatgtggaatatgtagaatcggagggagggagaatttcttccactgttcaaaatgtggatgttgctattcaattgcgctgaagaatagtcatgcatgtgttgaaggggcgatgcatcatgactgtccaatctgcttcgagtacttgttcgattcgacaaatgatgtttccgtcctgccttgtggtcataccattcatgtaaagtgcctgaaagaaatggaagagcactgccagtttgcatgccccctttgctccaagtcggtttgtgacatgtcgaaggcatgggaaaggctcgacatggagctggcaactctgtctgactcctgtgatcacaaaatggtccgcatattatgcaacgactgcggggcaatatcagatgtgcagttccatttgattgcgcacaagtgccagaattgcaagtcatacaacacccgccagatttgaagtaagaatcgcaagtcacacaacaccgtcagatctgaaatagcaaatcctgtgggggtttctgcatttcttcaagaagcgtgatggactgatggccccttcccgtgagctgctgagcaccgggatgtctggcaagacactcatcactgtatccactccactgggtcctgcggaggcaaacagctcgagattgtatatctgctgctagctgccgcccttcgttatgcataagcctactcttgccgttttactcctgtcgctccgtgattctagtgtaataatgttatatttagtgctgcttcaagcgtacggctgcggttgaacggcggcggcggctgctgagccacagtaccttgctgttgctgagactgcacccagccacagtgcgccgccgccgcagcagcttgtagctggactttatgaaggtgcctttgttccgcaaggaagagttcttggttgcgggtagctattaaggccatctccaatagatgtcctattatatcccttatttcatcctctatttcaaactttatataaatagtattaaatatctcatctacactgccctatctcctgatcttttaagacagtctttagttaggaaaatgtgaacggtgtgcacctgtggttgtacgtcaaatccggatcccattttctatgcatagataattatagtgttgtgttcccaagttgtgatttactccccccgggcatagaagtacccatatagaaggtgc

SEQ ID NO: 1969 - DNA, 1578 bp, Zea mays
  Clone ID: ZEAMA-23APR03-CLUSTER175576_1
ttttttttttttttttctggcccggaacgccattttgttagtattgattgaactaaagaaccaagtaaccaacgcaatacaacggcaaagctacgagcagctcctacactcacctggtcacagcataggtatagctctcaagagtcagaaccctctcttcttcttcttcttcttctttttacaccattccgtcatatgctcggctgcttccctagagctccgtcgccatgcatatatttcgcgacgagccggagactcctacagggccaggctacgtccgaccgttctgtctactgccacccttccacctcttcagacgtttcagctccaccaccacgacgctgatgttgtcagtgctgccccgcgacatggcgaactccaccagcaccgcggcggcatcactggccgagctcccgcggatggtgtcagggcacttggaagccgcgcgcccgcacagacagctcttcgcgaccctgcaggccacctcgttggacatgacgtcccacagcccgtcgctcgccaggatgatgaactcgtccctgtgcgtgcgctctgtgacagtcacctctggttccgctgatatgaatggcttcatgtaatagtcaccaattgaccttgatgtcgcaagcacacccaggacacggtaccccatccagttaatgaccctgccacctgctgattctaccctttccaactcatcaggccgatctggctgcggcacggggggtcgacgacgggtcgagacgagcgctgccgcttcgactcgacggcacgtccggccggccgtccgcacgccagagccacggggtttgttggcgcggtgccggcgcagagtccttgggggcctgcccttttccggcctgcgcgcgacacctgtgatcccggccgtaggaaacatctcgggccacggcacggcaggcaatggcgtcatgacggcgacttggacgcgtgcgcgcacggcgtaagcgtccccaaattcttcagccgtatcgcgagcggttctaaatcaatcccgcgccccgccgcgcccctccccctcccccacgcgccccctcccaccccccctccccccgccgccgtcccccgcctcccccgccgcggccaccaggaacggcacggcgacggcgaccgcgtcctccatctcccgccgccgcccgatcaccgacaccgcgccgtgcgacacgggcttgggccaccccgccaccgcagaagccccttcatgcggctcgggcgccaccttcgccgactcgcgggacgtgtccgcggaggtgcccgacaccggacgcacccgcatcgccacctctccctccgcccccacgggtgcagtgcgccccagccgccttagctccagcctccgacgtcgcgccagtcgcgccatggcggccagtaccttgtccgtagcctcgggcgtgggcgcctcgagcgcgggcacgccatggtcatccgtgctatcctgcgcctcgagcgccggcacgccatggtcttgcgtgctagcctcactgctgctcatctcttcccttctcccactcggccactcccactcccactacaagcggaagcaaggagcgcaaaagaagt

SEQ ID NO: 1970 - DNA, 1595 bp, Zea mays
  Clone ID: ZEAMA-23APR03-CLUSTER1757_1
acattagcaaatcctatttaaaagaaccagcacgccggtcctcctgatggccgccgccggcgagggcgaggctgagcgtgtgtcagcgctgctgcggggaaataacgggggagggcgggttcgctttcgtcgcctcggcggataaggcgggggcgggggacctgcgcgcggcggaggcggcgcgggagatggcgtgggagcagctccactcgggcccctggagcgaggtcggcaccgcctggagggacgcctacgcgctcgcctgcctcaacgtcgcgcggctccgcacccacgcggccagcggcggagatagcgaccgctccgccgcgctccgggcactcgacatggggctcatcatgggaggcaacctactgcgcgccgacctcgaggcggcactggcgcgcatctccgcggaagcgtgtggcggaagcgaaggtggcgagggggtcgtggataaggaggaccagaggtggagggaagcgctcgacaggaaccgagacatcgctgatgcactgaaaattcttccagcgaactctttatcctgtaagaaagttgagaggcgatcatgcatttccttggaggagttcatatgtaattactttttgcgcgacacccccgtcataattagtggcaccatcgaacattggcctgcaaggacaaaatggaaggacattgagtacctcaagaaggttgctggagatcgtactgttcctgttgaagttggaaagaattacgtgtgtagtgagtggaagcaggagcttatcacattttctcagttcctggatagaatgtcgtcaactgtctgtccatcaaacttgacatatctggctcagcatccattgtttgagcagataaaagagctcagtgaagacataattgttcccgaatactgttacgctggtggaggtgaactccaatcacttaatgcttggtttggtccagagggtacagtgacaccattgcaccatgatccgcatcacaacatcttagctcaggtattgggcaggaagtatattagactctatcctgctttcatagctgaggacttgtatccacacacagagactatgttaagcaataccagtcaggtagatgttgacaatattgatttgaaggagtttccaagggttgaaaacctggaattcattgactgtatattggaggagggcgacctgctttacatccccccaaaatggtggcactacgtcagatctctctccaccagtttctcggttagcttttggtggcgtgcagcagttcaaccttcaggaggctcatagcgtcaatttcatgtttcccatattatcaaaaccagattgcagaaaaccaaagtaacctgacaggaccctttgtttcaggtgactccgcttttgaatggatgtacacacgtcatcaccaatgtccattgttagttttacttttaccacagtgattaaaatattgaaattgcttatatgccgaccatcatgctatcatgtgattcttgaaagcagaggttgaaggatgtcttcactgctacaatgtcaaattcttgaaattgtaaaggtggacttactagctccgagaatttaatttagatgattctcgatctgact

SEQ ID NO: 1971 - DNA, 1025 bp, Zea mays
  Clone ID: ZEAMA-23APR03-CLUSTER17581_3
atctacacacgccgttcccaagtcccaaccgaacacacacagcaacagcggccacctgccgctcagtgcgtgcgccgtgccatgaccatgaagctcgatgccccggcgaggcagaagagccaggacgcagagcagaacggcaggacagcggccgcgggcgtcctcggcattgacgagccgtggagccagccgaaactccgtctcaccggccacgcgcaggccgacgccgacgccctggtgccgccgctcaacttcgccatggtcgacgacggcatcttccgctcgggcctcccggacgccggcagcttccgcttcctgctctccctcaatctgcgctccgtcgtgtacctgtgcccggagccgtacccggaggagaacgcgcggttcctgcagcagaacgggatccagcttcaccagttcggcatcgaagggagcaagagtggttcgacagtgccggatgccatggtggtgcaggaaccattcgtctacatccctgaagagaccatccgagaggcgctcaaagttattcttgacgcaagaaaccagccggtgctcatccactgcaagagaggcaagcatcgcactggctgcgtcgtcgggtgcctgaggaagctgcagaagtggtgcctgtcttcggtgttcgacgagtacctgcacttcgcggcggcgaaggcgaggagcactgaccagaggttcatggagctgttcgacgcttcgagcttgacgcacctggcggcctcacagtattgagcgctgaccagagcgagtggctcccgaccggtcccgatcctgcaaccatgctgcatcaagcaagcgattttcccctgctgtttccgaagcaactcggccgagaataatgctgctggaaccatgagtgtgtccgcgagaattgataggcaatggccttaggttttgttgtgtgagtgctgtggttgcttcgtgtgcaactgatttcagattctgaattggtgatggctgtgattggtgatggctgaactctgaactgaagatgtttcgacgccctg

SEQ ID NO: 1972 - DNA, 974 bp, Zea mays
  Clone ID: ZEAMA-23APR03-CLUSTER17597_4
gtcgcacagaatcccttggtgcaccctgcgagggcctcctcgaaaccctagcttgcccagcccctccgggccatgggcaagtacatgcgcaaggccaaggcttccagcgaggttgtcatcatggatgtcgccgccgctcctctcggagtccgcacccgagcgcgcgccctcgcgctgcagcgtctgcaggagcagcagacgcagtgggaggaaggtgctggcggcgagtacctggagctaaggaaccggaggctcgagaagctgccgccgccgccggcgaccacgaggaggtcgggcgggaggaaagcggcagccgaggccgccgcaactaaggaggctgaggcgtcgtacggggagaacatgctcgagttggaggccatggagaggattaccagggagacgacgccttgcagcttgattaacacccagatgactagcactcctgggtccacgagatccagccactcttgccaccgcagggtgaacgctcctccggtgcacgccgtcccaagttctagggagatgaatgagtacttcgctgccgaacagcgacggcaacagcaggatttcattgacaagtacaacttcgatcctgcaaacgactgccctctcccaggcaggtttgagtgggtgaagctagactgatggattcagagggacgagagagcagcaggcatggaatggaactcactccccgctccctccacaccaccccagcgttgtggcagaggcgcataccgtcgtgttagcttcgtttctgctgtaaaaaaaaacccttagtgttttatttagcatgtagccttaactggtcgtgtgttacagtacagaactgatgctgagttacaacaccctgatctgatccctcaactccaatgtaacccttaacagctcattctgtaaggaacctgtcaccctgttacctgttgctgaactaatgaagtagagctagataatgacgttttatcgtagttatt

SEQ ID NO: 1973 - DNA, 1669 bp, Zea mays
  Clone ID: ZEAMA-23APR03-CLUSTER17620_2
aaagcgcggtgctatccacccatcagctctcgtatccgcagcgcccggaatggcggcaccctcccacgtcctcccgttcctgtcccccgccggcgggtgtgccgcctcctccgcccgcgcccactctggctaccgcgctggtctcctgcgctgctcggccgcggccggccaggcgggcttcttcactcgcctcggtcgcctcataaaggagaaggccaagagcgacgtggagaagctcttctccggcttctccaagacccgcgagaacctctctgtcgtcgacgagctccttacttactggaaccttgccgacaccgaccgcgtcctcgacgacctcgaggaggcgctgctggtctcggacttcgggcccaaaatctcattccggatcgtcgacacgctccgcgaggagatccgcgacggcaagctcaagtcttgcgccgagataaaggccgcgctgaaaaggtgcatcctggaactgctgacgagcaagggcggcaactcggagctcaatctcggattcaggaagccggctgtcatcatgatcgtgggagtgaatggcgggggaaagacgacctcgctagggaagcttgcttacaggtttaagaacgaaggtgtcaaggtattgatggcagcaggtgataccttcagagcagcagctcgtgaccagctagaagtttgggctgagagaactggttcagagattgtcattgacaatgacaagaaggcacagcctccagcagttctttcgcaggcagtaaagcgcgggaagcgtgaagggtttgatgtggttctatgtgatacatcaggaagacttcatacaaattatggtttgatggaagagctggtttcttgcaaaaaagtcctagctaaagcgcttcctggtgctccaaatgagattttactggttctcgatggaacgactggcttgaacatgttacagcaagcaagggagttcaatgatgttgtaggagtcactggattcatcctgacaaagctcgatggcactgcgcgcggtggctgtgtggttagcgttgtggatgagcttggcatcccggtgaagttcattggggttggtgaagggatggaagacctgcaaccttttgacgccgaggcatttgttgaagccatcttcccatgattttgggttttggagagataattcatgcttctactgtaaagctttggactctgccgttgctttggctcgttgtgcgagttttttttcttgttgggaactacgatagtggtaggaagcacatggcccgtgtcaagatgaactggaactggagttgaggcaaacaaagtggagcgtccagctttggagccctaagggatggtttggtaatcagagaattagatagggtctatagcggagaaatctccttgttgaggactagtttggtgactagagaaatgcaggggatgagaaatagaggggattcttcatctatgggtcctctacatttccctggtcaataaattagccctgaatggattcttctcccatggatcccttaaaatttcctattcaccaaatcagtcttaaactgttgagttgcaccaggaggattcagagaaagaattgtagaatatgctcgatcctatttttttaaactccagttgtaacaaaattcttggatgtattaaaaaaaaaaaaaaaaaagcggcc

SEQ ID NO: 1974 - DNA, 1425 bp, Zea mays
  Clone ID: ZEAMA-23APR03-CLUSTER17639_1
atacccaacaacaggccaacacagcgggacaccaacctgtggtcgcgacgccacccggccgtataaatccacgccgccccgtcgccgccggatcctgccagtgccagcacaccacgggtttcccctgtcggagagaggacgccttttggtgctgtccctgtacttctcctttcgaaaggatctctctgcgcgccggggcggcgatggcggcggcgccggcgcccctgccggcgcccgtcgcagactggtgggagcgcgtcaacggctcgccggcgtggcaggacgggatcttctgggccctcgccgtcctctacggtgccatcgctaccgcctcattcatccaagttgccaggatacagtgcagagtccctgaatatggatggacaacccaaaaggtcttccagttcctgaatttcgtggtcaatggggccaggtgctctatctttgctttccgtcgccaagtgcaacaagtgaaccctccgatctttcagcatgttattcttgatcttcctgggcttgcattcttcactacctatgcactgttagcgcttttctgggccgagatactttaccaagcacgtggaataatgactgatcgacttcgatcaggtttctacatcattaattgtgttgtttatgcattgcagggttttctgtggttgtggctgtggtggaatccaaatcattctatgctagtcacttctaagttatttattgcaggtctttcttttttcactgccttgggttttctgatctatggaggaaggcttttcatcatgctgaaatattttcctattgagtcaaaagggaggcaacaaaagctgagagaagtcggcagagttgccaccatatgtttctgttgtttctcggcgcgatgcataatgatgtgcttcaatgcatttgacgaggaagctgacctcgatgttcttgaccatccagttctgaatttgttctattacctgcttgtggagattctcccttcatctcttgtcctgtacattctaaggaggattcctgcaaagctacggctatcccagtatcaccccgtcagcagcagctagagacgaggcattaccatctgctgagccaaaaatggtgactgctgtcaagctatgaaaaatcaactgcaacgccctctatataatatttgtattggtagcctctctgcaaaatatatatagggataagacttgcctcggttatttcttttctagaccctactcacatggaagccatccaatatttttccgtagctcacctattgctaaccctgttagttcaatctgctaattttatgatttttagtgtttgagcataatgaaggaaagcaccattgtaaaactgaactacatgaaaagttgaacatagattttttttcctggagatgagtttaacagcgagttaccctttggaatcgttgaacaa

SEQ ID NO: 1975 - DNA, 1469 bp, Zea mays
  Clone ID: ZEAMA-23APR03-CLUSTER17646_1
acattctctacgcctcgtgctccttcccttctaccgttcggctgcgtacggcgtacccgcgtctccccagatccgctgccccgccctctcgacgcggcaattcctcgaacgccccgcgcgagccacgcccacccgctgccccgccccccccacggcgcaattcctcgcacgccccgcgcgagccacgccctccccgcccatgggctcgctcccgtcccggccctcgccggcctcggccgaatgcgccccgcggcgccccgccacggtggcgtcgtcggagctggcgccgctcttctcgccgcggcgccggcccctgcaccacttcctcgcccctctacacgtggcggaggggggggcgttcgcgcgcgcgctgctccgcgcgcggggccgtctcttcttcacgcgcgggcgcgagtcgggcctcgtggcgcgcaacaccgcgcagacgttggcgtcgctgggcctcgcgcgggccggcttcctcgcccccgtcgcggcgctccacggcgacatcggcgcgctcttccccggggacgtcctcgtgctcctctccaagtccggggcctccgacgagctgctcgcgctcgcgccctgcgcgcgcgccaagggcgcctacctcgtctcgctcacctccgcggcctcgggggatgactgcccgctcgccgcggcctgcgacctcaacgtccacctgccgctgcagggggaggtgtgcccctttggcctcgcgcccgtcacctccaccgccatccagatggtgtttggggacaccgtcatcgccgccatcatggaggcaaggcgactctccagggaccagtacgcttccaaccatcccgctggcaagatcggcaagaccctcatcttcaaggttaaggatgttatgaagaaacagaatgagcttcctctgtgcaaggagggagatatgataatggaccaactcaccgagctcaccagtaaaggttgtggttgtctgcttgtggttgatgaagagcatcatttgattgggaccttcactgatggtgatctccggcggacactgaaggcaagcgggccagctatcttcagtctcacagttggagagatgtgcaacaggaacccaaggacaatcactgcggaggcaatggcagttgaagccatggagaagatggaggcaccaccttcacccgtgcagttcttgcctgttgtcaacgagaacaacgtcgtgtgtggaatcatcacattgcatggattggtctctgccggattgtagacttgtgtggcaccattacctgttagctagctgttaccgctggagtatttatgtggagcctgaactcttcagtgtacccttatgtacagtatagtggtcgctaagaggaacatggtacactgcttataatgcttgtgtttttgtacttaattttaaatgccgattgccttggtttcttttaaaaaaaaaaaaaaaagggcggccactcgcgatctagaactag

SEQ ID NO: 1976 - DNA, 1954 bp, Zea mays
  Clone ID: ZEAMA-23APR03-CLUSTER1764_3
gataataaagccctacctctcacatcggcaacaggacgaggccagggcatccacgaccacgacacggacacagggagccgcccgccatgccaccgcacggcggcatgctcgcgtacgccgccctcgcgctcgcggcgctgcggctgctgctgtcctacaagtcggcgctctacgcgctgcgccgcctgtggcggtgcgccgacgagtgggcgcaggcgtaccagtaccacgaggtgccgcgcttcgccggggcccagtgcgggtgcgacggcgcagagaacccgctgttccgcaaggtcgccgcgtacgtggcggcgctgccgtcgctggaggacgccgacgctgcgtgcgtggtgtcgtcggcgtcaaggaccaacggcgggctgtccctgcagctcggcccgggccacaccgcgagggacacgtaccttggcgcgcgcctcgcgtggaccagcgcgggcggcgagcgcctggtgctgcgcgtgcgccgccacgaccgctcccgcgtgctgcgaccttacctgcagcacgtggagtccgtggcagaggagatggagcagcgccgccgcgagctgcgcctcttcgccaacaccgccgtggacgcgaccacgggcgcgccgcgctgggcgtcggcgcccttcacccacccggccacgctcgacgccgtggccatggacccggacctcaaggcccgcgtccgcgccgacctcgagagcttcctcaagggccgcgcctactaccaccgcctcggccgcgtctggcgccggagctacctcctctacggcccgccgggcaccggcaagtccacgttcgcggcggccatggccaggttcctgggctacgacgtctacgacgtcgacctgtctcgcgccgacgccgccggcgacgacctccgcgcgctgctcctgcacaccaccccgcgctcgctcgtcctcgtcgaggacctggaccggtacctgcagggcggcggcggggacgcggaggcgcgcgcggccagggtgctgagcttcatggacggcatcgcgtcgtgctgcggcgaggagcgtgtcatggtgttcaccatgcgcgggggcaaggacgccgtggacgccgcggtggtgcgcccgggccggctggacgtgcacatccagttcacgctctgcgacttcgaggccttcaaggcgctggccagcaactacctggggctcaaggaccacaagctgtacccgcaggtggaggaggggttccacgccgccggcgcccgcctcagcccggccgagcttggcgagatcatgctggccaaccgcgcgtccccgagccgcgcgctccgcagcgtgatcaccaagctccagcgcgtcgcgtccggaggcgccgcgccgccgcggaacccggcgcacaggcggaacacgagctggtccggcgcctggaccggacagcagtgggaggaccaggcccagccggcgcgagccagcgcggtctccgtggaggtcgacgagacggccgccggggcaccggcgacgtgcggcggggtgttcggaaaggaggcgcccatgagggagttcaagaagctgtacgggctgatcaaggtcaggagccggagggagggcgccggcgccgtgccactggaaggcgacgcgcacgggccgccgacgccgggcaaccatgacagggagcggtgatcgccgtggatggtagaattgtagtggtgtgcaaaaagaaagcatttttatttctttctctttttttttcttgttattgttacagtttatcacactactctactaatgtgtcagtgactgcaagtaggaatggcaatagatgaattggatggagcaaaaatccgcctccgatcaacctggccacggtctcaactgcgagtgtaattttaaacccacagtcgaacccgtcgagtttcaggtcacctcaggtttttacttagtgtgcacttttaaacaatataagcaattaaaacaat

SEQ ID NO: 1977 - DNA, 1753 bp, Zea mays
  Clone ID: ZEAMA-23APR03-CLUSTER17683_1
cttagaaccaaaaccgtgttagctcgtaccaaagtaatacgtgccgaaccgtactctaggctactgatttcgggtcggcccgacccattctccacttcttcagcactagtcgcgggctcgcggtcgcggccgaggatatcgaagctgcgagcaacgcgatcgagcgcgacgcgggtgagacccgagagagccgtgagggagccagggagggaaccccgaacccccgtcgtcgtctcgtgctcggtctctccggctggcggcatggagagtgccgtgctcgcctgccaggcgccaaccgccgccgccgctgcggcgcctggagcgggaggggacagaggagccgagggcgtggtgatgctgaggcggtcgggcctcgcggcgtgcctcacgtgtccgctctgcggccgtctcctccgcgacgccgccaccatcaccgagtgtctccacaccttttgcaggaagtgcatatcagaggagtttgtaaataaggaagtgtgctgctgccctgtttgtagcattgacttgggctgtgctccactggagaaactcagaattgatcatagcctacagtatgtaaggtcaaaggtatttccttctaaaaaacgaaaggttgaggatccagaagtcacatcgccaattacatcacctataaagacgaaagtacggtctttatcttctttgacaaaacatgctcctcaaatgtctatgcaaaaatgcttgagaaagaggagaacaaaagcttcatgcttacaaaacctccctttgcactcaaccttgcggggcagtagtaatatcacaaaaaaatctggggggtggagacctttagggtgtcactttcgagcagctaaaaagaaaaggtctcttagacctaaatcagacgatataaagacagctggaaaaaggactgatgatccagttgatgtaactcttgccagtcaagcaaagactaggaagcagattacaagacgtggaaatctggagaagagaactggaaccaagaaagtattgattttaaagggaaaacagaaaaatacgaagacaaagaatacgcctaataagaggagattgccagcattatggttctaccttcttgctgcttttgaccagaaaggacatcctcctctgccgcagataccatcaaaatttctgaggatcaaggatgtaaatttgcctgcttccttcatacagaaatacctcgcgcagaaacttaatctttcaagtgaaactgaggtggagatattctgcggtggcagaccagtgagcccagggatcaccctgcacgacctagcagaccactggattggcaaacgatcgaagggccgagtgcggtcatctgtgggcacgcccgccgctgaattcgtgctgaaggtattttacgccaggtcaggagcgccccttccaaaaactgaaagcaaccaagactgatggagagcttcgagcttcccttcgtttcagaaccagcagtgtatcgtttgactcgtaggaccaattgattaatggtatcttagtaacatgtacatagatgttagtgtcacggattagaagctcccatgggcttactgttatatatatccccctagttcagtgcatttttaccgcttatatttttactgacaaagtgtgtagtatctaggctgtgtaattaaaactggatgagatgtcgagatagagtcaaatttcaagttgcactggttcagctggtatgaatcctggctgaaccggttttaaacctgcccaaaaaaaaaaaaaaaaa

SEQ ID NO: 1978 - DNA, 1830 bp, Zea mays
  Clone ID: ZEAMA-23APR03-CLUSTER17691_2
gcacgagaccattacctagaacatcctaatcgaaaactctcgctagtcgtcatggcggcttccgcggcagcgttccccctcccaccgccgacgcctcctcttcgactttcacatgtcttttgatatcacagaaaaggattgcccctgccttcactgctgtgaatgccagggacgtttctgtcgccctacaatatatggacattggacttgatagttggcaaactttcttctatatactggacgttccagctttcgccaacctgctgctttaaccacatcttttccttctttcccgattttgcctctcactatcatcaattaccgctaaaagtgaaacaagtgttctccctatggccaagacatcacttcctcctggattccggtttcatccaactgatgtagaactcacagtctactatttaaagaggaaactactgggaaaacacttacgctgcaatgctatcactgagattgatctatacaagttcgccccttgggatcttccaggctggaggacgaggaaatagctgcttctggtgttaaactggatgcctgcgttctatgcaaaatctttcagaaaagtggcccagggcccaagattggcgcacagtatggtgccccattcaatgaagaagactggaacgatgccagtaatgtagagtgttctccatgtgtgccttctgtggccccttgcgcacctgaatcaagtcgtggtgggttgaattctgctggtcaacgcctggctgtgagttatgatgtcaaggtttccttgggctcctcggcagaaggtatcaacagacctgctgtcaatggagttcatcctgtcagaccttctcctgatgctcctaatgactgcatacacattcaattgctggctgaggttatgagatgttcctcaacctcaatgcatgttttacgtactgctggtgacgatggtttgctggctgattcaactgctgactacagtagtgataatagaatatctttggatgctattgaaactatattctgtgaagtggatgagcttgggccccaggctatggtgaacaatactaaccattgtgactcatgcggtgagtatttgattcaccctacgatggtggcacgaggagctgaacagtacttagagctaaatgacctgtccttttcgctcaccgatggtcctgattcctgtggcgtgcttttctctaatggtgtatctgttgagcaactaccggatcttgagctcaggtttgagcagttctctcctgaccacatctccaataccgctattgcttccacatcaacaacggttggttcatctgcttcagtgcccttattggaggatcacaggacctgattcagaattggagtcatctggcgcacatgttaattgaatctaggaggatctgcaggacaaaggcataatgctccctttttttcaattttcatgaagttagaatttttttttggatgaaggcacggattagtgaccacttggcacagaaatatgtttgtgttgcggcttgtgaatccaggaccatttctctgcctgtagttttgcatggtagaactagatgggcaacaacaaaatgtgttcagtattgaataacgcactcactgcattaactactttgcctagcttagtatagtattctggatcttgaggcagggtagaagtgggggtgtgggacaatgtactcacagcttgttgtcatttagcagcaatatcttgtttcggtaacctgtggcaatatcttgtttggttacctggatttgctagtgtccatgcaagatgatgttttcgttgacgccataataataaatagcaatcgattttaaaaaaaaaaa

SEQ ID NO: 1979 - DNA, 892 bp, Zea mays
  Clone ID: ZEAMA-23APR03-CLUSTER17698_2
agatcagcattcaaactagggtttactcctgccgctccgagaaaacaaacaagcgtcagctccgccggcttcctccgcgctttctccccgccgccgccgccgccgctccttccctacgccaggcacgccaagatgaagctcgtcaggttccttatgaagctgaacaatgagacggtcaccatcgagctcaagaacggcacggttgtacacggcaccatcaccggtgttgacataagcatgaacactcatctgaagacagtgaagcttacactgaaagggaagaaccctgtaacacttgaccacctcagcgtgcgaggaaacaacatccgctactacatccttcccgacagcttaaacctggaaaccttgctggtagaggaaacccctagggtgaagcctaagaagccaactacaggaaagcctttggggcgtggtcgcggccgaggtcgtggacgtggtcggggccgggggccacgctgagctttatcgttcccctgctgtcggctcccttgcaagacaagtttcctctacaatgtaaaacatctttcctctgcacgctgtgtgaaagaatgttgcatcgttacccttctgatgaaggtggacgaaatatctcaatgtcagtagttcttgctgtgaaatcacgctgtctacctggcccccctactcatgcctatcttaggtttacactctagttaatttgtaatgttttttttctcccccgtggaatacatgtaagctgccgcagagctttggatgtctagggttgtatacttgggtttgccacatgggggggactggggattattgatctggagctatgcctgtggctggctctgttagatcttgacctctgcttgaaactaaattaccattgtgctgctcgggggctcgc

SEQ ID NO: 1980 - DNA, 1312 bp, Zea mays
  Clone ID: ZEAMA-23APR03-CLUSTER176_4
tttgcacccaaacgcggggagctgaagtattccagagagcacatgaggtgggtggatgagtcgatctggattcgccgcgcagctgagcccgtcgagctcattgaagcggtaatagctgtcctacagagctcttgtgtctggaattcaatttgttcaggtgttccattgaagcggtgatctgaagcttttgagacattgggttttggcctctggtgcgagaaggtgaagaagctgcgaaggcattcgcgagggaagagaagacacgaaaagggctgccgctggagctgaagcagaaagtttcacgggagactctgcagagactgcacgatttgggggaaggttctaataccacagaacaacaagaagctatagaagcatggcgtgttgggaagcttagggacatgagaagtacatcttctaagaatttacaaattttggcctcttcagtgaagattcaaggatgttaaagcgagccttggagtttaactggcaaatgctattggaggacattggtctttggatacctcccactatatggtaaaatcatatggattggatctgagatttaagttcgacttgtactcacttgcaggcaaggaaagtgcaagtgtgtatacttcttggtatctcaacgatgtggactactatggcgggttcgagcaagatgagctggatgagctgtttgaggcgatgcaatcaaactacaaggcctggtgcttaggttttgcacccctgtgtgttggaggagatatggaatcagtggcagttcaggagtttagcaggacactcttcaatatacgtccggacattgcactaaatgttgcccagacgatcttccagagcgatgtgcgcagcctcctcccgcacgttagtgtcccatgccacattgttcagagcaccaaggatctcgcggtgccagttgtggtgtctgagtacctgcacaggcaccttggtggcgactccatcgtggaggtgatgccctctgaaggccatcttccccagcttagctctccagacatcgtaacccctgtcttactccggcacatccagcatgacatcgcagtctaggttggccagtcgttccaacaagacaatgtggaaattgtagcatatatatatgaccatgtaatctattgttcgtctaatgtaggataccgtgttggatgctctgacatcttaagtccttgagaagctcttcatgtcatttgtgttttttccatgaaacagaaactactaccatgtggtatatgttggtgtcgatgatcattttcagctgtagggtttgcttatatatgtgtttctcttcaaaagg

SEQ ID NO: 1981 - DNA, 1216 bp, Zea mays
  Clone ID: ZEAMA-23APR03-CLUSTER17706_4
gcacgagaccattacctagaacatcctaatcgaaaaccctgatttgaggcagtattcctcatatttggcaaaggaggccgaattccagccagattctctattctccccctgatttccagcagcttccaaaactttctaaagaaacaaaagaagagtctaacacagctcgtgatccttccgccagggcagcagacggatggcttcgtcggtgccggcgccatcggggtcggtgatcaccgtggcgtcgtcttcttcctcagcagccgcggccgcggtgtgcggcacgggctccccatgcgctgcgtgcaagttcctgcgtcgcaagtgccagccggactgcgtgttcgcgccctacttcccaccggacaacccgcagaagttcgtgcacgtgcaccgcgtcttcggcgcgagcaacgtgaccaagctgctgaacgagctccaccccttccagcgcgaggacgccgtgaactccctcgcctacgaggccgacatgcgcctccgcgaccccgtctacggctgcgtcggcgtcatctccatcctccagcacaacctacgacagctccagcaggacctcgcccgcgccaagtacgaactctccaagtaccaggcggcagcggcagcttctgcgtccacggcgccgacagggccgcaagcgatggcagagttcatcggcaacgcgatgccgaacggcgcgcacaacttcatcaacattggacactcggcggcgctcgggtccctcggaggctccgcctccgtgttcgggcaggagcagttcggcaacgcgcagatgctgtccaggagctatgacggcggcgagcccatcgcgaggctggggatcaacggcggcggctacgagttcggctactcgaccgcgatgggcgggtctggcgctgtctccggcctcgggacgctcggcatcagcccgttcttgaagtctggtaccgccggcggcgacgagaagcccaacggcggtcagtaggcggatcgatccatccactcccatcaatcttgtcaggttactgaattggaacgagaaaaaaaatccataaagttctgaagactaagtggatcgagcctgcgcgcgcgagggttgtcgtaaaatgtccaccgctattaggagggctaatgatgaattccccgtcgattgtagctacatgcatgaaggagtacacacgcatgcctatgttgtttgaattaatcaaattgcttgtttgtt

SEQ ID NO: 1982 - DNA, 780 bp, Zea mays
  unsure (1)..(780): unsure at all n locations
  Clone ID: ZEAMA-23APR03-CLUSTER1772_14
nttcgactctcacctcccaaggtccctttgtttttctcgatctgaaagcgccgcagtagcagccatggacgtgagcggagcaggcggtaaggcgaagaagggcgcggcggggcgcaaggccggcggnccgacgaagaagtcggtgtcgcggtcctccagggccgggctgcagttccccgtcagccgcgtcgggcggtacctcaaaaagggccggtacgcgcagcgtgtaggcacgggtgcccccgtctacctcgccgccgtcctggagtacctcgcggccgaggtgctcgagctcgccggcaacgcggcaagggacaacaagaagacgcgcatcatcccgcgccacgtgctcctcgccatccgcaacgacgaggagctcggcaagctgctggccggcgtcaccatcgcccacggcggcgtcctccccaacatccacactgtgctcctccccaagaaggtggccgagaaggcggccaaggagcccaagaaggccgctaagtcccccaagaaggcgtagagtgatctcctgtcttagaacaatattaccattagcaatcgtgcagttagactagatcatgtttagtgtagatccgcaatgttcttgtccctgcagccatctggaacggtttatctagtacatccgtgcactttccttgctaattgcaaaaaaagcggtctaatcttttgtttcgtttcttgcgtacatttgcgatttatgctcgttaatacacttattaatatctgaaaaaaaaaaaaaaaagcttatcgatggcgtcgacc

SEQ ID NO: 1983 - DNA, 1923 bp, Zea mays
  Clone ID: ZEAMA-23APR03-CLUSTER1776_1
cccaatccaggcgggcaatccccacaggccacaatggcgtcgctgctgcgcctcccctcgctgctgtccccgtccaagcccctgctccggcgccggctgccggcggcgaggctcgcggcatccgccgcatccaggggtcaagcctcggcgaccgcgggcgcggcggcgccggcggccgcggagacccgcggcggggacagggaggggcaggtcacgccgcggtccgcggacttcaacgcctggtacacggacgtcatcgccgctgccgagctcgcggactacgggcccgtgcgagggaccatggtcattcgcccctacggatacgccatctgggaggccatccaggattatttgaatgtcaaattcaaggagacagggcacagcaacatgtacttccctcagttcattccatactcatttatagagaaggaagctagtcatgttgaagggtttagcccggagcttgcattggtcaccattggaggaggaaaagaactagaggaaaagcttgtggtaagaccaacaagtgagaccattgtaaaccacatgttcaccaaatggattcagagctatcgtgatcttcctctcatgataaaccagtgggctaacgtgacaagatgggaaatgcggactaaaccattcatccgaactcttgaatttttatggcaagaaggccatacagcccatgccacccttgaggaggcagagaaggaggcgatgcagatgattgatgtatataccaaatttgcctttgagcatgctgcaataccagttattccaggtagaaaatcaagagtagaaacatttgcgggtgccaatcggacctacactatagaagctatgatgggtgacaagaaggccttacaagctggaactagtcacaaccttggccaaaacttttcacgagcttttggaacacagtttatggatgaaaatggtcaaatcgaacacgtctggcagacctcttgggctattagtactcggtttgttggtgggattatcatgacccatggcgatgatgccggtctaatgcttcctccaaggattgcacccattcaggtcataatagtaccaatatggaaaaagggtgatgagaaggctgttgttgtggaagctgtagattcagttcaaaaaatactcaaagaagcaggaattagagttaaagtggacgactcagagctgcgaactcctggatggaaattcaatcactatgagatgaaaggggttcctgtaagaatagagataggtccacgtgatgtcacaaataagagtgttgtggtttctaggcgtgatgtccctggaaagcaaggaaaggagtttggagtgtctatggagccttcgatattggtgaaccatataaagggtcgtctagatgacatacaagcatcccttttacagaaggccataacattccgtgatagtaacattgtcgacgtaagctcatatggcgagctgaaggaagctatttctgaaggaaagtgggctagaggtccttggtcagctagcgatgctgatgagctgaaagtgaaagaagagaccagcgccaccatcagatgctacccattcgagcagcctgagggcaccaagaaatgcttcatgactggcaaccccgcagaggaagtcgcaattttcgcaaagtcatactaggcccactgtgtgtccactgtcagagataagaacagcatttccttttcaattttataggattgtaccctgtctacctaaggtccagattgatgacggttcatggaacagcattgtgtgctgctgatatttaaaatgtaaatttgataatcaataggtcaattttgttccactaaaaaaagaaaaaaaaaaaatgcctactcagtatcaaatgtttcaaacaagttccccaatatgctaaatcatgcaagttatcacaaaaaaaaaaaaaaaaaaaaa

SEQ ID NO: 1984 - DNA, 1846 bp, Zea mays
  Clone ID: ZEAMA-23APR03-CLUSTER1777_1
ctctctcgctgcgcctccgcccccaaatcttagcaaaggcctcccactcaaattcctcgcggcgaccgatatggttgggagcgtgggcatcgggctggccgatctgggtgcaagagccgtctccatgaacggggcggggaaggcgctgcgtcctgccgtggcggcggcagcggctgccgccgcggagacgctcccgatggagctggatccgtcggaggccttagtggccgctgcggtggaggcgaagggcgaggaggctgccaacgggaggagggagttcgtgatgggcaggaacgtacacacctgctgcttggccgtgaaggagcccgacgcggacgccgtggagaccggcgagcgggagccaaccatggccagcgtctgcgcgctcttccgccggtcgctctacagaggcatccagaaacacgtcggataccgctagagtctcgcctgcttatctgaaacattgccctaaaggcagcaggaatcaaagcgatgcttaacgacctcagtagcacggtcgtgtttgaaaggccaacgcaggcagattgaggccgaagggcgccgctggcgtgtgctgggaatatagctcacgaagtactgatccctggtgtcaatattgaaaagctagactatttcctgaatgggttagttgagaaacgggcgacttggtaccaggacgggataagccagccaccctgcattgccagagacgtaggtgttgagagctgtctctgtggccttcacaagtagcgagccttttgctttgcaagtgggttcattcttgagtcgagttaaaagtgttatgttgtactgtgttcattgcagaaccgagacaaacctattaatgttaacattggaacaactgtgaagggggcagttgatgatctagacttggttatcaaaacccttgaggaaaacggctttaaagatcggttttatattcattgtgatggtgccctttttggattgatgataccatttgttaagaaggcacctcaagtgacatttaaaaagcctattgggagtgtcagcgtctctgggcacaagtttgtcggatgccccatgccatgtggtgtccagataacaaggttggagcatataaatgccctttctagcaatgtggagtatctggcgtcaagggatgcaacaatcatgggaagcaggaatggccatgcccctatcttcctctggtacaccctcaacaggaagggctacagaggctttcagaaagaagtccaaaagtgcttgagaaacgcacactacctaaaagatcgcctcaaggaagcaggaatcggagcgatgcttaacgagctcagtagcacagtcgtgtttgaaaggccaaaggatgaagaatttgtccgaaggtggcagctggcttgtgaagggaatatagctcacgttgtggtgatgcccagtgtcaacattgacaagctagactatttcctgaatgagttagtggacaaacgggcgacttggtaccaggacgggataagccagccaccctgcattgccagagacgtaggtgttgagaactgtctctgtggccttcacaagtagcgagccttttgctttgcaagtgggttcactcttgagtcgagttaaaaagtgttatgttgtactgtgttcattcttgagttgagttaaaaagtgttatgttgtactgtgttcatgcgttctgcttctgtgtttctccacagtgtagcttatttgttgccatgggaataaaattccttctattaaattgattgatggaagttgcatcacggttggctttatccttccaaaattctgaaaaaaaaaaaaaaaaaaaaaaaaactcgagggggggcccggtaccctattcgcc

SEQ ID NO: 1985 - DNA, 1760 bp, Zea mays
  Clone ID: ZEAMA-23APR03-CLUSTER1777_4
ctctctcgctgcgcctccgcccccaaatcttagcaaaggcctcccactcaaattcctcgcggcgaccgatatggttgggagcgtgggcaacgggctggccgatctgggtgcaagagccgtctccatgaacggggcggggaaggcgctgcgtcctgccggggcggcggcggcggccgccgccgcggagacgctcccgatggagctggatccgtcggaggccttagtggccgctgcggtggaggcgaagggcgaggaggctgccaacgggaggagggagttcgtgatggggaggaacgtacacacctcctgcttcgccgtgaaggagcccgacgcggacgacgaggaaaccggcgagcgggaggcaaccatggctagcgttctcgcgctctaccgccgctcgctcgtcgaacgcaccaagcaccacctcggttacccatacaatctggactttgattatggtgcactgacccagctgcagcacttctcaattaacaaccttggtgatcccttcatcgagagcaactatggtgtccattcccggcagtttgaggttggagtgctggattggtttgctcgcctctgggagttagaaaaggacgagtactggggatatattactaactgtggtacagaaggaaatctgcatgggattcttgttgggagggaggtgttccctgatggaatattgtatgcttctcgtgagtcccattattcagtattcaaagcagcaagaatgtacagaatggattgtgtcaaagttgacacccttatgtctggggaaatagattgtgctgatttccagagaaagttattgcagaaccgagacaaacctgccatcattaatgttaacattggaacaactgtgaagggggcagttgatgatctagacttggttatcaaaaccctagaggaaaacggctttaaaaatcggttttatattcattgtgatggtgccctttttggattgatgataccatttgttaagaaggcacctcaagtgacatttaaaaagcctattgggagtgtcagcgtctctgggcacaagtttgtcggatgccccatgccatgtggtgtccagataacaaggttggagcacataaatgccctttctagcaatgtggagtatctggcgtcaagggatgcaacaatcatgggaagcaggaatggtcatgcccctatcttcctctggtacaccctcaacaggaagggctacagaggcttccagaaagaagtccaaaagtgcttgagaaacgcgcactacctaaaagatcgcctcaaggaagcaggaatcggagcgatgcttaacgagctcagtagcacagtcgtgtttgaaaggccaaaggatgaagaatttgtccgaaggtgggcagctggcttgtgaagggaatatagctcacgttgtggtgatgcccagtgtcaacattgacaagctagactatttcctgaatgagttagtggacaaacgggcgacttggtaccaggacgggataagccagccaccctgcattgccagagacgtaggtgttgagaactgtctctgtggccttcacaagtagcgagccttttgctttgcaagcgggttcattcttgagtcgagttaaaagtgttatgttgtactgtgttcattcttgagttgagttaaaaagtgttatgttgtactgtgttcgagcgttctgcttctgtgtttctccacagtgtagcttatttgttgccatgggaataaaattccttctattaaattgattgatggaagttgcatc

SEQ ID NO: 1986 - DNA, 793 bp, Zea mays
  unsure (1)..(793): unsure at all n locations
  Clone ID: ZEAMA-23APR03-CLUSTER17841_1
agatacgaaacagaggtcgactaagtcgcaactcgcaagcaatagagagcgaagacatagccaagcgacgtcgtggccccgttctctcgtcaagcagatcttcgtccacgggcggcatggatggcccgagaggcctcgcgccggggcgcgggcgcgggcgtggggaagggcggacggtgccgccggaatggatcggcggttccgggtccgggcagggcgccgtccccgatggctcgtggagttacagctgggggtggacatcgggccccgaaggtggctggggctatggccacggctcggcgcagccccccgcggcgctgcagacgggtttgcctacggcggcagcggtggtggaggaagcgggcgtggcggaattgaattcagcttcggtggcctatctggcggtttcggctggggagccggtggcgggccgtttggggttggaggaggccacggcagctggagcgcgcgtggtggtgggttcagcggcggcgggaggcagcggccaccgcgaggccgcggacgtggcagcaactgaagaaggcctattagcatctgggagcatagtctatactggttgtggcatcatggcatgaatgactgtacccgtaaccgtaagcaatacgcctttgcttcaaactgtgttcaacagttgacactcttctaatatatattactccatcttgactgtacccgtaacagtaatcaatacgcctttgcttcaaactgtgttcancagttaacactcttctaatatatattactccatctgtttttaaaaaaaaaaaaaaaa

SEQ ID NO: 1987 - DNA, 812 bp, Zea mays
  Clone ID: ZEAMA-23APR03-CLUSTER18007_3
accggctacggttcgcttcttcccttcacctccatagacctctgatttacttactacgttgttcttggatctgaatcactttagggtttagagttagatgctttcagatccattcgtgcagtagcctccatgtataagcggcgactcctttttcgtcggctttgatgcttgggatgcgatgttcagtcgtaggattgagatcgggaaggatcgtgatctgtccaagaaattttggagcaccaaggaccctgggcagcagccattcagtttcagcattggtcagggttcagtgatcaaaggatgggacgagggagttatgaccatgcaagtgggtgaagttgctcgtatccagtgcacgcctgattatgcttatggagccggcgggttcccagcctggggaattcaaccaaactcagtgcttgtgttcgagattgaagtcctcagtgcccagtaattcgcatctgtcagctatggaaacgttggccatgcttctcaagtaatgaaataattccgttatcacctcatgctacatacagcagattggtgttatgagttaaaaatcctgtgaaactttagcattctgtaaccgtttatgtcgagtttatggagttccttgtgtggcgcctcaagtcaagttctcgtcaaagattgtaatctgatggcttccattgtgacacttgtaggcggctgcaataaacttgatgcaattcttgcagtcgaatcctgtgaaaaaaaaaaaaaaaaaagcggccgcttttttttttttttttttggggtttttttttttttttttttttttttttttttttttt

SEQ ID NO: 1988 - DNA, 1711 bp, Zea mays
  Clone ID: ZEAMA-23APR03-CLUSTER18037_1
atgactcttagagatcataatattccttctaatggggatatcaaaacctcagaagaagcagatacagcatatgttcttgtaggttgaatagaagagtggaagcaccaagctgtaccaatggggcgtggaaaagtagagctgaagaagattgagaatccaacaaaccgccaagttaccttctccaagaggcggatggggttgttcaagaaggcaaatgagctagccattctttgtgatgtgcaaatcggagtcatcatattctctggcagtggcaggatgtacgagtactccagccctccatggagaatagcaagcgtctttgacaggtacctgaaagcccctagcacccgtttcgaggagatggacatccagcagaaaatcgtccaggagatgactaggatgaaggatgagaggaacagactgaggatgatcatggcgcagtacatggcggaggacctggcatcgttctccgcgcaggatctgagcaaccttgagcagcaaatcgagttctcgctgtacaaagttcgcctcaggaagcaagagctactcgaccagcagctgctcgagatccaccaaagggagatgcatatgccagcagagcagggcggctacctgtgcctcatgaacccggctgcggctattgctagcgggcagcaccagcaggctggcgagatggtgggaattaacccgaggccgttcccgtggtgggacgtgggagccagtggcagtggcagtggcagccagagccagcagcagctgctgcacggccgggacgccgcggagtcgtcgatgacggcgctcgggctgtcgccgcagctgcatgggtacaggctccagccgcggcagcccaacctgcagcaggacgccgacatccatggctggctgtgatttgctttggtcgtgggtgtgcgtcctcaacgagacgagacgacgctgaacgtgcagctcctctgcttgcgacctgttcattctagagtctttgatcatgacctgcccccgtaatgaaaccgccagtagtcgtcaatatctccttctctaacctaagattggacctaagagggacataatgtggtcgcaaatccatataatagagtctatccgtcgcctcagccaacgtgccctgctgaaaataaactttactggagctggcttgttagtgctgggagctgggttgtcatcgcgttgcgcgtcgtttgtgttgaggttgtaaagtagaaactgtgcgagaatgaaatgagaacctctgtttctttattgaataaagcaatgtatttatacgacgccgacatccatggctggctgtgatttgctttggtcgtgggtgtgcgtcctcaacgagacgagacgacgctgaacgtgcagctcctctgcttgcgacctgttcattctagagtctttgatcatgacctgcccccgtaatgaaaccgccagtagtcgtcaatatctccttctctaacctaagattggacctaagagggacataatgtgatcgcaaatccatataatagagtctatccgtcgcctcagccaacgtgccctgctgaaaataaactttactggagctggcttgttagtgctgggagctgggttgtcatcgcgttgcgcgtcgtttgtgttgaggttgtaaagtagaaactgtgcgagaatgaaatgagaacctctgtttctttattgaataaagcaatgtatttatacaaaaaaaaaaaaaaaa

SEQ ID NO: 1989 - DNA, 1361 bp, Zea mays
  Clone ID: ZEAMA-23APR03-CLUSTER1807_1
actaaagggaacaaaagctggagctccaccgcggtgcgccgctctagaactagtggatcccccgggctgcaggaattcggcacgagctctacatcctctttcagttccctctctggatcccttcatatcgagaggcactgccacaccaccaccccacccatgctcaacatgatgactgatctgagctgcgggccgtcgtccaaggtcaaagggggggaggcggcggcgccgacgggctccggcggcgacaggcaggggcagggagggaaggtggagaagcgcatcgagaacacgacgaaccggcaggtgaccttctgcaagcaccgccaagcgccgcaaaagcatgcgcacgagcgcgcacggcctgccgaagcaggcgtacgccgcgtcggcgctcttcgacgccgcgggcccgcccctcctcttcaccaaccgctgcagcctctacgagtacgccaacaacagtgtgaagtcgaccattgcgaggtacacgaaggccaacagtgactcctccaacactggccacagttgcagaagtcaatgcccagtactaccagcaggagtcctccaagctgcgacagatgatccacagcttgcaaaacgcaaacactaggaacatagtgggagattccatccacaccatgggcctcagggatcttaaacaaatggagggcaagctggagaaagccataatcaagattagagctagaaagaatgagctgctatacgctgaagttgactatatgcaaaaaagggagatggatctgcagactgacaacatgtacctgaggagcaagatcgctgagagtaatgaaacggggcagccggcgatgcacatgacgatgggagcgccgccgacgagcgagtacgaccacatggcccctttcgactcgagaaactttctgcaagtgagcatgcctcagcactactcccatcagctgcaacctacaaccctccagctcggatgatgaaatcagcgctatacctggcggcgcccggcccccaatcgagatagatcacgcatgcagttatatcatgtgccaaatcgagatctcaagtaactctacgtacgtttgcttaattattaataattgtgattagtgcaactgttagggtatatatatttgtgagtgccaccactgtgtgcgtgcatttgtacgtgtgaatttagctgttgcatctactactattgtaccctccggccaggccatatcatcagaaacgcgggtttatttacgcatacttatatatatatatgatttgtgtgctttatatagattgaaaatagtatgttggcctctctcttattaaaaaaaaaaaaaaaaaaaaaaaaaaaagtactctgcgttgttaccactgct

SEQ ID NO: 1990 - DNA, 1248 bp, Zea mays
  Clone ID: ZEAMA-23APR03-CLUSTER1807_2
ctcacatcctctttcagttccctctctggatctcttcctgaagagaggcactgccacaccaccacgccacccatgctcaacatgatgaccgatctgagctgcgggccgtcgtccaaggcgaaaggagggcagccggcagcgacgacgggctccggcggcgacaggcaggggaggggcaagatcgagatcaagcgcatcgagaacacgacgaaccggcaggtcaccttctgcaagcgccgcaacggcctgctcaagaaggcgtacgagctctcggtgctctgcgacgccgaggtcgcgctcgtcgtcttctccagccgcggccgcctctacgagtacgccaacaacagtgtgaagtccaccattgagaggtacaagaaggccaacagtgacacctccaactctggcacagttgcagaagtcaatgctcagcactaccagcaggagtcctccaagctgcgccaggcgatcgatagcttgcaaaacgcaaacaggaccatagtgggagattcaatccacaccatgggcctcagggagcttaagcagatggagggcaagctggagaaggccataaacaagattagagctagaaagaatgagctcttgtatgctgaagttgaatatatgcaaaaaagggagatggatctgcagactgacaacatgtacctgaggagcaagatcgccgagaataatgaaacggggcagccagcgatgaacatgattggagtgccgtcgacgagcgagtacgatcacatggccccttttgttgactcgagaaactttcttcaggtgaacatgcagcagcagcctcagcactactcccatcagctgcaaccaacgaccctccaactcggatgatgaaattaagaatcttcggccaacaatccatgcacgcaagcacgcagtaaatcatgtgtccaactcagataaaaaaatctactctagcgtttgtataattattaataatcgtgactagtaaactgttatatatatagccatgtgtgtgtggcgcctacatatatgtcatgtggctgtacggcgagttttttttttcacaagcgtttgcagcagcatttggtgttgctcatccatcaattaatcgcaagaaattaaacctgtcaccaccgtgtgtgcatttgtacgtgttaatgcagttgttgtatccgttaattgtaccctccatcagataaacgcgggtgcgcgtatgcatacttatttatgtgtatgattatttgtgtagtttatatcgcc

SEQ ID NO: 1991 - DNA, 1785 bp, Zea mays
  Clone ID: ZEAMA-23APR03-CLUSTER182482_1
tttttttttttttttgcatcaacatcctcatccttcgatggttatttatatttgattgagggatcaagtggctacttcagcaaagtcgtctgattgtttacaacgtctactgttttctagaaattcgcaggtattggctgcaatgactacatcatttgatagtaatcacagaagttgtacgtgctaaaaaaaatctgcagcttcctagaacttcgcatccacttacaggctagttacagttccatgccgatcaatccaaagcagaatcatatccattcaactggcaagctaagctacctgatgacccactcgtcgctacgttcctcagcgacggcgccgcagcgcggctcctcctggcggtggtagtctctccggatggtccacagcagctcgctgcaccgccgcatggacggccgctcatccctggccgccgcgacgctctgcgctgccagcgccagcgccctctccacggcggccaccgacgccgggctccgccgcatcctggggtccatggccaccacggcttcccctgctctgcacctctgcaacgcccatttggtggtgagccgggcctcgccgccgcgggtgcgctcgacgggcggccggccggtggctagctcgacgaggaggacgccgaaggcgtacacgtcgctcttgtcggtcagctggtacgtgctcaggtactccgggtccacgtacccggcggcgctcctcgccggcgttgcgtcggagcctgagcccgaccccgaggccgcagtcccggccagcccaaagccggccaccttcgccgtcagcgcgtcggtcagtagcacgcccgacgaccggatgccgccatggatgatcggacgctctttgtactcgtgcaggtaggtgatggcctgagcaacgtcgatcgcgatgttgagccgttgcgcgagctctaaaccatttccacatgattcatccaaatgttccctcaaggaaccattgccgacatactcgactacgacgagactatcagctgcgcgttcgaagaatccaaagagcctcgccagattcctgtgctggatcttctcaagctccctccagagttcagccgtcggactctggtcgttcagcttcgtgacacatttgacggcgatctgagaaccatccctgagctttcctctgtacatggtgcttgagcgtccctgccttatcacgttcttttcgctgaagtttgatgttgccttcgacacgtcagcgatggtgagagccctgccttcctgccatgatcctgctgctgcactcaagtttgcttcattccatccatgataggatcctgaatccatggagcgcttgctcttcttctcctcctcctcctcctcttccccggctttgacctgccggcgcggcacgaagcagccggtgaaggcgccggcgacccgctgcgccgccgcactgaaggagccactcctgctgacctgggaggagcgggcgctgtaggccgagagctgccggccgtagccgcaggcatcaggggaggaggacgtccggccatagccgtaagaagcaccggagcccgaaagctcggcgcttttcatgccgccgctggaccgcctccttgacgctgctggccacgatgccatgtgtgggaggcagctctcatctggtgccggccgcgctccatccccggcgctgcgtgggcgtttgatatggggcgacgactcgacgctgttcaacggaacggggcgtggttggtgtcgccgtccggccgctgggacggctgggtcatacgagccccgcgtcgcatgccgaggatggcct

SEQ ID NO: 1992 - DNA, 508 bp, Zea mays
  unsure (1)..(508): unsure at all n locations
  Clone ID: ZEAMA-23APR03-CLUSTER18297_2
gattattgatttacacccttctcttctcatcaaatggngcnggcggcgtggtctacgtgttctggactcccctccgaccccctgacgatagcgtctaagatggccacaaccagatccgcgtccctgctcgcgctgctcctcctggtctctgcgaccgccgccgctgccgggacgagcaagggccgcgcgggggtgcggcgtgccaggatctggcgacgcggggccagtgcgcggcgagcggcgggtgccggtggtgccgcagcgaggcgctcgacgacatgtgcttcgaggccatcgaggcgtggcgccttccgcgcaggtgttctcctgcgacccaccctccggcgccgcccacgcccgcttcaactgaagtaatgccgcggccggccgccggcgtaanntcctgctatcgccttgggtcgggatcgctcgatctgatctcgtttgtcgccaggccttcgttgttttctttgctggatctgagatatacaaaagcgtgtttcatgct

SEQ ID NO: 1993 - DNA, 880 bp, Zea mays
  Clone ID: ZEAMA-23APR03-CLUSTER1834_34
agtctcctctagccgtctcgcgcgcttcaccttccccaccccgccgccgccatcgcacgcccgcagccgcatccgctatgggtgcgtacaagtacgtctcggagctatggcggaggaagcagtccgatgtgatgcggttcgtgcagcgcgtgcgctgctgggagtacaggcagcagccggccatcgtccgcctcacaaggcccactcgccctgacaaggcgccgcctcggctacaaggccaagcagggttatgttgtttaccgtgtccgtgttaggcgtggtggcaggaagaggcctgtgcctaaaggtattgtctatggcaagccaaagcaccagggtatcacccagctcaagttccagaggaacaagaggtctgttgctgaggagagggctggacgaaagcttggtggactcagggttctcaactcctactgggtgaatgaggatagcacctacaagtactttgagatcattcttgttgatgtggcccacactaccatccgcaatgatccaaggatcaactggctatgcaatcctgtgcacaagcaccgggagctccgtggtctcacctccgcaggcaagaagttccgtggcctgcgtggcaagggccacactcaccacaagaataggccgtcgaggagggccacctggaagcgcaaccagaccctttccctccgccgctaccgttgagcacatacatcttgatgttctgctactgtggaacctgcctcatgcatgctctgatagtatttggtatttttgttgcatcgttaaattttgctacccatgttacaagctccttgaactctgttatcagtgtaccatggagaaattgaagcgaactatgtttgtggtcaaaaaaaaaaaaaaaaaagcggcc

SEQ ID NO: 1994 - DNA, 790 bp, Zea mays
  Clone ID: ZEAMA-23APR03-CLUSTER1834_52
aatcggttttttttttttttttttttacataaaagattttattatcaagctgcttagttcacacataaacatgcagcccataaacaatgacgtacatataaccaaacatgaatatcgcatcgacagaattgccatcgcttgctgatgacgaagactagagcaggtcccttagcactgagatcgccgcagcatgcttctcctggtcacgagatctgtcccggatgccactgcacaccggccggccgctctcgtcgtacagtatcatcccgctgaaccgcggcagctggcacttgacgcccatcagcaccctcctctgccatatcggccgcagcggagtgccgctggacagggcagcgggcagctccctccactccaccagtccccacgcccatggccgccggagccgccgccgccgccgccttctgctctacccccaccgcgtcggcgtcgtcgcctcccaagatcccgtactcgcagtcaccaccctccacgccggcaaccttatggacgacgacgcggccccgcaccgaccggctgctgccgccgtcggcgccgtagagcttctccttccagagagccacggacaggcagaggcccatggtgatggcgtgatgcgatggcgatgctagcactggatcagggtgcaggaacagcagcagacagtagggggtgtagggtagggggcagtgtggcgcggttggcttcttatggcgagcggcgccaagaatattattgatgcgcgcacaggttgcccgtgagtcttgccgtttgtagtgatggagtgagtgtt

SEQ ID NO: 1995 - DNA, 1191 bp, Zea mays
  unsure (1)..(1191): unsure at all n locations
  Clone ID: ZEAMA-23APR03-CLUSTER183_2
aattccttccaatcggcacctcgccgtcctcgtgtgcaatccccagctctcctcgcccctccctcccaaactccagcggccccccctgaccaagctccggggacggatggacggaggagccggctttccgggcacgcagccggtctcccgctcgccggaggacgtcttccgggactaccgcgcgcgccaggccggcctgatcagggcgctcaccaccgatgtggagaagttctacgtgatgtgcgacccagagaaggagaacttatgtttatatggacttcctaatgagacatgggaaataaacttgcctgctgaagaggtccctcctgaactgccagagccagctcttggaattaattttgctcgtgatgggatggatgaaaaagattggctatcacttgttgcagtgcatagtgattcttggctaatgtctgttgcattttattttggagcaaggtttggattcgataaagaatccaggaaacgtctcttcaccatgatcaataaccttcccagcatatatgaggttgtcacaggaacagccaagaaagagcccaaagaaaaaactcctaaaagcaacattaagactaacaaatctggctcaaagccctcgcgccatacggaacccaactcaagggtcccaaagatgccacctccaaaggacgaggagagtgaagaggaggaaggggaaccacaggaagaccaggagagtgcgctgtgtggcgcatgtggcctaggttatgacgacttctggatctgctgcgacttatgcgagacatggttccacggcaagtgtgttaagatcaccccagctaaagcggaccacatcaagcagtataagtgcccctcctgcacgggaagcaagagggccaaggtttgatccacgatccaaggagcctttgacgagagctgtaagctgactcttcgggctagggcagctaatagattcgaatgcttgttttgatacaaattacgagtactgacgaaccgtaaactgatgtagtttgtgtggccctcaaagcatctatgtcctgacttgtgtggtttaggtttcctttggcacagtttctaatctaatatgagttttgtcaattagagagaagtggctatgctgaatttatgagctgattttataaagtgatgatataaaataaactaaaagactagagccgnaaaatgtagcttttctga

SEQ ID NO: 1996 - DNA, 1620 bp, Zea mays
  Clone ID: ZEAMA-23APR03-CLUSTER184141_1
acgaaaactacggcgtcgtggctcttttgcgcgcgctcatctagcacctcaacttcaacccttcggtgggcgacagcgggggagagctggacctagcagccgcgtgcccgacgagagcgacatcgcgaaggcctcgtccgtcggcggcgtggaagagcccgacaagagcggcttcaccttctccatcgccttgggcttggccccggcggccgccttcgtggaccccgctcccttccctatcctccgccgtcaggagggccacggcgggagcgagctctccaggatagcaagatatggaaggagagggttatttcactaatcttcttcaggatggattacataatgaaatagacactgaaatccagcagacaatgcccataaatgatagcaatccatcatcaaaggctaatcagaagcacaaaggaaaaaatttcactgaggacgaagatagacttcttatttctgcttggttgaatgtcagtatggattctacgcaagggacaaatcaaacaagagacacattttggaaaagaatctacttgtactatgaggccaacaaaggtgatttgggaagaaatatttctgaacgtacgcagacttcattgttgcatcgttggggaactatacaagaagctgtgagcaagttttgtggttgtataactagtattgataatagaaaccaaagtggtatgactatacacgacagggtaaccaatccaaaactcgtgttattctgttttttttaaggaccacggctctaacaaatttttatttcctttcaggtggagcaggctgagattttatttaaggaacaagaccacccaaagcataggtcttttacattcagacattgttggcatgtattgagaaaccaacccaaatggcttgacaaactgcgtcaattggcggaggtaaaagcaagtaacaaaaaacagaagaccaccaaaaattcaagccctggaattgttgatcttaccactcaggatggccatgataaagaccctcaagagattgtcaactcatcaatagatgcaccaaagagaccacctggtaagaagaaggcaaaagaagcattgcgtcgaggtggaaatgatgcttgcacagaagcattggaacttctttgggcaaagaaaagagaggatgaggtagccaaggaactcaagagagaggaaagatatgccatgtcatatgcccttgataaagagaggcttgaacttgacaaagagaggcacgttctagagaaagagcggcttgaaaatgaggccaataatatttacttgaagacaattgcagaagaacaaaaaatcatgttattggatctcaattccatgactgagttgcagagggagtactacacgagcttgcaagctgagattgtggctcgacgcaggaattagatggttgctatttttagtttgattaaacactttgttgtcggtacttattaggtaagtattttatagtgctcttcagtatgctgacagtcttattaggtgaatattatagtgtttttttcagtttgcagtcgatacctcttaggtgaacataatagtgcttttaagttcactgtcattttcattagatgaatattttagtgcttttccaaaaaaaaaaaaaaaa

SEQ ID NO: 1997 - DNA, 2121 bp, Zea mays
  Clone ID: ZEAMA-23APR03-CLUSTER1841_3
ggcttcccggtgcgcgtcatcatccccggctgcatcggtggccgcatggtcaagtggctcaagcgcatcatcgtcacccccgccgagtcggacaattactaccatttcaaggacaaccgcgtcctgccgtcgcacgtcgacgccgagctcgccaacgcagaagcgtggtggtacaagccggagtacatcatcaacgagctgaacataaactcggtgataacgacgccgtgccacgacgagatcctgccaatcaacgcattcaccacacagcgtccctacacactgaagggatacgcttactccggcggcggcaagaaggtgactcgggtggaggtgacgctggacggcggcgagacatggctggtgtgcactgatcacccggagaagccaacaaagtacggcaagtactggtgctggtgcttttggtctttggaggtggaggtgctggacctcctctctgccaaagaaatagcagtcagggcatgggacgagagtttgaatacgcagccagagaagctgatctggaacgtaatgggtatgatgaacaactgctggttccgcgtaaagactaatgtttgcaagccccacaagggcgagattgggatcgtctttgaccaccccaccctccccggcaacgagtccggcggttggatggccaaggagaagcacctggagacggcggaggcagcagcaccgggcctcaagcgcagcacgtccacgccgttcatgaacactaccgacgtcggcaaggagttcaccatgtccgaggtgcgcaagcacgcgtcgcaggagtcggcgtggatagtcgtgcacggccacgtctacgactgcaccaagttcctcaaggaccacccgggcggcgccgacagcatcctcatcaacgccggcaccgactgcaccgaggagttcgacgccatccactccgacaaggccaaggcgctcctcgacacctaccgcatcggtgagctcatcaccacgggcaccggctacagctccgacaactccgtccacggcggctccgtcctgtcgcacctcgcgcccatccgccgagccgtcagggcccccgcgctctccaacccgcgcgaaaagatccactgccgcctcgtcggcaagaaggagctgtcccgcgacgtccgcctcttccgcttctcgctgccgtcgcccgaccaggtgctcggcctccccatcggcaagcacatcttcgtctgcgccagcattgaagggaagctgtgcatgcgggcgtacacgcccacgagcatggtggacgagatcggccacttcgacctcctcgtcaaggtctacttcaagaacgagcaccctaagttccccaacggcggcctcatgacccagtacctcgactcgcttcccgtcggcggctacatcgacgtcaagggcccgcttggccacgtggagtacaccggccgcggcagcttcgtcatcaacggcaagcagcgccatgcgagccgcctcgccatgatctgcggcggaagtgggatcacgcccatgtaccagatcatccaggcggtgctgcgcgaccagccggaggaccacacggagatgcacctcgtgtacgccaaccggacggaggacgacatcctcctccgcgacgagctcgaccggtgggcggccgagtacccgtacaggctcaaggtgtggtacgtcatcgaccaggtaaaggaggggtggaagtacagcgttgggttcgtcacggaggccgtcctgcgggagcacgttccggaaggtggggacgacacgctggcccttgcctgcggaccaccgccgatgatccagtttgccatctcgcccaacttggagaagatgaagtacgacatggccaattctttcgtcgtgttctaagatcgcgcgggcagtagccaattaataattaatttgatatacgtagctaccacggaccagatatatgtatataaccagccgacttgtcagtgctaattcgtgagatgcatggatatgttggaagatactgtagttgaccttgtactcagaatgtgcaacatgtaaattctgagggtattgtttatttacttatgtatgctactactagcgtttaactattattgttgttaaccatcggacataaatatctcaaaatgttctttc

SEQ ID NO: 1998 - DNA, 1032 bp, Zea mays
  Clone ID: ZEAMA-23APR03-CLUSTER184503_1
taaaaacacagtttttttttttttgccggtttaaaaaaaacaaaaacaaagtcagggcactgaaaacaacagtggccagaggctacagtagatttccacgaggaggagatggccgtacgtatgcatggagaaggcaaaatcaagggccaaaaaaaaatagccttcccattgatgatctccatctccacgaatgaatgcatgcttgttgttgcttcttcttcttctaacaaacaagaggtttcgatcgaccgccacgccagcaatggtgtcgtccatgtttgttaattctaccagaggaagaagcttctccttgaagagccgccgccgcctcccttgccgtggcctcgccttgacgagttgccctctcctcctcctgctgctgctgctgctgctttgtccatgagcttgccattgccagcagcagcagctttcttgcgtgagctggtggcgagctttgtctcctccttgccgccgccgccaccaccacgatgccctctatcgtcgtcttctttgccgtgtttgtgttccggcgggggcgacggcgacttgttggcggctttagctgggccggtggaggcatcggaagcgagggagtcgccgtcgccatcgtcgtcgtcgtaatcctgcttcttattgccgccgccgctgatcatgtaaccgtagccatcgtcgacgctgctcccttggttggcgctaccgccagcgtcgtcgtcatcgtcgtggccatgcatatgcatgggcgaggcaaggtacattgtccagcccgactcgcagctgttgcagccctcgccgccggcgtcgtcgtcccctccggtgatgtgggaggaggactccatggatggctggcgggatggaatggaatggaatggaatgcgatgacggacagatcaaaaatgcaaaacagaacaccaagggatgataataggattatgtgttattggaaaacggaaccaggctggagcagagagggaacgtgggaatgagcagccagcagctaggtggatgatggaatatagagctgtcttgtcttgt

SEQ ID NO: 1999 - DNA, 1103 bp, Zea mays
  Clone ID: ZEAMA-23APR03-CLUSTER1847_14
accccgttccaactcctacctacgcagcagaggccagccacctccccgtcgctctcacgctcttcgtgcccgccgcctctcctccgtctctgcctctctccctctcccctcccgtctgacgcacatggcctccatcgccggatcttcggccctctccttcgccaggcccgtcaaggcaatcaacacaaattctctagctttctccccggcgaggaagggcaacacattcctccgcctgcaaccaatgcctatgagatctgtttcctgcgctgccaagaaggatacaacagacaaggtttgtgagattgtgaagaagccttgctcttcctgaccatactgaagtttgcggtgaatcgaaattctctgaactcggtgcagattcactggacacggttgagattgtgatgagtctcgaggagcacttcgatattagcgtggaggagtccagcgcacaaacaatcgccacagttgaagacgccgcggacctcatcgacaagcttgttgctggcaaagcgtagttctgtacctcctctatcgttgtcctaccactctaggtctatcccttgatctaggtttctatggtctgaagatttgtgattttctccgcactgttgttgctatccccgtgtcgtaataatacgagatgttttaagcggttgaacattacggtggtgtaatcagagtaatctgttgctgttaaggtgcattgttgtatgaaaaaaaaaaaaaaaaaaaaaaaaaaaaaaaaaaaaaaaaaaaaaaaaaaaaaaaaaaaaaaaaaataaaaaaaaaaaaaaaaaaaaaaaaaaaatatttgaaaaaaaaaaaaaaaacaaaaattagggttccttgggccgaaccccctttagggggaatttccaccccctggggggcgtttcttagggaacccaccctggacccaaagttgggggaaaaaggggcaatagtggttccttgggaaaaatttttttccgttaaaattcccccccaatttacagccggaaaacttaaagggaaaacctggggggcccaatgggggaccctaccccaattaattgggttggccttcatggccctttttcaaacgggaaaccttgccggcc

SEQ ID NO: 2000 - DNA, 1656 bp, Zea mays
  Clone ID: ZEAMA-23APR03-CLUSTER185786_1
aagaaaaacatattgcagcacctagctatacgtcttgctgagcgcaaatctacagcaccgtaacttgcacggttgcgtgaactttgaggtgttgaagcataaagacagcaaccatctacccaaatggtacaaatgtacaatttctcagtacgagccttcttgtccgctggtacaaccacaaccactacccaacccagtttctgaaaaagccctctgcagcgatctactttgctcttctcggcacgaacaatacaaccagctagctagtcactagttttcagtcaccaaaggtgcgtgtgcgtgcttgtacagcaactaatttaattagcctcttgtcctcacgatggttatcgtgcctctgccagcggtgcggagcctggtgaagccggccaccgtcctgcccgacgggcccggccggttggcagccgacacgcgtggggcgcacgcgaactcccccacggggtgccggacggggcgagccggcggcgtgaggatccaccggttgatgtcggcgagcgtgaccccgccgtccgcgccgccgggcttcaccacggcgaacggatacgccgccaccgcggtggagcccggagcccggcgccttctggtgccgcttgccgcgcccctgcccctttctcttctggttcggtcgccgagcgcttcgacgagctgttggcggcacgagtggttcggtgctgctgctgctgctgctgctgggcgccgccggtgtaactggcccgtaggtccacgtcgcagtgcgagtgccgtcgccggagtagtcttgtccggggatgtcggcaacgtcggcagatcggaatgatgatgatgatcatcatctgcggaaacacaatcacctgtgtactctgtagtctgttcttcttcattaaatatatgaactatgcctgccaagtgccaagctaagacaggcgcatgatgcacaaatgatacgtatacgtgcgctgctaatctcgagtgggcccgcgcatataataaatttcacaagcgccgtattatttaatggagtagtaatcatcaaagcttgtcctagttgttaggaaccgtgcaacaatcatgaaatcaatggcaatttatttatagtaccaaagtccttggagtcagtaaaaaagaagaaagcaagaaatggcagtgtaaactactaaactggagtaggccaaagaaagcacttgagaagttgagagcaaaccagattgtaaactcttgagagcgctgcaggaactgaagaggtgacactcgccccacaggctcatgagtagttcatcgtccagctccccgccggtggccgccgctgctgacgcctcggacaccggagactccatgcatgtggggccgaagagctcagagtctcgggcatggagactaccaaagcagcagagctgtggatcccatccaaggaggaggctgctgctgaaggtgctcgcgtcgtccaagtccaagctgcatgccgtggtgtccgaaggccaccaacacgccgcctgcctccgggcgtgcacagcgctttcctggagtgtcgtctgacctgctgtctccatggagtagcagtggcgtggactgtcgtctagtctagtgtcgtctgacctgctgtctccatggagtagcagtggtggactgtgtctgtgtgggtgcgtagctagagaggag

SEQ ID NO: 2001 - DNA, 1649 bp, Zea mays
  Clone ID: ZEAMA-23APR03-CLUSTER18659_1
gcaccgagaccattacctagaacatcctaatagaaaagtggcgtggagtggagtggagctggccgccgaagagagaccccgagaggccgagagaaagagagagaggccgtgctaggtgtggtgagtggtgacccagatggaggtggccgccacgtcgccgtggccggaggagccgctgctgcggcccccatctccgcagcccaatctccgtgccgacgccgccagctccggcgacccggcttcccctcctccatcagcggtgaggccgagtcgcctcgcggcgctcatcgggcgcgcggaggggcggcgcggtacccttgatgctggttccagagacgacgtcgcctgaactgctgcgaatggcgcgcggactgggcgaactcccgccccgtcctcgcgctcgacatcgcctggaacgtcgccttcgccgcggccgccgccgccgtgctctcgtcctctgccgaggagagccccgtcaagccgctccgcctgtgggtcgtcgggtacgccgcccagtgcctggtccacgtcgggctcgtctgcgccgacacccgccgcgagacgcggcgcgcccggagatcggcgtctgacgtcgagtctgccggcgctgggacagacagctcggacgccgacagcgaagatgacgaaagggcggaagggaggagcagctatacaggtcgttgcgagacgatgaacacgttgatatcatttctgtggtggatcattggattctactggatattctcaggtggggaggtgctcgagcacggcgctccaaggctgtattggttaaccattgtgtttctggccttcgatgtgttttttgctgtgttttgtgttgctgtggcctgtttcattgggattgcactgtgttgctgcttgccttgtgtcattgctattctgtatgctctggctggccaggagggtgcatcagatgcagatattagtgttcttctgagatatagatattctgatccaagcgaagatggtgagaagggggtcgatgaaggactgatgatccctatcctgaataatagtggaatgtcaacaagtgagcgtattctccttcgcgaggatgctgaatgctgtatctgtctatcatcatatgaagatggagctgagttatctgctctcccctgcaatcatcacttccactggccttgtattaccaaatggctgcgcatgaatgcgacgtgtccactctgcaagtataacattctcaaaggcagtgacagtgcatgaccaacttattctgacataacttccgtacacagcttcctttcaagtggcgttctcaaagcaatgctgttttcacagctgtgttattaagtgacagtgatctgtgtttttctgtttaggatgtggtgataacctgtagatggatgaaaccttatttacaattgtccttgttaatatcgcttgtaaatacctttcgagttgttttctacgtatgatggaattggaattgctgaaatactttgtgattctggtttgactttatgctgttttaacagctgtgtttttcaaaaacagaaatgtgtgttctgctgtttaggatgtggtgagtggtgacaacctgtaaatggatgaaacctaactcagtcaccctaatatcgtttgtaaatatctttggagttgttttcaaaaaa

SEQ ID NO: 2002 - DNA, 1976 bp, Zea mays
  Clone ID: ZEAMA-23APR03-CLUSTER187271_1
ttttttttttttttttcgttgcaaataaggctctgctattggttttcctcatccatggaaaaaccctacagctgttccacaacacgcaatgtcaatgtcctcctgaaccagtcaaggctcaaagttcagatgccattcatttgaacgatatcatcatgacacttgacacagggcgcgcggtcaacgccacaagtttcagtttttttttccttcacaaaatctccagaacgcatttgcatcattgtacaatgatcgggattcatcgttcatggagcactatcgtatcgtcatcctctgcagatctcggtgagctcgtcgaggccgtcggactcggactcagactcggcggcgatcctggacgcggacgacgacaggaagcggaagccggcgtcgctggcgctcttccggacggaggccagctgctgggacctcttgcagtaggcgatgagcccctggacggggttctccacctccgagctcgcgctgctgctcctcctcagcgccggccccgcgccgccgtcggacgacccgctcgaggtccggaccgacgaggaggccgacgaggaggagcacgaggacggcggcagcgcggggacgggggacatcttgttcgacggagagtagcggacgatgacgctggagaaggagcgcctgtgcgccccgtgctcgcgttccttgcaccgccctcctgcggcagcggcagcggcgcggctggtgccaccgtgagaggcgacgcacctggtgttcattctggtctgggcgaacgggttcttcgtccacgccctgaggtggccgtggccatgggcggcgatctcctcccgcgcgcccctcgcggcgacggcgccaagaccgctcttctcgtcggccgggctccccggcctggccgcgaacaagatggtcttgaggtacgccttggacgccctgagccggaggcccaggttgagctgcctcatgaaccgtagcctcctggaccacggcttcctcggcgccgcggcggcgtcctcggccagcgccaggccggccgcgtactcctggaagtactcctcgacgttgagctccccgctggcgtagccgtagtcgtagcacgacgagttggccggcgacgcgttgcacgactcgtacggcgtcgccggggccgtgctgctgacgccgcggaacaggagctccctgtccctgtccctgtccctgccgcggccccggccccggccgtccaggagctcctccaccatctggatgcgcggcggcaggtgcagcggcagcagcttccccttgtagaagagctcgtctgccggcgacgcagccagggtctcgccccaccgggtccagcggcgccgacatgaactcgaactcctgcgccacgggcgtcctggccgcggcagagctcaggtccatgtcgatgtaatcgtcctcctcttgctcttcctcctcctcctcccgttgccgctgcagtacctctccacaccactcctctcgccttcccgccattgctccacctgcgtatccctaattcgcctgcccgaacgcccgaaccggagtgatgagtgctgcggcgtggcgtggcgtgcgtctgcgatggttcggtgctaaaaacggcagaggaatcgatggagtggggtttatttatatatataattttgctaacaaggctcgtgctttacaggggccccgccccgccggcccgccctaccgtctcctcccgctcccgcatgatctgcttcttgttcgcgtctcggccatctccctgtccctgccgctgcacgagcacgaagccaacagcaacagcaacagtggccctggccgtcgctgtccgggtgtcgctcactcatcgctccatccctggctttggcgccttcttttctgatgaaaacccggctttggtttggtttggtggcgcctctgccctgcctgctgctctttgtgcagactgacagcatgcttctttttcgattaggatgttctaggtaatggtctcgtgc

SEQ ID NO: 2003 - DNA, 2076 bp, Zea mays
  Clone ID: ZEAMA-23APR03-CLUSTER18729_2
acgaacccaacccagtcgaaccacctcgccagtgagcgcccccctcccgtcctctttccctgctggccagaactccgaatgaaatcgctgctccaccagctttctttaccttcagcaagcgagccggtagcatcaagctagatcgcggggaagctcctcgtttcccccatcggcgctgctctggcggggagaagcgtcctctcacggcggccgggaagaccaatccgcgccgccagtccctgcggcggcttccgtgaggtggtcttggctcctggggcggcgtgttcgtggcggccggcgagatgagcagccacgcggttggaacaagcaacggcggatccggtgatgcggccgccgggggcgcggccaggaggaacaccaggatgcccaaatattccaagttcacacagcaggagctgcccgcttgcaagccgattcttactccaaaatgggttgtctctgttttcttaatcgttggggtcatctttgttcctattggtgttgtttcactgctagctgcaagagatgttgttgagattattgatcggtatgatgaggcatgtgtgccagtcaacatgactgagaacaagcttgcttacatccagaatgagaccatatccaaagagtgcataaggaatcttacggttacaaaatatatgaagcagcctatttttgtgtattatgaacttgataacttctaccagaaccataggagatatgtaaagagccgaaatgatgcgcaactaagagatgctagtaaagctaaccagacatccgcttgtgaacctgagaagaccacagctaatgggcaaccaattgttccttgcggccttattgcttggagcttgtttaatgatacatataatttcactcgtggtaatgagaacttgacagtggacaagaaagatatctcctggaagagtgatagggagcataaatttggtaaagatgtctatccgagcaacttccagaatggtgcacttaaaggtggagcaacacttaacccaaagatcccgttgagtgagcaagaggacctcattgtttggatgcggaccgcagcacttccgacgttcagaaagttatatggcagactatactttgacctcaaggagaatgacacaataacagtgagattgaataacaactacaatacatatagctttggtggcaagaaaaagctggtcctctccactgcaacctggcttggggggaagaacgattttcttggctttgcataccttatagttggtgggctctgcattttcctggcatttgcattcaccttgctgtacttcgtaaaaccaaggaaactgggagaccacaactacttatcctggaacagacgctaggatgtttcggaacaccaagtgtccgtactactcgaaatgtagcttgtatgaaatgaaatgctctgaaccagaaatgtcgatgggcataagcaagcatggttcaggaaagaacttcatgtatattttttacgaaggggtctaggtggctacgttatttttgtttcttgtgttctttagtgtagcactgaacaggagaataccaattgatctctaatagcttgcttcgtggtacaagcactctaaatggttgactgtggtgttgacgctttggctgccgaagaataccaattaatgatgttggttgactgtaatatcctcaagtgggaacagtaccaacttctgtacaaattgattaccgtgtgatgtttgtttctccactaccattatagtacacgggtgccgcgaaaaaaaaaaaaaacgccatgcaggacgctaagatgttttggaaccccaagtgtcctaactacttaagtgcaacttgtatgaaatgaaatgccctgaaccagaaatctcgttgggcacagactggatcagactagaacttcatgtacatttttttacaaagggtctaggtggctacgtgattttgtttcttttgttctatagagctgcatgtagcagtgatcatgagaatacatattgatgtctaatggcttgcttcgtggtaaaacattgcaacaaaaaaaaaaaaagggcggacgctgtacagcgtactacaggattaccg

SEQ ID NO: 2004 - DNA, 821 bp, Zea mays
  Clone ID: ZEAMA-23APR03-CLUSTER189175_1
ttttttttttttttttcggcattcaaaaccggacgattggttctgcttataacgttatgattacgaagccgcacgctaataaaatatatcagcagacttgtgtgaacagtttgataaacagagaagaagcgcatcatcaatgaactgcaactgataatatatcagcagactgtagatcagcttcccttcaagctcatctctgcctggacatacgtatttgctgatagagaagagaagagagtctatacatctgtacaaagtccatctttgggatgtaaaactgcacagaatgccagccaaaccgggattccgctacaaccgcttggagtatccagaaccagcacacttcttgcaaagtattagccctgctcctctgcatacacggcactcaacgactccattttccaccttcattttgccatcgttgcagaacacacacttcgtgcccccattcccagcgcacctgtcgcacggcaccgggtcgcccttgaggccgaggacgagagagagggagactgcggatacgacggcggcggctatgatgatcgtctgtgtgtcgatgggcctgagcaggtcgctgccgtagccgtaaggggccgcggcaagggcctgccgcggctgagaggcgactcggaacgtaagcggggctccgtagtgccgacttgaggcgaaggatggtgcagcgggggaggcggctgtgcggcgcagtgaagcagaggggcaggaagaggcggggcagaggagggaagccatgggatgggaggaaagctgggtgcaaatgcggtgacgtggcagtgcgcagcacccatccgccggcccgg

SEQ ID NO: 2005 - DNA, 1667 bp, Zea mays
  Clone ID: ZEAMA-23APR03-CLUSTER18919_3
atcggtgcctccaaaaaatcaacagacacgggccactgctgagtttgtcgcctccctgcactgtcgccggcccgctgcgctcaccggtgacctctcctgctcgcgccgccggagcccatcccaccgcacgctgcatcgtcgtccgcctctccaatttgcgccgccggtccccgtcaatgtcgattgccgtctgcctcgctatccatgcggcctgactccatcccatcggttgctactcccattcccccacactgtgcgccctcctcccccgcacgtttgacaaccacgaactccatctgctctctcatcgtctcgtccattcctacaggcaatcttggttctagcgagaaagaggacgaaaggtttctcccgccaatacctagggtttcagccgcagatcgagccagcggccccaaattgcgtcaacacacacgttctcatcgctccctcctccccagtgcatagattgctttcagccaatcttggaagaaaagcaaggtcgagaacaggcggacggccgaacggacaatggcggaggctgacgaggctgtgatgctgcagttcacaccgacatgaattgtggcggcggtctgctccgtaatcgtgctcatctccctcgccgcctagcagggcctccatcacctcagcaaggtatgcataggtatagcaggccttaggcggagtcggaattcttccttgcttttcagctgttagctgctgcgtgctgtgactgactgacagtgatgctgatgagctgatagcttgactcactctgttgttgttgtgcgagcttacatggagacgctcaagaagaaccatcagaggctgctctgcgaggcgctttcaagatcaaagaagatggagacaaaaagatagagctaaagcctggtttctacatggagcatgacgaagatgtgagagcggttgttgtcgaatttgatcgctacttcaactactacaaagtttagtaagtctatagtgcctcgcattgttacagcctacatgttactgcgttatttgtcttcattcattcatgttcatagatatagagatctaacatcaatcgttgtacaaggcatgtaaactcgccgctaatgcatttttcaggtatgggacactatgcaacagtgagaaactagggtgccttttcatcacaacaaataggatgcgtcgtcactaatcttacatctcactacaagtttttagattattacatctcttcaccttggcaggtttggaatcacaacatcccagatatgcatgatgggggactggttggttatcgatatcctgtttggtcaaaatggaggttgcaagactctcctcgttctccagggttcttatcaattcctcaattctaactctgacaaaggcactactgatttaacatcagcataaggttctgatttaacattaggataagaattgagcttggctgtccatccacagtcgaggaggaagcggaagccatcgacgacgaataggtagcacatggggtcctccccgtacaccccactgagaggcgtcacctacactgacgtccccatctgatctggaaaatactgcaaacttctaacaatttgacttgtagtcttttatatcttgtagataaaccaatacacttttatatatttgttactgatgataacttagtatcataaggcagc

SEQ ID NO: 2006 - DNA, 931 bp, Zea mays
  Clone ID: ZEAMA-23APR03-CLUSTER189581_1
ttttttttttttttttactacattcacatttatatgcttttcattttggtcaatgatggtctaattatacaccaatagtatcatttgtgcaccataaatagtagtctatacaaacaattaagaagggtaacaattacataagttgataaagttgcaccatggcattttaatgcacaaataagaaagcataaaaatcaaaccttccttatgctctaaagcacctaagaaatttttggagctaccctagtggcacggtacttagctgccatctcctcagtcttgagaatttcttcaccatgctgggccataaccatcgctctcttttcctcggccttcttatggatgattgccttcttgtttttcatcttctcagcatattcagccattttcttctctagttcttctttcttctttttcaactcagcttctatgattgccttctttgtgttctcccatgaaagaataatagattgtttcttagcagtcttgttatctgcttttgccttctcattctcttcccaagctttaatcaaagagtttatcttctctatttccactgttgcaagagcaatgtctctatcattggagttccttggcatattattcaaagaaaaaggtttatcatccaccttgtcaacgacgatcagggccttggagttggagccaccaaccggaggcccaggcgcggtgacgccggcctcctcctctgccacggcctttgccgccgtctccgcagccggcgccgcctccaccaccgcagccatctatctacctcgcagctcacgtacgcacaggcacaggcgaatcggcctaggctgtgccgagttttctggagttggtttcgaagcagctgggggcgtgtaccgtgtacgtggccgcacgctgataaaatatatttttgattaggatgttctaggtaatggtctcgtgc

SEQ ID NO: 2007 - DNA, 1933 bp, Zea mays
  Clone ID: ZEAMA-23APR03-CLUSTER19086_1
gactagaagaaagctgaaattacctcatgatcagctctggtggaaatacgccaccttgattgcccactctccgcccgtcgtcgccacaactcgcccgcggtacaacggcccggctaaaacgaggcagggcgcgcacttaaaatagcccggcacggcgcgtacccaccaccacccgcccgccccgcgccgcgcaggcaccacccgctctcctgcggcctcctcctgtttgtgttttcaccgtggtgccgccgccgctgtcccctctctccagctgcggcgaccgcgaccgacaggcggtagagggcaaaggctagcgagatgacgaagctgccgtggtggcgcgccgacgcgtcggagctggtggccgtgacggcgatgggagtgtgggaggccgtgctcgccggcggcggcaggagattcatcaagcggaaggacagcgacgccggcgagaccggttcgcatccccaccaccctgtgttgatcctgaacatttttttcaaaaaaaaggatctttccgccggctctgttggggttgatggcgaaagaagagctcttcctttggctttgcgcggtcgggcactggaggagttgcgaagctccttgtacaatgaaatgcatagcgcagaaggtgctaagcgccagcagcagcgattctgtggaccaagtgttgcattgacattcaattttgctgttgctgttgggattatgcatggcaaacaaaatggtgatggggagtgttggatttaaatttccaattgcactctcattaattcattatgcagttgcatttgttctaatggccacccttaagacattatccttgttaccagttgccccaccatcgaaatccactcctttctcatctatatttgctttgggtgctgtaatgtccctgtccactgggctagccaacgtgagtttgaaacataacagtgtaggtttctatcaaatggctaagattgctgtaaccccaacaattgtcgtagcagaattcatgcttttccagaagaaagtttcctctaaaaaggctgtcacactggcagttgtgtcatttggagtcgctgtagcgactgttaccgatctggagttcaacttttttggtgcttgtgttgcattagcatggattgttcctagtgccgtgaacaaaatcctttggtcaagtttgcaacagagtggaaactggaccgcccttgcgctgatgtggaagacaactccgattacgatatttttcttgttgacattgatgcctttgctggacccccctggcctcttgttgttcaattggaacttcagaaacagctgcgctgttatcatctctgcattgttcggtttccttcttcagtggtctggtgctttggcactcggcgcgacgtcagctttgtctcatgttgtgctgggccaattcaaaacgatcgtcatcatgctctccggctacctgatcttcggctccgaccctgggatcaccagcgtctgcggtgccgtgctcgcactcggcggcatgtccttctacacctacctgggtctgaagaaagaccccgcgaccagcggcaaaaaagcaccatcgagacagaactccttcatggcgagacctaaggtcgctgctgacgacagtgacgacgcggattcagagcaagatgatactgtataggttggcgaaactgtcatctaggccacttaatgcaaagatcaatctgagctcagttaattctcggttggttgtaatctgtcggtgaccgagtccatttttgtacatagatgctacctttaagccttacggattgtctattgcgtagtgacaagtagttcgagaggtattgcccctaatttatagcctgtgagattcgattagcgatgtacgcaggaacggggaacccaagtcatctgtttttttatgtcgatcatcagttatttacaatgaaaatcatgcaactct

SEQ ID NO: 2008 - DNA, 1654 bp, Zea mays
  Clone ID: ZEAMA-23APR03-CLUSTER190_34
attcggcctatcacaaccacttactctcgtgcgctctccgtgggagcgaggactcgcggccggcgcagcggcaggttctcctagatctccggtaacaaatggctgacggtgaggacattcagccccttgtttgtgacaatggaactggcatggtcaaggctggttttgctggtgacgatgcgccaagggctgttttcccaagcattgtcggacgcccccgtcacactggtgtgatggttggcatggggcagaaggatgcgtatgttggtgacgaggcccagtccaagaggggtatcctgactttgaagtaccccatcgaacatggtattgttagcaattgggatgacatggagaagatctggcaccacaccttctataatgaactccgtgtggcgcctgaagagcaccctgtgctgctgacggaagccccactcaaaccccaaagctaacagggagaagatgacccaaatcatgtttgagaccttcaatgttcctgccatgtatgtcgccatccaggctgtgctttccctgtacgccagtgggcgtacaactggtattgtgttggactctggtgatggtgtcagccacaccgtgccaatctacgaaggttatgcccttcctcatgccatcctgcgtcttgaccttgctgggcgtgacctgactgacagcctgatgaagatcctcaccgagagaggttactccttcaccaccacggccgaacgggaaatcgtacgggacatcaaggaaaagcttgcatacgtggctcttgactatgatcaggagctggagaacgccaagagcagctcatctgtggagaagagctacgagctgcctgatggccaggtgatcaccattggggcggagaggttccgatgccccgaggtcctcttccagccttccttcattggtatggaagctcctggcatccatgagaccacctacaactccatcatgaaatgcgacgtggatatcaggaaggacttgtatggtaacattgttctcagtggtggcacaaccatgttccctggcatcgctgaccgtatgagcaaggagatcaccgcccttgccccgagcagcatgaaaatcaaggtggtggctccacccgagaggaaatacagtgtctggataggagggtccatccttgcctccctgagcaccttccaacagatgtggatctcaaaggctgagtacgatgagtcaggaccagcgattgttcaccggaagtgcttctaagctcaagggcccccttcgtccccattctatgtattcctttccttgagtgcttttcttataagctactatgtttgagattgccggcctttgagcaggcaatgttgttggatctgtatcttgtggatcactacaatgcatgcgttgctccatcttcttttcatgccaagtttgctgtcatacttgctagtggggaaaacaacaatgacaacagtggtgagaacagcaaccacaaaaaaagagaggatggaaattattgaagttcctaggatcgtattgtaactgtacttgtgcgagtaacattattggttctctttgtatatccatctctgagacatgcaattctttttgattggtttgctacttcaaaaaaaaaaaaaaaaaaaaaaaaaaaaaaaaaaaaaaaaaaaaaaaaaaaccccac

SEQ ID NO: 2009 - DNA, 1495 bp, Zea mays
  Clone ID: ZEAMA-23APR03-CLUSTER190_36
tttttttttttttttttaatccatgtataataattgtataccagtatacgtatactgcagtacacatactatgcatgccaactggttttagtacgaccgtaccatatgtataatgcatgcacacatatactcaattgtacgtgtcccatgaaatacacatgatatatcacatatgagtatattagctacaccgtacgaaatacaatacacatacgtatatgtagatcgatacatctatatcactctttcttcaagcacatggcgaaggtagtgaacttggtcttctccttctcgaggtgctcagcgacaaggcgcctgaactcggcaaaccatgcatcaattatggcttctccaaaatggcggacaattaaagacttcagcacggatctgatgtacttggcgacattcatgctgctgcgagcgctgtcctcgacgacgtcgtcaccctccgagtcgtcgagagggtcccagttcatctcgaactgcttgatcagatccatgctgaacagaccgctctgcgtgaccagatcctccacttctcccaccgacggcccgtagatcggtaggttgaaagactctagcttttccttctccacaaggcccttcaaaacaagagactgcaacgctgttgcgaccagtgcgaagagctggttgaggtcgccactgtacgcgtcctcgttcttcctgccgagaaatacaagcaccattcgccctccatgcacgagctcttcgtggcgcagcttgaggaagagggagaagtccttctggaactgctcctggaacagtttcgccacagaaggtgtcgtggtcctactccttgcgatgtagatgttgtcctcgttcaggcaaggctttctccacgcctctagtccctcaggttcctgggagcgccagtggaggcagtaggaggagtggaacagatgcacactctgacgaggaaacagcctgttgtaataggactccggtagccccatgacatagtagggaggaggaggaggacccctttcacaacctgctgcccttctgaactcctcctcgactgaccgaaacaggtggttgaagtcgttgccggggaggtcgttcaggacgaactgaagctccacgtgatggtcgtcatcgtctccgccgccgctcggcggcttgcaccgttcagcaccagccgcagcagcgatgctgctcaggacgctagagatgaagagcagcgtgttcggtcctgcagagcatccgaggtcggcgacgaccatggttctggggaggagagctgcgtacacctgcttgacggcagtctcgaccattggcctggtctcgcggacagctacttgttggcgcctacaattcttggagtagctccattctccttccccttcggccatatggaaatcacgtcttatatccatatatccctatgatagaggagcttgggattatatgtatcagaatgaattacttgtcccggctcaatgccccccgcgtacctgcccgggcggccgctcga

SEQ ID NO: 2010 - DNA, 2338 bp, Zea mays
  Clone ID: ZEAMA-23APR03-CLUSTER190_39
aacaaacactcgcatctcctaccgcggttttgatcgagaggacggccagccagccagccttaaaccctacccgcccaaacccacacgactcacgaccatggccgccgccgccgccgctaaggcagcggccgcggccgtctccgcgggggccgcctttgtgctctcctccgagcgggcccacgccgacgggggcggctccaccttccgcttccccggcttctactcctccgccccctccccggccccggccccggcccctgcccccgccgcgccgccgcctcaggagtccaatgccccggaggaggcgccgaaggtttcgactcagcaccctcgcactagtgcggcgggcttcgatcccgcgccgctggagcgtggggtggaggcgattaacaagctcaagcaggcgtcggaccccaaaaagctgttcgagtttatgaagaagcaggaggagactcaccagcaggaaatagctgcgaagaaactcgagttgcagaaggcactggccgagatcgagcttgagcaaaaacgggtggattttgaagaaaggaaaaaacttgatcaacaacgagctaaaattaagtcgcagatggctcaatacgaggatgagctaaaaaggaagcgactgcaggctgaacatgaggcgcagaggttaaggaaccaggagcttgtgaagatgcaagaggaatctgggattaggctagagcagatcaggcgggcgactgaggagcaaatccaggaacaacggagacagacagagagacatagggctgatctagagcaggcgaccatttcaaagaaagccatggcagaggcggaggggagaatactagtaacaaggcaaactgaagatgtgaagagacgattgattttggaggagataaatgctgacagagagaagtggatccaagtgataaatacaacatttgagcatataggaggtggtttgcgaacgatattaaccgaccaaaataagctagtggtagcagttggaggggtaacagcacttgctgcagggatatacacaacaagggagggtgcaagagtagtctggggctatgttgatcgtatcctgggtcagccatcactgataagggagtcatcacgtgggaaatatccctggtctggtttcctctcacgtgctacaagtaccctgactagcaaactgaagaatggaagcaacctagggaaggacagaaatgggtttggtgatgttattctaaatccttctctccagaagagagtgaagcagcttgctaatgccacggccaatacaaaacttcatcaagctcctttcaggaacatgcttttctatgggcctcctggcacagggaaaaccatggcagcacgagaacttgctcgcaattctggattagattatgcactaatgactggtggagatgttgcaccattgggatcacaagcagtcaccaagattcatcagttgtttgactgggcgaagaaatctaacaggggtttgcttctcttcatagatgaagcagatgctttcttgtgcgaacggaacaaaacttacatgagtgaagctcaaaggagtgccctgaatgctctcctcttccgcacaggtgaccaatccaaggacattgtccttgcacttgccaccaacagacccggtgatcttgactctgctgttgctgaccgtattgatgaggtcctggaatttcccctgcctggggaagatgagcgattcaagctcctgaagctatatctggacaagtacataatcaaagctggtgacaaacatgagaagagctggctccagttcttccgtcgccagccccagaagattgaggtgaaaggcatcactgatgacctgatccgggaggcggcatccaggacccagggcttctctggaagagagatagcgaagatgatggcaagcgtccaggccgctgtctatgggagcaaggactgcgagctcaccccaggcctgttccgtgaggttgtggactacaaggtcgctgagcacaagcagcggagaagattagccggtgaggagccaaagcaggatgcctagtttaccaatttttttgattcacccccattttgccgtgggatgtactgtgtttcccccccgggatagattgcttcatcgggcaggcgttttgcatgccccgtgttattcttttgttccatttgccttaccaggttggtctaaggtggtaggcgatggtaacctttttggtataagagatgagggttgcatgtggcatgtgatggaaactttggcgacaggtcacacacacacccagcaagctggccccgttttgatgcattatactgtttggtcagtcttctatcttctaaaaaaaaaaaaaaaaaa

SEQ ID NO: 2011 - DNA, 2742 bp, Zea mays
  Clone ID: ZEAMA-23APR03-CLUSTER19148_1
tcgcttgttctccctagttccgacccgaagcagggaatgagcttcggcgatctcgacggcggcgggtccaagcgcaagaagccgtacaaccgccacgcgccgcggcagatcgaacagctcgaagcgatgttcaaggaattccaccacccggacgagaagcagcgcgcgcagctgagcaggcagctgggcctggacccgcggcaggtcaagttctggttccagaaccggcgcacgcatttgaagaaccaactggagcggcaggagaacgcgaggctgaaacaggagaacgacaaactgcgcgtcgagaacctgtccatccgggaggccataagggacctggtgtgcagctgctgtggcggtccagcggtgctcggggagctgtcgcccgaagagcaccagctgcgcctcgagaatgcgaggctcagggacgagctcgctcgagtctgcaccgtcacttccaagttcattggcaagcccatgtctcacatggaactgctgctcgcgaaggagccgcatcctattacaggctcgtcactggaacttgcagttgctgttggtgttggttccggcgtgccatcgagcaaaatgcccgtctcgacgatctccgagttggccggcagcacatccagctcaacgggaacagtgaccacgcccatggtgactgcatccttgccgatggttagcattgtcattgacaagtccaagttcgcccagcttgcagtgagtgcgatgaatgagcttgtcaagatggcgcggatgaatgaaccgctgtggattccaaccattccctcacctggctcaccaatcatggagactctaaactttaaagagtacttgaaggcattctcaccatgtgttggagtgaagcctactgggtttgtgtctgaggcctctagggaatccggcattgtcaccattgacagtagcgctgctcttatggaggtcttcatggatgagagacgatggtcagacatattctactgcattgttgccaaggcatcaatcgttgaggagatcttacctggtgttgcaggaagcagaaatggtgcattgctgcttatgcaggcagaactacaaatgctttcacctcgtgtccctataagggaggttacatttctcaggttctgcaaacagcttgctgagggtgcatgggctgtagtggatgtttccattgatggactgcagacggatcagtgcctagatacaaacacgaaatgccggaggctgccttcaggttgcgtgttgcaagatacccccaatggctgcaaggtcacatgggttgagcatgcagaatatcctgaggcgtccgtgcaccagctctaccagcctcttatgcgctctggcctcgcccttggcgcagggcggtggcttgcaacactgcaacgccagtgtgagtgcttggccatcctcatgtcatcgcttgcagcgccagagcatgactcagcagcggtttctctggaaggaaaatggagcctgttgaagctggcacggaggatgatggagaacttctgcgcagggatgggcgcgtcatcttcccgcgaatggagtatgctggatggtttaacaggtagcatggggaaagacgtgcgggtcatggtgcagaacagtgtggatgaacctggggtgccaccgggtgtggtgcttagcgtcgccacagcagtatggctgcctgtgacccctgagcggctcttcaacttccttcgcgacgaggagctccgtgctgagtgggacatcctcagcaatggtggccctatgcagcaggtgctacgcattaccaagggccaactggatggcaactctgtggctctgctgagatccgatcatacagactcccacctgaacagcatcttgattctgcaagagacgtgcactgacagatctggcgcaatggtcgtgtacgccccggtggacttcccggcaatgcagcttgtgcttggtggaggggactcgaagaacgtggcgctcttgccatctggtttcgtcattctgcctgctgggtctagcgccggtggggttgggcacaagtcacgcggatcgctgctcacagtcgcattccagatccttgtgaacagccagcccacagcaaagctgacggtggagtcagtggacaccgtgtacagcctcatctcctgtaccatcgagaagatcaaggcggcacttcactgtgacgtctgttaacttgggaacaggaagcttcaggcatggaggcaaggcaacagctggtgatcagcctgagtcaagaacgaaccgcgcaaaacagtagtgacctttgctaggtggtacgggtccatagggctggcccgtagcacacagcaatggcggtggttcgggtattgactcagcctccaattgttctgggttaaattttgcattttggacctacgcctgggcaatgccatggttggttttggtggttttagggagtctggagtcatctatgctttttgttggctggctcgtggtttttggtatcaggtttgcttttgtaaccatagatgtaggagagccccccttgatgttgatgatacagtcaatatcagacaaatgcagcattgtatcgtgagattcagtctcagatcactgtggatttaccttgtatggaacagtaggaggaggagcggcagtttatgtaaaaaaaaaaaaaaaaaaaaaaaaaaaaaggagggttgtgtcatccaaaacaagcttcctgtttcgatagaggaaattgatacagttaatgactgggtgtcacagttttgt

SEQ ID NO: 2012 - DNA, 1860 bp, Zea mays
  Clone ID: ZEAMA-23APR03-CLUSTER19156_1
gcacgagaccattacctagaacatcctaatcgaaaaaggccgcaaacggagaagagagagacacgggggagagggagggctcgctagctaaacaataaccctcactctctactctctagctagctagcctctcagctcagctgtggtggggagaaagaccggaccggaggagagggcgatcaagaaaggttaccggccggcctagaggcggtgccgcggcgggaacgggtgcaaggtcggcgacgacaacggcagcctgatggtgatgtgggaggacggcttctgccggccgcgggtggcggagtgcctggaggacatggacggcgaggacccggtgcgcaaggccttcatcaagatgtccatccagctctacaactacggagaagggctgatgggaaaggtggcctctgataaatgtcacaaatgggtcttcaaggaaccttctgaatgcgagcccaacatctccaactactggcagagctctttcgacgcacttcctccggaatggaccgaccagttcgcatcaggcatccagaccatagctgtgatccaagccgggcatggcctcctgcagctgggctcctgcaagattatacccgaggacctgcacttcgtgctgcggatgcgacacatgttcgagtcactcggctaccagtcgggcttcttcctctcccagctcttctcgtcctcacggggcgcctcgccgacaccgacgccgccattcccgctcaagcagccgccagcagctccggccgcgcgcgccccgccgcagctcttcagctggccgggccaccaccagccgcagcagctcccgtcgccgctcttcccgcccggcccgggcgcgttccacccgtcctccgcgcgcccaatgccgccgttcccaggcggcggcggcggcggcggcaaggacgagggccacatgttccacctcccgccagcggcgcaccacggcaccaacaagcagccgccgcagcacatggacgagcaccaccagcagcagcagcagccgatggtgggggccggcggcgacgcgcccgacggcgacctccggtggcccaacgggctgtccttcttcaccgcgctcaccgggcgcgcggacgacgcgaagctgctcttcggcggccccggcgctggcgctggcgctgcggacgacgacgacaaggcggcgccggacgcgcacggcggggccgagaacgtggaggagtacctcagcctggagagccactcgaacaaggccaggaaggtggacagccccgcggcccagagcaccaacaagttcaagaggagcttcacgttgcccgcgcggatgagctcgtcctcgtccacgtccgcgttcccgtccgtgtcggcctccacggcgccgccgcagcagcagcaagcagggatggagtatcgagggccgcacgagggcggcgtctactcggacctcatggagacgttcttggagtagctatagctagctagatcccgtagcatgcatgatcgatcggttcagggtcacacactacgacaagcgtacgctgctttttgtttctcaccgccctccgtcccaagctttgtttcaggtttggagttttaatcgcataatatgtttaattagatttgtgtgtgtatttttttaattttcatcgtgtttcccccctattccagtagttgtcgtagctgctagctagatcgtaatgcacaaaaaaaatggtggagtacatgcatgcatgcatgcaagaagagcatgagttgcttccattatcatgactggctggcaactctgtggtgcaaccgccatggcgccatgatgaggaggtacaatgatatgcaacacccaataatatgggcttttgcgcgaaaaaaaaaacaaacacc

SEQ ID NO: 2013 - DNA, 1123 bp, Zea mays
  Clone ID: ZEAMA-23APR03-CLUSTER19207_9
aactcgctcccttccccgtgcttcccgccgtcgtggagaggtcacgcggctggttcccgccgcttccggacggttcggccttccagcttccccttgagttcaccacgttttgtgacgcaagctagctgaaccctactgattgctctcccagcgcacggtggttgttgcgctgattcgttgtcttgtgagctgttctagggttccgagggaggaggatcagctgccgcgatgttcctcaggatctctcgtctcggggcgcggcttctgcgcgagtctggagcggagacgagagctgcggaatgtccttttctcaactgcaacaagtggtgatcaggatgaaagcagtcaggcaaaggataaaatctcggtaacatttgttaacaaggatggctcagaaaagacaatacgtgttccagttggaatgtccatgttagaagctgctcatgaaaatgacatagagcttgaaggagcatgtgagggttcacttgcgtgttctacttgtcatgtaatagtaatggatgtaaactactataacaaattagaagatccagcagatgaagaaaatgatatgcttgaccttgcatttgggctcacagagacatctcgcctcggctgccaagtgatcgcgaagcctgaactcgatggtattcggctggcattacctgtagccacaagaaacttcgcggtagatggctatgtaccgaaaccacactgaagacagtcgggtacaccacactgaggcagtcatcttgggggacacggattcgtacaagtcaattttgtagtttatagcctgtataacttaactacacctttgctacttgtagtcggggtagctaggactaccttgttgagggagggttcgttcattgatggacccctccattactcccagataacagtgcttccttcatctgggcgaataaacatctgccttgtaatacaagtgaaactggccaagacaaacaggaagatgctggtggatcaaaaaaaaaaaaaaaaaaaaaaaaaaaaaaaaaaaaaaaaaaaaaaaaaaaaaaaaaaaaaaaaaaaaaaaaaaaaaaaaagggaaaaaaaaaaaaaaaaaaaaaaagaattttgggttgttcccactgtttaaggg

SEQ ID NO: 2014 - DNA, 1058 bp, Zea mays
  Clone ID: ZEAMA-23APR03-CLUSTER19228_2
aaaccctcacatacagatacagtacagttcacacactctcctgtctcctatccagccaccgaacgaagctagccaagatgtctcagttgctgcacctgccggacctcgcggcgccgcggaccaggatgggctcggcgctgccggcgggggcccgcgtcaagcagggggaggcggggacggcgagggggaggcgggtgctcaggctcgccgaccccgtgcggcgggagtgccgggtgccggtcccgctgccgccgccgccgctcctcgccgcggggaggcgcggagacgacgacgacgacgacggcgtcgacgaggataggcagaggtactacctcaacctgggctacgcgatccggacgctcagggaggagctccccgacgtgctctgcaaggaccacagcttcgacatctacagagaagacattgtcttcagagaccctctgaacacattcaagggcctgggaaactacaagaggctcttctgggcgctgcgcctcaccggccgggtcttcttcagggcgtcgtgggttgaagtggtcagcatatggcagcccgccgagaacagcatcctgcttcgctggaccgcccacggcgtccctcgggtgccctggggctggtgggacgccgcccacgcccgcttcgacggcgcgtccgtgtacaagctcgacaggaacggcaagatctacgagcacacggtgcacaacgtcgctacgaacccgccggccaagtccaaggtcctgccggtccacgagctggtcaggtcactcggttgcccctccactgccgaacccacctgttctgacttctgaagctttcgtcgtcgcagtgccatcttattattcgagaattaattatctgggagaaggataggcgtgggtttaacatggtacctccgaattttgcgttttttcagtgtgatttgatagcacacaaagttactgagtactcttggagttcagtgtgatttgatagcacacaaagttactgagtactcttggagttgtatatatgtatgtacagtgatagtttataaaataaaggcctgtcatttaaggtgt

SEQ ID NO: 2015 - DNA, 771 bp, Zea mays
  Clone ID: ZEAMA-23APR03-CLUSTER19237_2
gattgagtgatctttctgtgaacctgagtagatttggtatgcctatcaactgcaatgtttgtagatgatctggaagacaaaaatatccatatcatgttactgttaattttgcaagaagtggtggtcctggtggtcagaatgttaacaaagttaacacaaaggttgacatgcgattcaatgttaaggaagctcactggcttggggagagaatcaaggaacggatattacaagcggagaagaataggataaataaagatggagagcttgttatatcttctacaaaaactagaacacagaagggcaatattgaagatgcattgcagaaaatacaggcaatcattgatgctgcatcatatgttcctccacccccaacagaagaccaaaagaaaaagattgaaaaaattgctgcagtcgctgaaaggaagagacttcagaataagaaggtgctttcacagaagaaggaatttagacggaacagaactagctgggattgatgcaagcttgttctcggggtagcaaaagcattcggctgatccttacagcagtggtgtacagagaccgacgaaaaacaagggtcagacttgctgaaggcatcttggtgaagaagatatagctaagtttcgtaggcatctccagtttttgtttcgtccattagtagggatagattcggatcgaatactcatgaaaacagatccgaatgtcactatttatcatagtttgatctgaatacgaatactatcagatacgaatacaaaacggatagttcgaatt

SEQ ID NO: 2016 - DNA, 1860 bp, Zea mays
  Clone ID: ZEAMA-23APR03-CLUSTER19242_1
acagaatcctgactgcaactctgaacagcgaagcacccatggccctcgccaccacagccgtctccctccaccttttcctcacccggcccgcctccgtgctccgcgtaggccgcggcctcccatgcctcctcctccgagccacttcgtccacctccgcctccccggacttcaacatcaccttcgcggagcccgcgccgtccaaaaaggccccgtccgcgcagccgctggtcccgtggatcgtccgcggggaggacggcaagccccgcctcagcacctccccgccgccggacgtaatccaggccatcgcgctcgcggaggcggaggccaagaaggccgccaacaaggaaaccctcaagggccagaatggccagttgccgccgccgccgcggctgcttccaatgccagcgtcaagggcaaggaaaggaagcccgccccgaccgtgccgcccaagttctccaaggcagccaggaggttttacaatgagaatatcaaggagcgggagccgcaacggctcgccaaggtccttgccgccgcaggagtggcatcaagaaggaccagtgaggagctcatcttccaagggaaggtgactgtcaatggttcagtctgtacttctcctcagaccaaagttgacatctcaaaggattctatctacgttaacgggaaccgcatttccaagaagttgcctccaaagctgtattttgctgttaacaagccaaaggggtacatttgctcatgtggtgaagagtcaaaatctgttgtctccttatttaatgattatttgaagggctggaacaagattcaaccagggttgccaaaaccacgcttgtttactgtgggtcgtcttgatgttgccacggctggtctgataatagtcacaaatgatggtgagtttgctcaaaagcttgcacatccttcttcaaatgtaacaaaagaatatgtggtgactattgatggtgccgtgcacaaaaaacatctcatagctatcagtgaaggcacaaaaattgatggggtcatgtgcattcctgatttagtagaaccattggctgcccaatcagatacaagaaagacccgcctaaggatagtggttcatgaaggacggaatcatgaagttcgtgaacttgtacagaatgcagggctacaggtttatgcattgaaacgtgttcggataggcaggttcaggcttccagcagatctgggaattgggaagtttgttgagctcaaacaggctgatatcaaggcactagatggcaacaactagagatgacatctgatgtggctaataagcgcatcttgtccaaagatggtagtaatcctcaaagtcacaatacatgagctgctactcaactcagaaagcttgtgaatgttctggatgtccattggtggtggtggctgatgatcaagtgtggcaaacatgttttgccttgaagaacttgtgaactactccatacttcgcctgcgctgcgaatctccacatcatatcaaacggcagaaccaagtccgcgatgcagcagtcgtttggtgaggatggaacattgtcaaatagcgatcttctgttggcatatacattttactctctattctaaattataatttttttagatgcattgtttttactaaattaaaatatcttatagtttagaatgcatcttgtccaacaggtagtcaataatggcagacgagttatatttggccaaattacattgtactccgtgtaccgagaactgtttttttaagaatcctttattgaccaaaaaaaaaaaaaaaaaaattgtggcactgttatttctatagtaatgagaaaaaaaaaaaaaaaaaaaaaaaattaaacacaataaagttggaactggaggggggaaatga

SEQ ID NO: 2017 - DNA, 1415 bp, Zea mays
  unsure (1)..(1415): unsure at all n locations
  Clone ID: ZEAMA-23APR03-CLUSTER19248_2
gcgctgtcggattcgccgccagctaggcgagatggctgcgccgttgcctctttccgcggaggacatgctgcgcgtcaacggcagccgccgcttcgccgccgcgatggcggccgcctcccccttcgcgtccctcgcagacgccctcctcgccgctcggcgcatctggctcgacgaggtggatgtcaacggatggctcgaggccttcgcggcgcacccggcaatcggaaccacctccccatctgtctccaagtcggtgaagtgcattgccctctcaacatccactcaattcgtccgcttaattttcagttgtcgttttgctgttgtcgatcgcgcctcgctcgggtcgctgtggctgtctgtggattttgtatataccagtactaatcaatagatgacacggaaccaatcacatgacctggctgcgcgtcatggcgagttcaagtgttgaaatcagtaaaatcaaactggcgaaccgtttcaggacaaaccatatggcgctagtaactgtgttggtaatctctgtttcctttctggtttaggtggagcaaggaggagcaatcagcagcgctctccacagccacggactcgacggcccaggagctagcagagtggaatgccagatacagggagaagtttggcttcgtcttcatgatttgcgcttctgggaggactgcagctgaggtcttggctgagcttaagaggcgttacacgaacaggccaattgtcgaacttgaggctgcggcacaggaagaactcaagataactgaactacgtctcacgaagcttttctcattggagcctactgttccctccactacaattgaaggccccaccgtccaatcagataaagcagcaggtagctcgaaccgaagtcgtccgcctattacaacgcatgtgctggacattgcccgtggatcgcctgcatctggaatcgaagttcacctggagatgtggaaggattgttcagctcctccatcattcaacaacaaagatttcagcggatgggaaactctaggctattccgttacaaacaatgatggacgcagtggccagctgatggacattgtcgataatattgctcctggtttctaccgcataagcttcaacactggcaagtatgcccctgcagggttcttcccttatgtcagcatcatattcgagatcaaggagaaccaggcggcagagcattttcatgttcctctcttgcattcccctttctcgttcaccacttaccgtggaagctaagttttcaacttacgtgccattacctctgttgggatgttcgaagcaacttgtaaacttgacacttccgttgtgataataatctggttccatgtaagcaggctttatactttaataacaagtagtattatggaagtcaacaacacaaaacaaaaaaaaaanaaaaaaaccca

SEQ ID NO: 2018 - DNA, 1311 bp, Zea mays
  Clone ID: ZEAMA-23APR03-CLUSTER19248_3
gcgtccaaacatgtactctaattcccttgcgtccaaacatgccaaagtgaataaactctctctgttgatagtggcggcaaagagagcaggatcgcaggaataaatcaacagacaagccacttgaatcgaaaaatcgcgagaacccccaccgccctccatcagactcagagcctgcgctgtcggattcgccgccagctaggcgagatggctgcgccgttgcctctttccgcggaagacatgctgcgcgtcaacggcagccgtcgcttcgccgccgcgatggcgccgcctcccccttcgcgtccctcgcagacgccctcctcgccgctcgccgcatctggctcgatgaggtggatgtcaacggatggctcgaggccttcgcggcgcacccggcaatcggaaccacctccccatctgtctccaagtggagcaaggaggagcaatcagcagcgctctccacagccacggactcgacggcccaggagctagcagagtggaatgccagatacagggagaagtttggcttcgtcttcatgatttgcgcttctgggaggactgcagctgaggtcttggctgagcttaagaggcgttacacgaacaggccaattgtcgaacttgaggctgcggcacaggaagaactcaagataactgaactacgtctcacgaagcttttctcattggagcctactgttccctccactacaattgaaggccccaccgtccgatcagataaagcagcaggtagctccaaccgaagtcgtccgcccattacaacgcatgtgctggacattgcccgtggatcgcctgcatctggaatcgaagttcacctggagatgtggaaggattgttcagctcctccatcattcaacaacaaagatttcagcggatgggaaactctaggctattccgttacaaacaatgatggacgcagtggccagctgatggacattgtcgataatattgctcctggtttctaccgcataagcttcaacactggcaagtatacccctgcaggggttcttcccttatgtcagcatcatattcgagatcaaggagaaccagacggcagagcattttcatgttcctctcttgcattcccctttctcgttcaccacttaccgtggaagctaagttttcaacttacgtgccattacctctgttgggatgttcgaagcaacttgtaaacttgacacttccgttgtgataataatctggttccatgtaagcaggctttatactttaataacaagtagtattatccaaaaaaaaaaaaaaaaaaaaaaaaaaaaagtactctgcgttgttaccactgct

SEQ ID NO: 2019 - DNA, 1274 bp, Zea mays
  Clone ID: ZEAMA-23APR03-CLUSTER1937_15
atatccaacacacacagcaacgctcgctcgacactgtcactagctagttgctctactagagggcgggtatagagctgcctgcaatccgccgctgagaagggaggatcggaagcgacgatgaggtcgtttgctcctgtctttctgtcggcggtcgtggcctggctggagctggcgggcaccgcgcagggcggcaacttctaccaggacacagagatgacctggggcgatggccgcggcaaggtagtggacggcgggcgcgggctggacctgacgctggaccgcacgtccggctccgggttccagtccaagagcgagtacctgttcggcaagatcgacatgcagatcaagctggtgccaggcaactccgtggcacggtcaccaccttctacctgtcgtcccagggcgacgcgcacgacgagatcgacttcgagttcctgggcaacgtgagcggggagccctacacgctgcacaccaacgtgttcacgcgcggacagggccagcgggagcagcagttccgcctctggttcgaccctaccactgccttccacacctactccatcctgtggaacccgcagcacgtgatcttcgcggtggacggcaccccggtgcgggacttcaagaaccacgaggcgcgcggggtggcgttcccgaggacgcagcccatgaggctgtacgccagcctgtggaacgccgacgactgggccacgcagggcgggcgcgtcaaggcggactggtccaaggcccccttcgtcgcctccttccgcggtttcagcgccgacgcctgcgtctgggacggcggcaggcagcgctgccctgagggcaccatggaggccgccgccgtcgcgggtgccggctccggccgcggctggtggaaccagcagctcagcgacatgagctaccgccgcatgcgctgggtgcagcgcaagttcatgatctacaactactgcgccgacgccaagcgcttcccgcagggcgtgcccgccgagtgcaagctccggtgagggagcgaggtttgttgggacgtccgtggggcatcaaaaccaagcacgatccctagtcgtggaaagtagaaaccaggcatcgattcgatcgtcgtcgacggtcttagtagtagctacttattttgcagtgggcgatgaaagaatggtgtcatgtaaatgtagctccagtcgtgtcgcattctttgatttgttgtttcagcagcaccggatgtacaagtactgagtttgggctaaaaaaaaaaaaaaaaaaaaaaaaaaaaaaaaaaaaaaaaa

SEQ ID NO: 2020 - DNA, 1778 bp, Zea mays
  Clone ID: ZEAMA-23APR03-CLUSTER1941_2
agggagcgaggcagcgaggcagcagctgcagccggccgcgcccccatctcatctcgggggtcgggacctgattaccccaatccgtttcctcaccaaatacgccacggcggcgcggcgcgctggctacccacaatggcgctcaccaccgcctccacggtctcctctccctcccgaatcatccgccgcttctcttcttctcaagactctcgccccccttcctcgctcctacatctcgccccgcgccgaggacccgggaattccccgcgcgcctgtagctggcaccggctcgttgtgcgccggatgggctgggcggcgcgagcgctcctcggcggattatcggacgccggcgccagtgagagcgacgaggaggaggagcacgtcctacgagtggggcagcgggagggcgagatcgacgacgccgtggagctctccgcggcggccgttgggccagagagatgggacgtgctgggcctcggccaggcgatggttgacttctcagggatggtggatgacgagttccttgacagattgggcatagagaagggcacgagaaaggtcataaaccatgaggagaggggacgggtcttgcgtgccatggatggatgcagctacaaggctgcagctggaggctccctgtccaactcgctcgttgcgctggcaaggcttggtagtagccagtctgctggctaccctgagcttaatattgtgatgggcggcagtgtgggcagtgacccactaggtagtttctacagggcaaagttgcgccgtgctaatgtgcacttcctgtctaagccggtcaaagatggaacaactggaactgtcattgttctaacaacgccggatgcacagcgtactatgcttgcgtatcagggtacttcgtcaactctgagttacgattcagacttggccagtttagtgtctaaatcaaatgtactaattgtggaaggttatctatttgagctgcctcacacaattgaagctatcaagcaagcgtgtgaagatgctcacaagaatggtgcaatcattgctgttactgcatcagatgtatcttgcatcaagcgttgctacaatgactttcgggacattgtaagaaactatgcagatatactgttcgccaacgccaatgaagcaagggcgttgtgcgagctaccctcaacagacagtcccatgtcagccacaagatacttaagccactctgttcccctagtatctgtgactgacggcatgcatggctcctacattggggtgaaaggtgaagcaatatacatccctccaccacaatgcgtggctgtggacacttgtggcgctggcgacgcatacgcttctgggattctgtacggcgtcctccggggtgcttctgacctgaaaggcataggactcctggcgtcgcgggtagctgctgtcgtcgtcgggcagcaaggcacgcgactgcgggtccaggacgcggacagactggctggatcgtttgagcaccatctggatagcttggagttctgctcggatgtttgaatagatcactctgcaaacgtctggtctgattgtatctgtttttttcccaagccttagaaatctatatgtacatgtacatacatcactaaccttggttagtaggtctagtacatttcctcagggcatttagccgagctgggtaaatcttgtgcgcccatttgatattactttccatctttgagtattgccatgattggaattacgtagatttcattgggcatggaaaatacaacggttaagttccaaaaaaaaaaaaaaaaaaagcgccc

SEQ ID NO: 2021 - DNA, 1163 bp, Zea mays
  Clone ID: ZEAMA-23APR03-CLUSTER194322_1
gcacgagaccattacctagaacatcctaatcgaaaaacactttcctttccgcggcccctctgctcaccgcactccgttgcctgatggcgtcgccggcggcggggacgccgcccttcctgacgaaaacttacgccatggtggaggactcggccacggacgacacgatctcgtggaacgacaccggcacggccttcgtggtgtggcgccccgctgagttcgcccgtgaccttcttcccaagcacttcaagcacagcaacttctcctcgttcgtccgccagctcaacacctacggattcaagaaggtagtcggggacagatgggagtttgccaacgacggcttccggagaggcgagaagcaccttctcgccggaatacagaggcggaaggggaccggcgccgtggcggcggtaccggtgccgggcataccggcggggataccgttaccgctctcgtccccgcccacgagctctggcggggagccggcggtctcctcgtcgccgccgcgtggctcgacagctggagttagcggcgcggtggccgagctggaggaggagaacgcgcggctgcgacgcgagaatgcgaggctggcgcgggagctggcccgcgcgcggcgcctctgcgacggcgtgcgccagctcatggcgcggtacgacgacgaccaaggcagaggcggagatgaggatccggcggacggcgacgaggggcatggcggcagtggggaaggccccagcggcccagaggtgaagccaatgctgttcggcgtcccaatcggggccaagcggctacgcggtgcgcgtggtgatggagacgatgtagatgacggcgaggacaacgacgaggaaccagatgaagacgacgagaggcaaacggtgcggaagcagggggttaaagcggccaggaggaacgaggcgtcggatctggacgtgctgacgctgtccgtgcgggcggccgcggcggcgaggacgggcggaggatcacgtgaccgcaaaagccccattaccgcccaccccgataggagcctcagcctagggctgaaatgactgacactcgtgtagagtactgtagtatcgattgtagtattgtattgagtgatgctgcacgcttgaattgaatcatctagaaatcaaaatttaacaaaaaaaaaaaaaaaaaaaaaaaaaaaa

SEQ ID NO: 2022 - DNA, 2100 bp, Zea mays
  Clone ID: ZEAMA-23APR03-CLUSTER1960_3
gagtccagacatcaggcagagcaggaacacaaggagagttcagagttcagacagcagggctttctctccgatcgctgttctgagcgatggcagcgcgcggcggtggtacgaggatgacgtctgctgctgctgccgcggcgccatgggttagcgtctgcagcttcttgctctgcttggcggccttccagggcgctgagggtgcgattggcgtgaactacggcatggtcgctaacaacctgccggcgccggagcaggtcgtctccatgtacaaggccaagaacatcagctacgtgcggctcttccacccggacaaggacgcgttgaacgcgctccgcggctccggcgtcggcgtcgtcctgggcacgctgaacgaggacctcccgcgcctggcgtccgacctgtccttcgccgcgtcgtgggtggccacgaacgtgcagcccttcgccggcgccgtccagttccggtacatcaacgccggcaacgaggtcatcccgggggacgccgcggcgcgggtgctcccggccatgcagaacctggagtcggcgctccggtccgcgggggtcacgggcgtccccgtcaccacggccgtggccaccagcgtgctcggcgcctcgtacccgccgtcccagggcgccttctccgaggcggccgcgccggtgatggcgcccatcgtctcgtacctgtcgtcgaagggcgcgccgctgctggtcaacgtatacccgtacttcgcctactcgagcagcggcgggcaggtggcgctcgggtacgcgctgctgtcggcggacgccggcgcggcgtcgtcggtcacggacgccggggtggtctacaccaacatgttcgacgctatcgtggacgcgacgcacgccgcggtggagaaagccggggtccaggggctggagctggtggtgtcggagaccggctggccgtcggccggcggcgagggcgccaccgtggagaatgccgcggcgtacaacaacaacgtggtgcggcacgtcggcggcggtaccccgcggcgaccagggaaggccgtggagacgtaccttttcgccatgttcaacgagaacggcaaggccgagggcgtggagcagcacttcggcctcttccagccggacatgagcgaggtctaccacgtcgacttcacggcgggatccccctaggtctagggaggaggcggcttacccgcttcttcacttttagtagtaggctcatccttcattcccctgatctacttcgttttgttggagtagcaaaactgccgcacgtcacgtttactgtttattttttaatatcttatatagaaaaataatatcaacatttattctttaaataagtttatgtttactttgttgatctagcttcttcagttactctcttccttgaggtattgctgtttgtctcatagagtagcttcttgcttaagatattttcactagcaggttcacagggtttcttaatggagttattcttttccacttcactttgcactcctgtgattgaaggttccatgctttgggtgttgtccatggctcctacacatgcttgcttctttgttgtttcgctgctgtcaggaggcagcccattgctcataatgtccgtgtgtcgctcttcacatgacccttttcttacagggcaaatgctttcccttttatcctgcgtgccagcagcgattgtcagattcaggtctgggacaatgaaattagccttggcagtgtcatcagtatattcaggtacttccttagcagcgtgttttgttgtatcctcaggtaatcctgtgctcatggtttgaaggccttcggccaaccgctttctcagtgataatggcaaacgaatacggattttgttcccagttgggccaattttcatggcacttttgtccattctggcttcagcagcctggttttcagaggcagacatttcattggcacagaatatactccgccggcgaaggtcccgaagaaggccttggcgcctggtgtacggttgcgactgcggcggcggcggctgtcgcccagtcgtcgccacggcagggagagagcgcacgggggtgaatgaacaatagaaaagggagacaagacaggagtgacaggacagatcggccgg

SEQ ID NO: 2023 - DNA, 1355 bp, Zea mays
  unsure (1)..(1355): unsure at all n locations
  Clone ID: ZEAMA-23APR03-CLUSTER1960_5
caagaaactattattattcaatgacatcattgtaagaaacaaaattgatattgacgtctgtctgatcagcccattctaagggcatgtttgagcacgaatggtctatgcattttacaggaaattgttcattttttcaaacacacacacgcgcgcgcgcaagaacaggggaaaaaatctccattacaaaagtaggcctagacatatagtaatattcagtatctttagcacccaagctctcctttgttaaatgcttagtacagtagtccgaattccatccatacagcgccatcagctgattgttcaatgccgaaaaccagggagctacgtgtggtccaaactaggatatgttcacagctaaaagcatttaaaaaacagcctaaaagcatttaaaaaacactaacagccgaaaagtattaaaagcagactttaatcagatcgtaacatcatgttcacagctcaattccacccaacaggtatgttcctaggtcaaaacaagtccatgtacacctgacactctcaatacatgtcagcgaaacggaggttgtaatgtagtcaggcgattgatgcagccactcgtaatcatgctgtctacagtctcaagcttcatgtaatgaaaatttagattgtcctgctgatgcctcgcgagaagttgctcctctcgcagttcattcttgatcagtgctaagttctccaactcatgcctcttggacnnnnncttgaactttctgacattatgatagctcgggtacgcgcnnnnnnnnnnnnnnnnnnnnnnnnnnnnnnnnncggtgacggacggcggggcggtgtacactaacatgttcgacgcgatcgtggacgcgacgcacgcggcggtggagaaggccggggtgcaggggctggagctggtggtgtcggagnnnnnnnnnnnnnnnnnnnnnnnnnnnnnnnnnnnnnnggagaacgcggcggcgtacaacaacaacgtggtgcggcacgtcgacggcggcacccctcggcggcccgggaaggccctggagacctacctgttcgccatgttcaacgagaacggcaaggccgagggcgtggagcagcacttcggcctcttccagccggacatgagcgaggtctaccacgtcgacttcacggcgggatnnnnntagggaggctcacccgcttctgtgtttactttatttatgtagtaggaatgatcattcttcattcagagactgatcgacttcatcggagctgctcgatactcgagcggcgcggataggcttactgcgtactggtagtattgttggagacttggagtagcattactatcgacnnnnnnnnnnnnnnnnnnnnnnnnnnnnnnnnnnnnnnnnnnnnng

SEQ ID NO: 2024 - DNA, 7520 bp, Zea mays
  Clone ID: ZEAMA-23APR03-CLUSTER19642_1
ggtcttcaattgtgctgtctgggccacggaacgacaatgtcacagcttggattagccgcagctgcctcaaaggccttgccactactccctaatcgccagagaagttcagctgggactacattctcatcatcttcattatcgaggcccttaaacagaaggaaaagccatactcgttcactccgtgatggcggagatggggtatcagatgccaaaaagcacagccagtctgttcgtcaaggtcttgctggcattatcgacctcccaagtgaggcaccttccgaagtggatatttcacatggatctgaggatcctagggggccaacagattcttatcaaatgaaagggcttcagaataatacaaataaaggcttgtatgagaatgtccatgatccatcaaaattttgtacggcactctctggccaaacttcatctgacagtatagtagtggccaacagtgctctggcagcggccaaatttatgcggagtcgccggacatgggctaatgatacttttggatccgcgcaggcaacccaactcatagctatagttactccggaagacatgaggataaatgcagaatacagtagtggtgctgaccaattcaaagcggtgcctggtggaacaaacaataataactacgccaatgttcaactcatagtggggatggcacaaaaactaggtgtttctgctgtttggcctggttggggtcatgcttctgagaatcctgaactgccagatgcattgaccgcaaaagggatcgtttttcttggcccacctgcatcatcaatgaatgctttgggagataaggtcggctcagctctcattgctcaagcagccggggtcccaactcttgcttggagtggatcacatgttgaagttccattagagtgctgcttagacgcgatacctgaggagatgtatagaaaagcttgcgttactaccacagaggaagcagttgcaagttgtcaagtggttggttatcctgccatgattaaggcatcctggggaggtggtggtaaaggaataagaaaggttcataatgatgatgaggttagagcgctgtttaagcaagtacaaggtgaagtccctggctccccaatatttgtcatgaggcttgcatcccagagtcggcatcttgaagttcagttgctttgtgatcaatatggtaatgtagcagcacttcacagtcgtgattgcagtgtgcaacggcgacaccagaagattattgaagaaggtccagttactgttgctcctcgtgagacagttaaagcacttgagcaggcagcaaggaggcttgctaaggctgtgggttatgttggtgctgctactgttgagtatctttacagcatggaaactggagactactattttctggaacttaatccccgactacaggttgagcatccagtcactgagtggatagctgaagtgaatctgcctgcagctcaagttgctgttggaatgggcatacctctttggcagattccagaaatcagacgtttctatggaatggactatggaggagggtatgacatttggaggaaaacagcagctcttgctacaccatttaattttgatgaagtagattctcaatggccaaagggccattgtgtagcagttagaattactagtgaggacccagatgatggtttcaaacctactggtgggaaagtgaaggagataagttttaaaagcaagcctaatgtttgggcctacttctcagtaaagtctggtggaggcattcatgaatttgctgattctcagtttggacatgcttttgcatatggactctctagaccagcagctataacaaacatgtctcttgcattaaaagagattcagattcgtggagaaattcattcaaatgttgattacacagttgacctcttaaacgcttcagacttcagagaaaacaagatccacactggttggctggatacaagaatagctatgcgtgttcaagctgagaggcccccatggtatatctcagtggttggaggtgctttatataaaacagtaaccaccaatgcagccactgtttctgaatatgttagttatctcaccaagggccatattccaccaaagcatatatcccttgtcaattctacagttaatttgaatatagaagggagcaaatacacaattgaaactgtaaggactggacatggtagctacaggttgagaatgaatgattcaacagttgaagcgaatgtacaatctttatgtgatggtggcctcttaatgcagttggatggaaacagccatgtaatttatgcagaagaagaagctggtggtacacggcttcagattaatggaaagacatgcttgttgcagaatgaccatgatccatcaaagttattagctgagactccctgcaaacttcttcgctttttggttgctgatggtgctcatgttggtgcggatgtgccatatgcggaagttgaggttatgaagatgtgcatgcctctcttgtcacctgcttctggtgtcattcattgtatgatgtctgagggccaggcgttgcaggctggtgatcttatagcaaggctggatcttgatgacccttctgctgtgaaaagagctgaaccatttgatggaatgtttccactaatggacctccctgttgctgcctctagtcaagtacacaaaagatatgctgcaagtttgaatgctgctcgaatggtccttgcaggatatgagcacaatattaatgaagtcgttcaagatttggtatgctgcctggacaaccctgagcttcctttcctacagtgggatgaacttatgtctgttctagcaacgaggcttccaagaaatctcaagagtgagttagaggataaatacaaggaatacaagttgaatttttaccatggaaaaaacgaggactttccatccaagttgctaagagacatcattgaggaaaatctttcttatggttcagagaaggaaaaggctacaaatgagaggcttgttgagcctcttatgaacctactgaagtcatatgagggtgggagagagagccatgcacattttgttgtcaagtctcttttcgaggagtatcttacagtggaagaactttttagtgatggcattcagtctgacgtgattgaaacattgcggcatcagcacagtaaagacctgcagaaggttgtagacattgtgttgtctcaccagggtgtgaggaacaaagctaagcttgtaacggcacttatggaaaagctggtttatccaaatcctggtggttacagggatctgttagttcgcttttcttccctcaatcataaaagatattataagttggcccttaaagcaagtgaacttcttgaacaaaccaaactaagtgaactccgtgcaagcgttgcaagaagcctttcggatctggggatgcataagggagaaatgagtattaaggataacatggaagatttagtctctgccccattacctgttgaagatgctctgatttctttgtttgattacagtgatcgaactgttcagcagaaagtgattgagacatacatatcacgattgtaccagcctcatcttgtaaaggatagcatccaaatgaaattcaaggaatctggtgctattactttttgggaattttatgaagggcatgttgatactagaaatggacatggggctattattggtgggaagcgatggggtgccatggtcgttctcaaatcacttgaatctgcgtcaacagccattgtggctgcattaaaggattcggcacagttcaacagctctgagggcaacatgatgcacattgcattattgagtgctgaaaatgaaagtaatataagtggaataagcagtgatgatcaagctcaacataagatggaaaagcttagcaagatactgaaggatactagcgttgcaagtgatctccaagctgctggtttgaaggttataagttgcattgttcaaagagatgaagctcgcatgccaatgcgccacacattcctctggttggatgacaagagttgttatgaagaagagcagattctccggcatgtggagcctcccctctctacacttcttgaattggataagttgaaggtgaaaggatacaatgaaatgaagtatactccttcgcgtgaccgccaatggcatatctacacactaagaaatactgaaaaccccaaaatgttgcatagggtgtttttccgaactattgtcaggcaacccaatgcaggcaacaagtttacatcggctcagatcagcgacgctgaagtaggatgtcccgaagaatctctttcatttacatcaaatagcatcttaagatcattgatgactgctattgaagaattagagcttcatgcaattaggacaggtcattctcacatgtatttgtgcatactgaaagagcaaaagcttcttgacctcattccattttcagggagtacaattgttgatgttggccaagatgaagctaccgcttgttcacttttaaaatcaatggctttgaagatacatgagcttgttggtgcaaggatgcatcatctgtctgtatgccagtgggaggtgaaactcaagttggactgtgatggccctgcaagtggtacctggagagtcgtaactacaaatgtcactagtcacacctgcaccattgatatctaccgagaagtggaagatacagaatcgcagaagttactataccattcagctacttcgtcagctggtccaatgcatggtgttgcactgaataatccttatcaacctttgagtgtgattgatctaaagcgctgctctgctaggaacaacagaacaacatattgctacgattttccgctggcatttgaaactgcactgcagaagtcatggcaatccaactgttctagtgttcctgaaggcagtgaaaatagtaaatcctacgtgaaatcaactgagctggtgtttgctgaaaaacatgggtcctggggcactcctataattcccatggaacgtcctgctgggctcaatgacattggtatggtcgcttggatcttggaaatgtcaacacctgaatttcccaatggcaggcagattattgttgtagcaaatgatattactttcagagctggatcatttggcccaagggaagatgcattttttgaagctgtcactaacctggcttgcgaaaggaacccaatatgcgcatacttggcagcaaactctgaagtacatacatagtaggatatggcttagcctcttgcttccgtgttggatggtctgaggaaagcagtcctgaacgacggcttcagtacatctatctgactgaagaagactatgctcgtattagctcttctgttatagcacataagctgcagctagataatggtgaaattaggtggattattgactctgttgtgggcaaggaggatgggcttggtgttgagaacatacatggaagtgctgctattgccagtgcttattctagggcatatgaggagacatttacacttacatttgtgactgggcggactgtaggaataggagcttatcttgctcgacttggtatacggtgcatacagcgccttgaccagcctattattttaacagggttttctgccctgaacaagctccttgggcgggaagtgtacagctcccacatgcagcttggtggtcctaagatcatggcgaccaatggtgttgtccacctcactgttccagatgaccttgaaggtgtttccaatatattgaggtggctcagctatgttcctgcaaacattggtggacctcttcctattaccaaacctctggaccctccagacagacctgttgcttacatccctgagaacacatgcgatccacgtgcagctatctgtggtgtagatgacagccaagggaaatggttgggtggtatgtttgacaaagacagctttgtggagacatttgaaggatgggcaaaaacagtggttactggcagagcaaagcttggaggaattcctgtgggcgtcatagctgtggagacacagaccatgatgcagatcatccctgctgatccaggtcagcttgattcccatgagcgatctgtccctcgtgctggacaagtgtggttcccagattctgcaaccaagaccgctcaggcattattagacttcaaccgtgaaggattgcctctgttcatcctggctaattggagaggcttctctggtggacaaagagatctctttgaaggaattcttcaggctgggtcaacaattgtcgagaaccttaggacatataatcagcctgcttttgtgtacattcctatggctggagagcttcgtggaggagcttgggttgtgatcgatagcaaaataaatccagaccgcattgagtgttatgctgagaggactgccaaaggtaatgtgctcgaacctcaagggttaattgaaattaagttcaggtcagaggaactccaagactgtatgggcaggcttgacccagagttgataaatctgaaagcaaaacttcaagatgcaaagcatggaaatggaagtctaccagacatagaagggattcggaagagtatagaagcacgtacgaaacagttgctgcctttatatacccagattgcaatacggtttgctgaattgcatgatacttccctaagaatggcagctaaaggtgtgattaagaaagttgtagactgggaagaatcacgctcgttcttctataaaaggctacggaggaggatcgcagaagatgttcttgcaaaagaaataaggcagatagtcggtgataaatttacgcaccaattagcaatggagctcatcaaggaatggtaccttgcttctcaggccacaacaggaagcactggatgggatgacgatgatgcttttgttgcctggaaggacagtcctgaaaactacaaggggcatatccaaaagcttagggctcaaaaagtgtctcattcgctctctgatcttgctgactccagttcagatctgcaagcattctcgcagggtctttctacgctattagataagatggatccctctcagagagcgaagtttgttcaggaagtcaagaaggtccttgattgatgataccaacacatccaacacaatgtgtgcatgtcacatctttttgttctagtacatacatagaaggatattgcttggtcttgattgatcatgtctgatttaagtcgactattatttcttggaattttcttttggacctggtgctatggttgatggatgtatattggatatgtgcgttctgccaggtgtaagcacaaaggtttagacagaccgagagcaagagcgagtgaacctgttctggttttgcagtggttcagtaaggcagaaagttgttaaaccgtagttctgagatgtattaccagtggcgccatgctgtacttttagggtgtataatgcggatacaaataaacaatttagcggttcattaaagtttgaactcaaataacatgttctttgtaagcatatgtaccgtacctctacgtgaaataaagttgttgaattagcattcgacaaaaaaaaaaaaaaaaaaaaaaaaaaaaaaaaaaaaaaaaaaaaaacgcgacccac

SEQ ID NO: 2025 - DNA, 2135 bp, Zea mays
  Clone ID: ZEAMA-23APR03-CLUSTER1970_16
atgtgtgggattctggcggtgctgggcgtcgttgaggtctccctcgccaagcgctcccgcatcattgagctctcgcgcaggttacggcaccgagggcctgattggagtggtttgcactgtcatgaggattgttaccttgcacaccagcggttggctattatcgatcctacatctggagaccagcctttgtacaatgaggataaaacagttgttgtaacggtgaacggcgaaatttacaatcatgaagaattgaaagctaagttgaaaactcatgagttccaaactggcagtgattgtgaagttatagcccatctttacgaagaatatggcgaagaatttgtggatatgttggatggaatgttctcctttgttcttcttgatacacgtgataaaagcttcatcgcagctcgtgatgctattggcatctgccctttatacatgggatggggtcttgatggatcagtctggttttcttcagagatgaaggcattgagtgatgattgtgaacgcttcataacatttcccccagggcatctctactccagcaagacaggtggtctaaggagatggtacaacccaccatggttttcagagactgtcccttcaaccccttacaatgctctcttcctccgggagatgtttgagaaggctgttattaagaggctgatgactgatgtgccatttggtgtgcttttatctggtggactcgactcttctttggttgcatctgttgcttcgcggcacttaaacgaaacaaaggttgacaggcagtggggaaataaattgcatactttctgtataggcttgaagggttctcctgatcttaaagctgctagagaagttgctgattacctcagcactgtacatcatgagttccacttcacagtgcaggaggggattgatgccttggaagaagtcatctaccatattgagacatatgatgttacaacaatcagagcaagtaccccaatgtttttgatgtcacgcaaaatcaaatctttgggtgtgaagatggttatttctggcgaaggttcagatgaaatttttggtggttacctttattttcacaaggcaccaaacaagaaagaattcctagaggaaacatgtcggaagataaaagcactacatctgtatgactgcttgagagctaacaaagcaacttctgcctggggtgttgaggctcgtgttccattccttgacaaaagtttcatcagtgtagcaatggacattgatcctgaatggaacatgataaaacgtgacctcggtcgaattgagaagtgggtcatgaggaaggcgttcgacgacgacgagcacccttacctgcccaagcatattctctacaggcagaaagaacagttcagtgacggcgttggctacaactggatcgatggcctcaaatccttcactgaacagcaggtgacggatgagatgatgaacaacgccgcccagatgttcccctacaacacgcccgtcaacaaggaggcctactactaccggatgatattcgagaggctcttccctcaggactcggcgagggagacggtgccgtggggcccgagcatcgcctgcagcacgcccgcggccatcgagtgggtggagcagtggaaggcctccaacgacccctccggccgcttcatctcctcccacgactccgccgccaccgaccacacggcggtaagccggcggtggccaacggcggcggcacggccggcgaacggcacggtcaacggcaaggacgtgccagtgccgatcgcggtctgacgagagtacgtgctcgcgcacctccctgctagcttctaccgggctgcagcctgcagcatgcactgtgcgagcacagccgatcagcgccaataaactggaggataagaacgactggtagctgtgtgtgtgtgtgtcgtgcgtgcccaccggccatatcccggtgcggcagcacgtgctattgttacgtgttgtactgccaccagcgtacgtgtctgtgtgtctcgatcatatctgtacgtttttagatttagaagagaaaaaaaaagtatgcccgtgtctgtatgtctggatcatatctgtacgttcttagatttagaagaaagaagaaaaagaatatatacgtgtctctatgtcaaaaaaaaaaaaaaaaaaaa

SEQ ID NO: 2026 - DNA, 752 bp, Zea mays
  Clone ID: ZEAMA-23APR03-CLUSTER19775_2
atcggtgaggcgagccgcgagtggaactgtggaagcgttgagcttttttcttctttgtcttgctgcgcaagaagaagggaaacgagaggcgggcggcgatggcgaagaggctgctcccgtcgctgaaccgggtgctggtggagaagctggtgcagcccaagaagaccgccggcggcatcctcgtcccggaaacatccaagcagattaggttgatgtctttcctgagactgttgcctcaaaggctaccccaacttatcaggcaggtggagcaagatgttgagactgtaatccacgttctccagccgggtccaataggaattgtggagcacaaattcacagacgcggagatcttagaggccagggctacagtgaaaagagcagtggataattggcgaagaaattggacccttgagagaaatgttagcagataaatggaaaaaatatacccctggtgtcttctatcaacagtaattgaaataaatagggtgccatggctggatgcagttgttgccattagttagatttgagcacgatctgcttatcgggagttatgttaactgttctaaatgatcagtctgtttctctttgtttcatggtttgaaacgttcatatttagagaatgcagtaattcgactccgattcattccttgtttggaaatgatctttttttcatcatactactatatgggacattttttttttgttcattgcattgtcggtagccgactggcatattggatgtgatcctttca

SEQ ID NO: 2027 - DNA, 1335 bp, Zea mays
  Clone ID: ZEAMA-23APR03-CLUSTER19856_1
accaccgtccgtccgtccgtccgtcccgacacacctccgaagtcgggcacgcgtcaaacacacctccgaagccccaacctccctgccccaacacaatggcctcctccctcgccgcgcgccgcctcctctcccgcgcagccgccgtgcgccgtcgcctccgccccagcccccccgatcctccccgcagtatctccgccgacgggggcccccctccgccggtcccgccaccgccgctgccgcccgtcgtcgagccgcccacgtcggagggcgcgggtgcctcgtcctcctccaccaccgctggtgccggaggggcccacaggtcgtcgccgggagccgcggcgggggcgcggcgccagggtggtgcgggctacggggaggagcaggagaaggtcctccgcgcgtcgctgctccacgtgccgcgcatgggctggcccgggatggggtggagcgagtcggccatggtcgcgggggcgagggacgttggcgtgtcccctgccatcgtgggcgcatttccaaggaaggaggccgcccttgtggagtttttcatggatgactgcctccaacaactgatggatcgaattgatgctggagaaggagagcagttgaagaacttgatactgagtgagagactctcaaaacttgttcggatgaggctggaaatgcaggcaccttatatatctaagtggcctcaagcactgagtatccagtctcaaccagcaaacgtctcaacaagcttgaagcagcgagctatcctggtggatgagatatggcatgctgctggagattctgggtcagatattgattggtatgtgaaacgtacagtgcttggtggtatctactcaacatcagaggtgtatatgttgacagacaattctccagagttccgtgatacttggacgtttgtgaaccgcagaataaaggatgctcttgatcttcagaaaaccttccaagaggccgcatacctcgctgaagccgtgggagcaggcatgggcggcaccgtgcagggtgttctcaacagggtcttccagaaccgtagtggatgaactttctttttctcaaacacgtagtggatggactaattccgtcttttgcaagctgcacaggataatgcacattttcccgttgaccaactggcgtatgtttataataaagcaaatggtgatgtggttgagatgcatcacgttagggtagaaagtgacgatgtgtatgctggtggtgttgttgagcttcagatttttcaaatgaatgctttcgtcgcggagtccagtccacacgcatgcgtgcaaagccgtgggacttattataatttgatgccagctgcatgcattacttgcc

SEQ ID NO: 2028 - DNA, 1494 bp, Zea mays
  unsure (1)..(1494): unsure at all n locations
  Clone ID: ZEAMA-23APR03-CLUSTER19880_2
ggcccgattaagtgtagagcaacttctttcggtatgtctggagttttccctcctttcattcgtagaaagcagggttgggtggtggcagcagcaacataccaccaggttcagcacaataggtaggatgctcttacaagaccttttaatgttaaggagtgattcgagcttcagggactacggtaaatacgctcataccccacattttattttaaggagcgttccaggctgcatagattagtgatatcaaatttcatgaaaagtttatgccccttcgattgattagttgtcaatacatagctttgttgtttcaatttgggttttgatattgcccatgtatgactatttttacttttctgtactctatttccttgcccccctccctttattttactaagaaattttttttgaaaaaaaaaaaaaaaaaattttttttttttttttttgatgcatgcacatatatatagccacttattcatataaaaaaaaccgaacccctagatgatctatatgcaaataaagctgaacgacactggaaagggaaagagtccaacgacctattatagaacattaacaaacacgtacgtaccacaccgacgagcgatcctgcactgtgcaacaactaactaatcaacaacacccaatgaacaccgcacgtagtgcaacagctaataatccagtaatccaccggtacgtccgatccggccggggcagctcatcagaatccgatcagaagcacaaggtggaagaacgcggcgaccgccgctcgtcgtcgccgtcgacgacaacgacaccatgttcgttccgggcgacgcagcgctgctggtgatccgtcggcgacgacgacggcggtgaccgccgcctgacgttcaggctcagccagccgatgatccaacctgcgggaggccaagaggttcttgctggcctctgcttcctcgcgaacttgttggccttggaccgggacaccgcctgctggtaggacggcggcggcgagatcggcggcaccggcacggcgccggcggtcgacgaggccgaggccgaggccggcggggtgacggagctcttgggcgtgcctggcttggactcccacaggaacggcacggtgccggcgccgagactgtagtatacccggaaggacgcgtcggccacggccacgctcgagcggtcccttgcgaggatcctcctcgagctgaacagcttgggcccttcttgcttaataccggaggaggagctcatcatctgctctgctgctcatatgagagagaaagatcgagatggatggatggatggatggaaagagaagtcttgcgctttgcagagctagctggttagaacaagtcgcgacgagctagaggtagccaaggtgtgtggcacaacaacatgtacacattgaatgagggatgtgattcttttttttttttttttttttttttttttattttttttttttttttttttcttttttttgtaattttttncccggccggcccctcgagg

SEQ ID NO: 2029 - DNA, 1994 bp, Zea mays
  Clone ID: ZEAMA-23APR03-CLUSTER19880_3
gcacgagaccattacctagaacatcctaatcgaaaaagttttccattccttgcgcccccttcagatccgatctgatccacgccggcgagacaccggaggaccgccatgacgctcagcctccgtcgcaagcagctcgatgttatcgtgcggatgctgcacctgaaccagcagcagttgccgaacggcggcgagggacagggagaggacgatgcgtacaagatcctggttatggatccgccctgtatctccatcctctcgcctgtgctcaagctcggcgacctccgccaccaaggtgtcaccctcaccctcgccatcgatcgtccgcggcaggcggtgcccgatgcgccggccgtctacttcgtccggcccacccccgggaacgtggaccgagtagcggccgacgccgccgcggggctctacgggtctttccacgtcaacttctccacctccgtcccgcgacccctgctggagcgcctcgcaaccgcctgcgccgccgctccgcccgcgtgtgcgggccgcgtggcgcgcgttgctgaccagtacatcgacttcgtctgcatcgaggatgacctcttttcgctagcgcagccccgggcctacgtcgcactcaacgaccccgccgctgccgacgccgacatcactgccctcgtcgacgccgtcgcgctgggcctcttctgcgtagtcgccacgctcggtgttgtgcctgtcatcagttgtgcgcgcggcgggccagcggagatggtggccggcgccctcgacgcccggctccgcgatcacctactcgccaagcccaacctcttcacggaggctgcatctgccgctgtcacgtcattccagcgccctgtgctgtgcctcttcgacaggaatttcgagctgtctgtaggggtgcagcacgactggagctaccgcccattggtgcacgacgtgcttggcttgaagcagaacaagctgaagttgccggcagagaagtacgaattggatgactctgataaattctgggtggcaaacagctggtctccattccccaaagttgctgaggaaatcgaagcgcagcttgccaagtacaagcaggatgtggatgaggtgaaccagcatactggtggtggcaaggttggggttgagtttgatggtactgatctaattggcaacactaagcatctcatgaatgcggtgaactcactgccagaactgacagagcggaagaatatgattgataagcacaccaatattgcaacatctttgcttgggcatatcaaggagaggtctctggatggatactgcagctgtgaaaatgatatgcttgtgagtggcactgtcgaccggaatacactgctgagtctcatcagagggaagggtaccaaggaagataagcttcggctagctgtgacctacctgctgtcctttgcgacaccaccatcatctgagctggagcaggttgaggccgctctgcgggaatcggaagttgacatgtctgcatttcagtatgtgaagaggataaaggcattattaatacccaatttgcagctgcctcaggcacagcaactaagagcaacatcgtcgattgggcagagaagctgtatgggcagtccattggcgctgtgaagaatctcttgtcagatagtaggcagctggccttgacaagaacagttgaagctcttatggaagggaaaccaaacccagaggtggatgactaccttttgtttgatccacgggctcctaggtcaggaactagtgggcagtttaaaggacccttcagagaagccgttgttttcatgatcggtggtggaaattacattgagtacaagagcttgatagagctaaagcaacgctcacagccttccaaacatgttatatatggtgcaacagaaattcttagtggggccgagtttattcaccaactggcagagttaaattatggatagaaccagtagaaccacatgtttacagcacatggtctaactgtcgaatgaaagtgtgcctgacgtctgacctgc

SEQ ID NO: 2030 - DNA, 1368 bp, Zea mays
  Clone ID: ZEAMA-23APR03-CLUSTER19895_2
aacctcagctccaaataactctaccgctgacgctcacgagctctccgctcaacagaaacggcggtggttactggaagccagcttgaccggttcggttgccaccaacgcgacccgcaaaatctcgtcgccgaccgccatggcagccgccgacgcgtcgcgtacgctgcttgctgcagtatctctcgccttagctgcctgctgcctcgcgcagctggcggcgggggacacgaacagcgtctacgagccgtgcagcgacgcacggatccagcgcggggacggcttcaccttcggggtcgtcttcgcgggatacaacgccttcttttccggcaacacacagctctccccctgcgaccgccgcctcaacctcgctgcctccgggcagctcgccgtcttccgccccaaggtcgatgagatctctctcctcaccatcaacaccaccactggattcaacccagcttcagctggtggatttatggtagcatttgctggtaggaagtatgcagctagatctactccgatattcgtatccaacacctcagttacagtgtccagcttcaccctggtgctcgagttcaacaaaggcagacttcaaaacctgcactggaagaaggacggctgcggtgcctgctccggcaaatcaaacttcgtctgccttggcaaacagacatgcgccatccggacgcagagctgcaagagccaagggcctgtcgactgcagcgtcggcatccagctggctttctccggcacggacaagcacgagtcggttctgaactcgtggtacgaggtgtccaacctgaggcagtactccctctacgggctctactcaaacctcaagggcaccctgagcggccagttcaacaagatcttctaggctgttttggcgctgccattgtttattctcccccctgctccctcctcttctttctgtcggttgctccggttcctcatgttgtgcttgcttcacattcttttagttgccgcccgcccaggttgcttgtatccagacctgttttaacgctgtctgaactctaccgttgcccgttggtgtcattttagcgccctttttttggtcaccccttgagctttaactttagttttgtgatgaaaaaaaaaaaaaagcggctgtctgctgtcctgctgatgactgttgtgtttggcccaaaggaagcgtcatattgccctgtctgctgcagagctgtgcagagttgcttggtcctcgtgataccccaccgcctgtacctatcatcgaccgctcaaggtttctgaaagtgtcatactatcgtccggctgttgagctagtccagattcccacttggttttgcaacttttttttcctttcaatttcgcccaggctcgctgagtagcttt

SEQ ID NO: 2031 - DNA, 1354 bp, Zea mays
  unsure (1)..(1354): unsure at all n locations
  Clone ID: ZEAMA-23APR03-CLUSTER19920_3
cgccaagcgcgcaattaaccctcactaaagggaacaaaagctggagctccaccgcggtggcggccgctctagaactagtggatcccccgggctgcaggaattcgcacgagaccattacctagaacatcctaatcgaaaaaaccacatcgcanatcaaagaccagaaagctcaaaccaagaccggcgtgcgcggacgaagcacagatccatcggagtgacagcgagcgagcgaganngtagagcgagagagacagagagattgtccgcgcgtcaccgactcccggcgaagacgatggggaaggggttcgcatcctacctggcgatgaagacggggccggagggcggcgacgcggcggcggcgcagcaggctctgatcgacgcggacctgcgggagctcggcgtcgccgcgcggaagctcgccaaccacgcattcgtcctcggcggcgggctggggttcggcacctccttcctcaaatggctggccttcctcgccgcagtgtatctcttgatattggatcgcacaaattggaagaccaacatgctgacagctctcttggttccttacattttcttcaccctgcctaatgtgctgttttctctgatcagaggagaggtggggaaatggattgcgattattgctgttattctgcgtctattctttccacgacacttcccagattggttagagcttcctggttccatcatcctgctcacagtggtcgcccctagcctgttcgcggacagcttcaggggagacctcgttggtgtcttcatatgccttgtgatcggatgctacctgctccaagagcacatcaaggcgtcaggtggattcaggaacgccttcaggaagggcaatggtgtgtcgaactccatcggcatcctcctgctcttcatctaccctgtctgggccggtgtgctgcaagtcctgtaggcacccaccattgcctcagtgtttcccctgtgcggtccaggcgtccagctccgttcccgttcgtgcccgtgcaaatgctccctctatggtgatccgtgatcctgtgtcacgagtaggtgatgtttttatgtgtgcttgagttgatcggttgggcatgttgccatgttggtggacagttttgtttatctcatttgttgtagttcgatgtcagcatttggttcgttcgagtacataaacgccaataaaatcagtagccgtggcttgatgtagattgacatgttggtcatattatctcgtgcaaatccctgcgtctcttctgttatgcaagttaagaggacgcatgtttatatatcaaccaattattttctaaaaaaaaaaaaaaaaaaggtgttatttcaaaaaaaaaaaaaaaaaaaaaaaaaa

SEQ ID NO: 2032 - DNA, 579 bp, Zea mays
  Clone ID: ZEAMA-23APR03-CLUSTER19935_4
aactcgcaattccgcattcgttccaactcctgagcactttctcctcgtcccagacaagccaatcgaagccgagatacgaccatggactccaccggcaccggagcagggggtaaggggaagaagggagcggccgggcgcaaggtcggcgggccaaggaagaagtcggtgtcgaggtccgtgaaggccggtctccagttccccgtcgggcgcgcccgcattcgccgccgcgcccgccgcgctcctcttctccctcctcgcctactacctccactaagcgtgtgcgtgcttacgtacgcgcgcatggacgacgatggatccgtccaccgttgccattgcagttgcctcgctcgttcttggtgactgttgctgcggtggtcgacttggaagacgtcacctgcaccgctgtttccatatattattattgatgtgatctgatatgaatatatatgcatggtgacgggttgtgttaattacatagacgtgatttaatttatctatttgtgtcaagtcgttctgtaatcatgcgatgaaatatatgatttggttttccgcaaaaaaaaaaaaaaaaaatttgcggcc

SEQ ID NO: 2033 - DNA, 1672 bp, Zea mays
  Clone ID: ZEAMA-23APR03-CLUSTER1997_2
aattccgctgcatacttgcattgcatctcatccctcctgctcctgcgtcctcctcctctatttctctcctgctgcttgctactacctcatcgatccattccatccatcgccgaggggggagggccgccgcccgcccgggtcgcatcgcatcgcccggtcggccggggactcggggcaggcgagcgacactagctataaaagacctcccgccgcctgcgactgggccgtgtgcaagcaaagcgcaaggccgatctggggttggagggccggccatggtgatgatgatgcggtcgtgcctcggcggcggcctgctaccggtggcggtcatgctctgcctcaacgtggtggcggcggtcatggtgtcgctcgtcaaggtggccatggacggcggcatgaaaccgctcgtgatcgtcaccctgcagcagctcaccgccgccgtcttcctcgcgccaatcgcattcttcaaggagaggaagtcgaggccaaagctgacgctggagatcttcgcctacatcttcgtcagtgcggcgctcggcctgcgccatatattgcagggcagctcttcgtcagtacatgatcttcgtggccctgcgctacaccacggccaccttcgtgaccgccttctccaacatcgcccccgtgctcaccttcctcctggccgtcgctacgcggtccgaagcgctggacctcaagagcaggacggggttggcgaagctgctgggcacgctggtgtcgctggccggcgccatggtgctcaccctctacaagggcgtggcgctcacccacgcggcggcagcctcgcaggaccaccagcagcactcccacggccggttgccgccgagcgccgccgacagccgcggcaagtggacgctgggcaccgtggccatcctgggcaactgcgtctgcctctcctgctggttcctgctccacggccgcctcgccaagaagtacccgcacgtctactcctgcaacgcgctcatgtccttgctcagcttcctccaggtcgccgtcgtcggcctctgcacccagcgcagcatctccccctggatcgtcaccagcaagttcaacatcctcaccgtcctatacgccggcatcgtcggctgcggcgtctcgttcgtgctggtgacatggtgcatcgagaagagaggagccgtgttcgtggccgccttcataccggtggtgcagatcatcgtctccgtcatcgacttctccatcctgcacgagcagctctacctcggaaggtacgcacggacacggtaccatgccatcactgaatggcaatcgacctgatcgaaagtgaagtcacctgctctgctctgctctgcttccccctttgtgctgtgcagcgtgctgggatcagtgctagtgataggtggcctttaccttctgctgtggggcaagaggcaggaggccctgcactgtcctcctcctcctccaaaggttgccgaagaagaccctgctgacaaagagcagcagcaagtgcagcacaactgaagacggacagcatcctctgactgtttggtcgtttggttgtaacagtgccagcaataagatctctctgcctccttttcttttcttttggtgtctcaggggggtgggcaatgttccttccttctcagatcgatcaccaacaaagtgtttagattctaatccaaaacagtagaatggtctt

SEQ ID NO: 2034 - DNA, 1447 bp, Zea mays
  unsure (1)..(1447): unsure at all n locations
  Clone ID: ZEAMA-23APR03-CLUSTER19996_1
naggtataagatgagagtgtgtaagataggatgcagctctagcgggaagagtcatatgcgtagtgaattaagtgagaaggagacaggtgtgactagaagagcggcataggggcgagcatcggcaggtggatctctagggaagtaaggtcgtgcgggtgtgggtagtgtgattctgagtacatagagaagagagtatatggtgtaggtcgtagagcttataacgcgtgtggagagtattaaaggtaggagagtattcgggtaggtagagtctgtccgagaagcataatttggataagtggccagataacaggtgttttgtagtggcacgacaagattcgacgaggagcacgagaccattacctagaacatcctaatcgaaaaccaggtcctccaccgcaagtgacagagaaccagagaaaccataagcccatagcaagctaaagcacaggagcgcaagagcccagcaggcgccaagaaaagcaccgcccggctggtccgcgccagcgcagtatggtgacggcgatcgcggtggcgtcggcggggctcgggatgctggcgggcgtcgcgatggccaacaggtcttcgccgccgtccgcgggcgccgcgctgtggaggcccggcgggggccccgcgctgcgctggggcggaggcggaggcgccccgcgctgcgaggcgtgcggggggtcgggcaaggaggactgccgcctctgcgcgcgctggtccgacgccggcgcccgcgggaagaagattagccgctccgggtgcggcgcgtgcgccggcacgcgccggacgccgtgccggtgctgcggcgggtccggtaccggccgacgcgcgcccgtgcggatcgccacgtccgcgcgcgccgcaccgacgactgccaggtgaggtgatgaccgcccgtcgcgccgacgccgacaccgatgccgatgccgagtctctcttcgcctctcctggacccgccggttctcccggatcatggatgaaggcggctctgtgcggcgcgcgggcgacctgctggcacaagggaatgacggcgcggagctcttgctctcttttttggacgaaaaaagatcagagattgagattgtagtagtatttgttagctagcgcgctggattgattagcaaaaattattgaaacgcgctatatttattttgcatagcaagatgagttacgcaacgcaaaaaaaatccaaaaagtctcccaaatattgtctaatctatatattctctccgatataacctaacccgcccgctctggctattgtcgttctcatactaacatatttatttttcaccaccccgccccccaacttcttatttttctcgccctccaccccctgtgcatagtttctccccccacccgtccattccacatcttctatctaactatcctctcattgtgtcatcccgcgcggccccaccgcgcggggtgcgcctccccaccn

SEQ ID NO: 2035 - DNA, 3351 bp, Zea mays
  Clone ID: ZEAMA-23APR03-CLUSTER199_37
gcacgagaccattacctagaaatcctaatcgaaaaattcttgcagtgcgctgtgctttattgggaagccaaatcctattattttctgcctctagggtctgaatggaatcagtactcttgagacagaaaatcaatccaatcaagttgatttctttctttaaaaatattatcacagaactaagtgcttgtgcggaatcagtactggcttttgtttggtggaggatcaatacttgcttttgtttgggggtggcaactgttttgctataagattccatgtgttcctgttgagatgaatcatatatagtatagctgcatactacaaatctgtttttcaaatttaggttgctttggcatgatctatttttttgtcaaacagactttctaagtggtagctcttgatttcttgttcttgtacaactggtgctgctgaatcttgaccgtatagctcgaattgcagtattctgaaccatcgagccatggctgccaagctgactcgcctccacagtcttcgcgaacgccttggtgccaccttctcctcccatcccaatgaactgatagcactcttttccaggtatgttcaccagggcaagggaatgcttcagcgccatcagctgcttgcggagtttgatgccctgtttgatagtgacaaggagaagtatgcaccctttgaagacattcttcgtgctgctcaggaagcaattgtgctccccccatgggttgcacttgctatcaggccaaggcctggtgtctgggattacattcgggtgaatgtaagtgagctggctgtggaggagctgagtgtttctgagtacttggcattcaaggaacagctggtggatggacaatccaacagcaactttgtgcttgagcttgattttgagcccttcaatgcctcctttcctcgtccttccatgtcgaagtccatcggaaatggagtgcaattccttaaccgacacctgtcgtccaagttgttccaggacaaggagagtttgtaccccttgctgaacttcctcaaggctcataactacaagggcacgacgatgatgttgaatgacagaatccaaagccttcgtggtctccaatcatccctgagaaaggcagaggagtatctactgagtgttcctcaagacactccctactcggagttcaaccataggttccaagagcttggtttggagaagggttggggtgacactgcgaagcgtgtactcgacacactccacttgcttcttgaccttcttgaggcccctgatcctgccaacttggagaagttccttggaactataccaatgatgttcaatgttgttatcctttctcctcatggctacttcgctcagtccaatgtgcttggataccctgacactggcggtcaggttgtgtacattctggatcaagtccgtgctttggagaatgagatgcttctgaggattaagcagcaaggccttgatatcactccgaagatcctcattgttaccaggctgttgcctgatgctgctgggactacgtgcggtcagcggctggagaaggtcattggtactgagcacacagacatcattcgcgttccgttcagaaatgagaatggcatcctccgcaagtggatctctcgttttgatgtctggccatacctggagacatacactgaggatgtttccagtgaaataatgaaagaaatgcaggccaagcctgaccttatcattggcaactacagcgatggcaacctagtcgccactctgctcgcacacaagttgggagtcactcagtgtaccatcgctcatgccttggagaaaaccaaataccccaactcggacatctacttggacaagttcgacagccagtaccacttctcttgccagttcacagctgaccttattgccatgaaccacactgatttcatcatcaccagcacattccaagaaatcgcgggaagcaaggacaccgtggggcagtacgagtcccacatcgcgttcactcttcctgggctctaccgtgtcgtccatggcatcgatgttttcgatcccaagttcaacattgtctcccctggagcagacatgagtgtttactacccgtatacggaaaccgacaagagactcactgccttccatcctgaaatcgaggagctcatcaacagcgacgtcgagaactccgagcacaagttcgtgctgaaggacaagaagaagccgatcatcttctcgatggcgcgtctcgaccgcgtgaagaacatgacaggcctggtggagatgtacggcaagaacgcgcgcctgagggagctggcgaacctcgtgatcgtcgccggtgaccacggcaaggagtccaaggacagggaggagcaggcggagttcaagaagatgtacagcctcatcgacgagtacaagttgaagggccatatccggtggatctcggcgcagatgaaccgcgtccgcaacggggagctgtaccgctacatttgcgataccaagggcgcattcgtgcagcctgcgttctacgaagcgttcggcctgactgtgatcgagtccatgacgtgcggtctgccaacgatcgcgacctgccatggtggccctgctgagatcatcgtggacggggtatctggcctgcacattgacccttaccacagcgacaaggccgcggatatcctggtcaacttctttgacaaatgcaaggcagatccgagctactgggacaagatctcacagggcggcctgcagagaatttatgagaagtacacctggaagctctactccgagaggctgatgaccctgaccggcgtgtacgggttctggaagtacgtgagcaacctggagaggcgcgagacccgccgctacatcgagatgttctacgccctgaagtaccgtagcctggcaagccaggttccgctgtccttcgattagtacggggaaagaagaagaagaagaagcccaggccggagaaccatcgcctgcatttcgatctgtttcaccgcaattcgcattgttagtcgtgtattggagttatgtgtacttggtttccaagaactttggttccttgtttttttttctttcttgtttgagcgtttttgggcagcgctggcctggttcctagtatggtgagaattggctgcaccttttgcttcgaataaaaatgcctgctcgttcacctgtcttccagagtgcaatgcgatgttctgttgcccaggtcgtgtggttctgactgatggcgatgttgtgttcttctgttaatcgcctgtttaacgtggtaggctgatgcttcttgttgagaaagcttgctgtgccagacatggctgcttgaatacaagtgaaggaaaaaaaaagccatgccaagtaaagttgcacaaaatttcaactgctcaaaaaaaaaa

SEQ ID NO: 2036 - DNA, 2397 bp, Zea mays
  Clone ID: ZEAMA-23APR03-CLUSTER200142_1
ctgcccctcgctcgatctacccccctccttcctcggctagctccaagaacccgtcccacttctccacttcttggcaggtcgatcggccgtgaacgatttcggatcctgtcgcgcgcgcgtgtccatggcgtcgacggcggccaggcggctgcttctgccgctgctgctggtggcgctcatcgcggcgcaccgggcggcggcgcggttcgtggtggagaagaacagcctgcgggtcacgtccccggccgtgctccggggcgtctacgagtgcgccatcggcaactttggcatgccgcagtacggcggcaccatgcacggcgttgtcgtctaccccaaggccgacgccaaagcctgcaggcccttcgccgactccggcctctccttcaagcccaggtccggcggcctgcccgtcttcctgctcgtcgatcgcggagattgctacttcacaaccaagggatggaacgcacagaacgccggagctgcagcagttcttgtggccgacgacagagtggagcctctgatcacgatggactctccagaatccagcggcagcacatagagaacatcacgatcccatcggcgctcgtgaccaagagattcggcgaggacctgaggaaagcgctgcagagcggggacatggtgaacgtcctcctggactggagggagtccctgccccaccccgacgagcgcgtggagtacgagctctggacgaacagcaacgacgagtgcggcgccaagtgcgacatgcagatgagcttcgtgaggagcttcaggggcatcgcgcaggccctcgagaagagggggtacacccagttcaccccgcactacatcacgtggtactgccccgaagccttcgtcctcagcaagcagtgcaggtcgcagtgcatcaaccacgggaggtactgcgcgccggacccggagcaggatttcagcaccgggtacgacggcagggatgtcgtgctccagaacctggtccagatatgcgtgttcagggtcgccaatgggactcgcaggccgtggatgtggtgggactacgtgcacgacttcgctgtgaggtgcccgatgaaggagaagaagtacacgcgtgagtgtgcgaatggtgttatcaattcacttggactggacatcgagaaaatcaacaagtgtgttggagatccagaagctgataaagaaaatccagtccttaaggcagagcaggacgctcagattgggcatggttctcgcggcgatgtaactatactgcctactcttgtcgtcaacaacagacagtacagaggtaaactggaaaaaacatctgtgttaaaagcagtatgctctgggtttgaggagacaactgaacctgatgtctgtttgcgcgaagatatcgagacaaatgaatgtttggagaacaatggtggttgctggttagacaaggctaccaatgtttctgcgtgcaaggataccttccgtggtcgtgtctgcgaatgccctattgtgaatggtgtgaagtttatcggtgatgggtacaaccactgtgaagcttctggccttggtaggtgccagatcaacaatgggggctgctggaatgagactaggaacgggaagagtgtgtctgcctgctcaaaccaagaagctaaaggctgcaagtgcccagcaggtttcaagggcgacggagcgaacagctgcgaagatgtggatgagtgcaaggagaagcttttctgccagtgcaaggactgcgcttgcgagaacacgtggggaagctacgagtgcagctgcggcggcggcaactcgctgtacatcagagagcatgacacttgcatcagcaaacattccagctcgacgccgggctggggcttcctgtgggtggttttcttgggccttgccttggccggagcaggagcgtacgccgtgtacaaatacaggctacggagctacatggattcagagatccgcgcgatcatggcccagtacatgccccttggagagccaagacatgccgagccaacaacaccacctcgtccccgtcgaccgtgcagacgtctgaaacggcaggcaaggcttgtttgcatgacatggatccagcataaagagctactgagtagcatcgcatcgtcggcagagaagagaagtcggcggcaccggcatcttcctcccttggtgcgcagaatatggatgctgaaaaatcacagtttcacggagcagattaggatctctctccgcagtttagagcccgtttgtcaggtttagagctcgcagtcgtgctgtgcgttgctgcgtaatcgtcgagtgttctgtaaatattcctgttgagacccaacgctgaagcgcgcgcgtgttgctgtgctgccctgaataaaaggagcccaggaagatcatttttagtattactagtgtttgcatccaaaaaaaaaaaaaaaa

SEQ ID NO: 2037 - DNA, 920 bp, Zea mays
  Clone ID: ZEAMA-23APR03-CLUSTER20016_1
gcacgagaccattacctagaacatcctaatcgaaaaaacaacatttgggccccgttaggtccagcagcggcgcttgtctgctgagcgccggtccggtgatgtcgtccgtcctccaggtttcctttccacccccgccggtccagcgcaacaccagtcggcgtagcggatctccggtgaggtcgagggatggcgaatggcggcggctacgtgtgggcccttcacgcgggttctaacccacgacacggcggcgggtttcaacgccgcactccccgccatttccgccaagttcttctccactctgttgctcaaatatggcatggtgatacttttcaacgtgacaatgtgggggtggtacgtcaacagcctcaaagctttgtcatccctccaggcaacagtgacaaacttcgccgccaacttcatttcgtctgggcttgcggggtgtttcctgtttgatgagcccgtgccaagtgttttgcatgccagtcttatcactcagcaagtcaagcatcgaggagaaacagaactcagatttaggaggaagttttgaccattgcgtgagcttttagcgttagctggtaacataaggtgaggctgcttatacttagggctagtttgaaaaccccatttttttcaagtgatttgtattttttcaaagagaaattagctcatttttccttaagaaaaaaaaggaatttcttgaaaaaaaatagagttttcaaactagctcttatatatattttttccatgggatgtttgtccatccccaccccatgcaaagacaaatcagaccatggctaatacaatgtaccaattattttctgcaagctgtctaatatagagcttagttgatgtttgattgtagtggacaatgtagccatcaaactggacttgtacatggtcagccctaaatgatttttcgc

SEQ ID NO: 2038 - DNA, 1092 bp, Zea mays
  Clone ID: ZEAMA-23APR03-CLUSTER20150_2
gcacgagaccattacctagaacatcctaatcgaaaactcgaagcctcggatctccgccgagaaagcatctccaggtgaggtatctgaaactgaatccaaagtacgaagtcagtaatgaggagtgtgtctctctcaggcttgaactgtcgcagagttcagtgaaactcgacactatctttgaggcatctttcaagttcatgatatatgatcagttaatcggaaagcacaaggtgcatctaggtaaccacagcttccagactgcaagtacgagctctgccatcgcattcatgttacctctgaaagcactcagacaatcctctagatttattgtcaataacagctgcgtatttggcattggcttcatcaaagttgccactatcaaagttaacacgacgctagaaacactgtttgtcaggaagatgaacatcttcaacgaggccaaagtttacacttggaaaatcgaggatttctctgctctgaagaacccgtcccactcaccggagtttgagatcgctggatacacatggattatctctttgaatccatcctacgatggtaacagcctgtccttattcctgaaaatgaagaagacaaacgacgtccccaaaggctctgggagcctggtcgagttcgctttatccatcaaagaccaggaaaacggcaaggacaggaaatatccaggcaggtgccagttctcgagcaaacaccatcgctggggatggaagaagttcatctcgctggaggacttcaaggactcgtcaaagggttatctcatcaagggcaagtgctgcatcgaggctgaggtcgcaatcagtggctcttcgaagacggagtactctatgtaatttgatttgtgagagctcatgattagtgtttattctcgctagaaccaactatatagcgtgttccatatgtattagcatgccatcgagactctagcttgctctatagatatctcgacgtatccgctcttcaagcttcgttctgtcgagttgaatgtggtctaataagtgaatatatgcaaactgggatcttattattttggacacttgtatacacataagtcattatttagtgatgctatcaagaatc

SEQ ID NO: 2039 - DNA, 1378 bp, Zea mays
  Clone ID: ZEAMA-23APR03-CLUSTER2016_5
atcctcttgcgtcacacctcctccctcctggcctcctcctgcggcccacttatatataccaccacgtcgatgcgctgctccgccggcatctccatcgccgtcgcgccgccgtagatggcctgacatttttcacttcatttgtcatcccaattccacaaacctcgcgcgtggcggcggagggaaacaaaaaaaaaaggaaggatggcgttggagccggtggcgcgggcggtggcggaggaggtggcgcgctggggcgcgatgcgccagaccggggtcagcttgcgctacatgatggagttcggggtgcgccccacggagcggaccctcctgctcgccgcacagttcctgcacaaggagctccccatccgcatcgcgcgacgggcgctcgacctcgactcgctccccttcggcctctccaccaagcccgccatcctcaagggcagcacgtcgctttgcatgaccctgatccagagcctggtgtgatagggcttataaacacaaaaatgtcacccatgacagtagctcgaattgctagtgaagatgcacgtgctatttgcatgcgggagtatggatcatctcctaatgtcgacatatatggtgatccggggtttacattcccatatgttacaccacatctacatctcatgatttttgagctggtgaagaactcccttcgcgcagtacaggaacggtatatggattctgataagcttgcacctccggttcgaatcatagttgctgatggagcagaggacgtgactattaagattactgatgaaggtggtggaataccaaggagtggtctctcaagaatttttacgtatctctatagtacagcagaaaaccctcctgatctcgatgtacatatggaaggagtaactgtggctggatatggttatgggattcctattagtcgtctttatgctcgatatttcggcggggacttgcagatcatctctatggaaggatatggaactgatgcatacctccacttatcacggctgggagattcggaggaacccttgacttaatcgattcataagaagccattcctcattcctgtagttaggactctattgctttctcaattaccgtgctggtatgcaaatattgttctgaaggccagtcacctattagttcagctgtccatgccctatttgttatctttgttgttcattcatcatctcgatggaatgtgatcataattcagaatagttttgcttctggtttgtactgtcattataattgttcaacctccaataatggtatctgtcgagcacccgaggcattgaatttgagtaatggaattcaccataattgttcaacctccaataaagtctgtaactccaattcttcaaagcatgttttttagttcgac

SEQ ID NO: 2040 - DNA, 1138 bp, Zea mays
  unsure (1)..(1138): unsure at all n locations
  Clone ID: ZEAMA-23APR03-CLUSTER2017_1
atcgacacggcccaccagccgagcagtccagtccagtccagtctagtccaccacaagtccccacagccgcactaggaaccgaaccggccgagagggaggccggaggggggagagcagcgcagcgcagcgcgcggggtgggagtgggagtgggagccgcggcatggcgtccggcgtgtcgccgancatggcgctggcgctggcgggcttctgcttcagcctcatcttcatcgccttcgtctgctcccgcctcgcctgcgcgctcctccgccgccaccgccgccgggcccgctcgcgcctcctcgccctcccgcgctactacaccgactactccttcgccgcccaccaccccgcgcccggcggaggcggcgggattgggcccgccgccgtcgcagccctccccacccgcgccttcgccgcccgcccccgcggctccgccgcctccgacgccgagtcccagtgcgtcatttgtctcgaagaatacgaagagagggacgtgctacgcgtcctccctcactgcggccatgacttccacatggcatgtatacatgtatggctggagcagaactcgacctgccccgtctgtagaatctcgttgctcgataatcccaacagcgagcacaatgcccctccgccgccgccgccgccgctacccggtgtagcagtgacgatgagctctccaggctctcctgagccgccaggctccgacccgtgccgctgcctgttcgccggtgccgggcactcgtccagggcgtcatcagaagctcctcctaggcacgaccccgaccaggagaatcaggtggcgtctgggccatcggtggacgggggtgctaacagtaacggcatgccgctgtccgaagttaaccccactccacccgagagcaacagccagacagggaggaagcagcagcagccagggccctgcaaatagcagctgcctggagtcggcgaggcgagatcgctgttctgcagcggtctgctgcagggcgagcaaacacctgtacagtggcagatggctgtctggctgctgtaggttgggagatgatgtaaatatgagaaatcattcagatttgttgttggaaaccaaacacacttcatctgttcagtattgatgctgaaaacataaaaaaaaaaaaaaaa

SEQ ID NO: 2041 - DNA, 1653 bp, Zea mays
  Clone ID: ZEAMA-23APR03-CLUSTER20187_2
aacggtccagccgcacccgcgctcggcatacggcgcctctcggcctacgttctccgtgggccgtggcggcgtgccgcccacccgccctctgccctcgccccacccggccacccgtcgacgacggtcctccgccctcgccccacccgtcgacgacctcgtctcctccgtgcgcgggcctcggctagctcctgcttggcgctgggtagcgggctcgtcggtgctgggtagcgggctcgtcggtgctgtgcagatccacccgcgccccgccttgttctgtgctgccgcttggcgctgcgtcactgaccaagtgcgtgcctgccagccgaccgacggccagcaccacatttcgcagagcccttggtgctctctcttggctgtcagcagcagaagcacagcgcagagtcgccccagccccctgcgcctgctgcatagtctgccactgcccctcagttgttgtggtggccaagggacgaatcactctctcattctcaatgtggcacagtttcttttcgatgcaccggatagcctctcgcttgggtttgcttagtaggagatgttacagctctgccatgaaagggggcacttcgatcgccggagttggcgacatcattgctgtcgcatcagggaaaggcggcgtaggcaaatccaccactgcagttaacattgctgtagcacttgccaaggagtttaagcttcaggttggtttgctagatgctgacatatatgggccatccattcctacaatgatgaacctccatgctaagcctgaagtaaatgaagacatgaagatgattccagttgagaaccatggtgtgcgatgcatgtccattggtttccttgtagacaatgacgcaccaattgtttggagaggtcctatggtaatgagtgctcttgagaagatgacaaggggagttgcttggggggaccttgatattcttgttgttgatatgcccccaggcactggcgatgctcaactatcgatgtcccaaaggcttcggttatctggtgctttaattgtttcaactcctcaagatattgctcttattgatgctagaagaggagccaacatgttccgcaaagttcaagttcctattctgggattggtagagaatatgagttgttttaagtgcccaaaatgcggtgagaaatcttacatcttcggggaaggtggagcgcagagaactgcagaggaaatggacatgaaattacttggtgatgtacctcttgaaatcagcatcagaacaggttcagatgaaggcaaccctatcgttatatcatcacccaactctgcatcagcacaagcgtacgtaaatgttgctgagaaggtgactcaaaggctcaatgagctagcagaggagcgacggatgggcccagaaatcttactttgagacattcaagccacttttctacacaccttcccctgtttgacgctacggcgccaaaaaaaatgcactgataaatagtgttgttggaagtaaacttccaagttttatcagttgggctggaaattttactcgaataaaacctctgctgccaaccttgtctttgtcacgcatgtcccttatctagtattctagtctctgcattttttttcatgactcattgagtgataattgtatactagtaatatatagtatgtgacctctgcttttg

SEQ ID NO: 2042 - DNA, 1607 bp, Zea mays
  Clone ID: ZEAMA-23APR03-CLUSTER2019_15
ctacctctcccgtcgcacctcgccctctcccttgccctgccctagatctcggcctccagtcctcgctgccgccgcgacttgctcgccccgtctccctccggccccgcctcatcgcggccgtggtggccaaggaacacgagctcattggaaacactcttaaataaagcttccaatgaacaagacaggagctcgacttcgcctggctccgaacatgtggatggcaaccggtagtgaagcctcgaaggcagctgaggctgtggttgaccggcataaacaggacagcaagaagatgctccatgcggtttaccgtgttggggatctggaccgcacaatcaagtactacacggaatgctttgggatgaaactgctgaggaaaagggatgttcctgatgagaagtacaccaacgccttccttggctttgggtcagagaacaccaactttgcagttgaattgaccaactttgcggaggtctcgcgtcctgcgtgcgtcgcgccgttgcctggctccgtcctcgccgttcctctgtagaagctggccgctgacccccgccgtggtggccgtcgcgccgtttttttattagatgaagaatgaatcaacccttgtagaagctaaagatagaagataacactactctgtttttgaatgtctgaagtgtaattttgcagccttgcaactataaaacaaacagtgtatggtttaattattgcagttgcacagtgtgaagatttaaaattgaagtgccatgaagagatggataagaggaagaaactttataatattgttcaagagacaaaaggaaattatcagggtttttttgtcgatgccgacccttaagcaaaaatgaggtgtcatcaggcctgaatgcaaatggcggaacaactaaaaagacatttaagtttgatagagtattcacgccgaaggatgatcaaggtgtgggcgtctccggcggcctgactatacgaagcgagggcgtatcggggctgaggacacgaaaggccaagcgcacaggacgtacggcagtaagcccgcctgcaccgcaccaggccgccacccgcgacgcgcccatgtcatgacgccacggtggcggcacgctgacccatcgacgtcaccctcttcctcgcttccgctcgacagcctccagtttcctggtcagtcttcgtgccgcctctctgccacacaccgtctctcagagatggaatcaccacccctcacggttgaagcgaccgcttttaccgagaaaatgatggacatgactttggaggatataatcaagatgtgaaagaaaaagaatcctggaggcaagaaaccccctaggcggccggtaaactctaaggtctagaactctggatgtgtggtggtgttgaaattagttttgtgtataactgttccaacttcaaatagcttcgttttaggtgctatgtttgggaataaattttccagttaaaagtgcaggaagtccgcgatggactttcttggttttccaaggctcagttacttgctgcgatatattcctttggtgaagttttgtcgtgcaccatgtgtgtatcttcaagattaaactaaattttgcattattcatcggttttcttgaaaaaaaaaaaaaaaa

SEQ ID NO: 2043 - DNA, 1494 bp, Zea mays
  Clone ID: ZEAMA-23APR03-CLUSTER2024_7
agccggcgtcgcgtttccaacaggccagtcccctcccactcccagtcccatctcgacgacatggccgcagccgcagggccatcaagctctgtgaaggagagcctcccgccggccctcggctccacctcccagccacctcccgtcttcgatggcaccaccaggctgtacatctgctacttctgcccgttcgctcagcgcgcctgggtcaccaggaacttgaagggtttgcaggacaagatggagctggtggccatcgatctgcaggacaaaccggcttggtacaaggacaaggtttacgcacagggcacggtgccttccctggagcacgacagcgaggtcaggggcgagagcttggacctgatcaggtacatcgacagcaactttgacggccccgcgctgctcccagaggatgctgcgaagaggcagtttgctgacgaactgttcgcgtctgccaacgcgttcaccaaagccctctactcgccgttgctgtcccacgcggccgtgtcagacgaagttgttgcggctctggataaactcgaagctgacctatccaagttcgacgacgggcccttcttcctaggccaattcagcttggcggatgtagcgtacgttacgattctggaaagggttcagatatactattcccatcttaggaactacgacatcgcccaaggcaggcccaacctccaggaattcatcgacgagatgaacaagatcgaagcgtatgcgcagaccaagaacgatcctctgttcttgcttgaccttgccaagagccatcttaagattgcctgaagatgtgacaaagcagcattagtccgttgatcggtggaagaccactcgtcagtgttgagttgaatgtttgatcaataaaatacggcaatgctgtaagggttgttttttatgccattgataatacactgtactgttcagttgttgaaaaaaaaaacttgcagcggtgccttggactttggcggttagaagaggtttataattttatatgatgaaattatgtgcatcttcagttgtttttgcctcactgctctgtaaggacatataaaattgttgcggctctggataaactcgaagctgacctatccaagttcgacgacgggcccttcttcctaggccaattcagcttggcggatgtagcgtacattacgattctggaaagggttcagatatactattcccatcttaggaactacgacatcgccgaaggcaggcccaacctccaggaattcatcgaggagatgaacaagattgaagcgtatgcgcagaccaagaacgatcctctgttcttgcttgatcttgccaagaaccatcttaagattgcctgaagatgtgacaaagcagcattagtccgttgatcggtggaagaccactcgtcagtgttgagttgaatgtttgatcaataaaatacggcatgttgtaagggttgttttacgctatttataatacaatgtactgttcagttgttgaactctatttcttaaa

SEQ ID NO: 2044 - DNA, 985 bp, Zea mays
  Clone ID: ZEAMA-23APR03-CLUSTER20279_2
agatctctagcactagctttgatcctttccgccgccaactttggcttgggatttgtctctgacttgggacactcgctgaagagagtacatctccgacttgggatttgtcttacgaccagcagcggcggcggcggcggcgcgccaggacaaggagcagcgggactacagactcatcgcaaaagccgtggacgaagcgtaccgggcggtggagtgcgacggcggcgggtaccccttcggcgcggtcgtcgtccacggcggcggcgacgacgaggtggtcagcagcagccacaactcggtccggaaggacgccgacccgtcggcgcacgccgaagtgaccgccatcagacaggcgtgcaagaagctggggaaaaccagcctcgccggctgcgagatctacacgtcctgcgagccgtgcccgatgtgcctggggctcattcgcctggccaagataaagaaggtggtgtacggagccaagtcggaggtcgccgctgccgccgggctcaacggcgtcctcccagaggtcttcagagagtactaccagaaatccggcgtggagatgaggcaggccgagggcgaggcggcaacccgggatcgccgaggaggtgttcgaggagaccaagggcaagtttcgcaacaagtaaacgcgctggagatggcgccgggcggatggctgttgcctgttgctagtggaatggttgccgtttccaagctttttgtccgggggacctttgatcagaggtcacatgcccagagaccggaataaattcacccctttccccccctaaaaaatactccatttcacatggtttgttgtatcagtgtgttatttctttttttaacgcccgcctcgaccgtgtgacattttttttcttaataatgtagggtgttacttgttgggaacataattaggtgtgaataaataaataaatagatttgtaaaattattctatgtcggatttctaaaagaaacttcccgatttataat

SEQ ID NO: 2045 - DNA, 1297 bp, Zea mays
  Clone ID: ZEAMA-23APR03-CLUSTER2030_5
gcacgaggttgacagccgtccgattggaatgagtcccggttttggacggggtgggcgagtggcatctttcttccacaagcttctagcagcatccgccaccgccgcggaggcccaaatatatctccccgcgtccgctagccctagccgccgtccgccgacttcatcgtcgccgtcgtctagacctcttcacgcactggaaaggttaaagtccgacatcaatggcgaagcatcatcctgatctcatcatgtgccggaagcagcctggcatcgcgattggccgcctttgcgagaaatgtgatggcaagtgtgttgtctgcgactcgtacgtgcgcccatgtacgcttgtccgggtctgcgacgagtgcaattatggttcgttccagggaaggtgtgtgatctgtggaggagtcggcatctcagacgcttactactgcaaggagtgcacccagcaggagaaggaccgggacggttgccccaagatcgtgaatctcggaagcgccaagacggatctcttctatgagcgcaagaagtatggttttaagaagagatgaccgagaagatggagctgtgtgtggttcactttggctgtgtggtctgttctatggcactgaatactgagagtaggcagctgagacagcagctttgtattcctgttatggtttgataattgatactcgcatggaaatacagctgtgatatggatgtatcacaggatcagtcaggttcgcttggcctcttgttgagtaatgctcatggatactgggagtaggatgttgcggcaacgtttgcgttatgtttattgatggtgatggatactggcttaaaacatgaactgggatggcctctttcgttctcagacgtgaacaagagattggtatatgaattgcagttgagcatccctgatgtgcttgtggttctatgtctgagtagccacagtttgactgaccatatcggcacacaatgtactcatgcaccatgagcatatgttctgaatttttgtgtttttaagaatacatgtcctacaagatggagctgtgtgtggttcactttggctgtgtgatctgttctatggcactgaatactgagagtaggcagctgagacatcagctttgtattcctgttatggtttgataattgacaccggcatgcaaatccagctgtcatatgcgttgtaataactaagtccacctgtatcatccaacagacagcttatgtaatctgtgctccatggtaatggttatgaatggacctgaaatattggcatcacggccgtcatcatatatatatgttactgctc

SEQ ID NO: 2046 - DNA, 1160 bp, Zea mays
  Clone ID: ZEAMA-23APR03-CLUSTER20349_10
gaatccagttccaaacccatcgcccccacactcctatcgcgtcgcatatatatatatatatatatactcctacacatcaccaggaggttgcgaccaagccaagtacgtagtacgctagctagctaccacgctgctgcaccggcgaccgcgcgcgtggggtgcaacgacatatatagatcatatggtgtcgacgctgcagtccacggcggcgctccggccggaggccaccaccagcaagcgcgcgccgtggctctccctcgtcggcagcgccgtcgcctcctccaccaccaccacgggttccgcgcccaacggcaagaagcggaatgcgggacggcagcgacgaagacgactgcggcgaggtcgtggacgggatcgagctcaatttcgacgccgcgccgcttgccccccgagtggcaacgctgcctcgacatcaagtcggggcagatccactactacaacacgaggacgcagaagcggacgtggaaggaccccaggggggagccggagtaccgcgccgccgccgaggaggaggaggaggaggactccgcgaattgcgcgccgccagggctggacctggagctgaacctcacgttcgagccgcgccgggctgtggcccacgagaagaagaggcccaaaccccccgcggctaataaggcgacacatgaccgtcgtcgtcagcccgcggaggaggccgaggacagcagcagcggcagcagcagggagatggtggccggcgtgtgcatgcgctgccacatgctggtgatgatgtgccgcgccagtccggcgtgtcccaactgcaagttcctgcacgcgccgagccgccccgtcgccccggagccggagccggagccgccggtgccactgctcaagctcggcctccagctgctctgctgccgggactagctggctggctacatacgctgcatgccccaccggcagcgtcgatcatcaaatcaaattaaacgggagcgcgtcgtccgaccgacctaccatggatggttctattttataccgtgctcccccccggcctagccatgcgtggaacgaagtggaacacagtagagcgcgcgcgcacgtgtgtgcgtccgcatgtgcaaggggtggggtggaggggctcaggatcacgttacgtaattatattagaggcagcgtaatccaat

SEQ ID NO: 2047 - DNA, 1676 bp, Zea mays
  Clone ID: ZEAMA-23APR03-CLUSTER20349_3
cttccagtagtttgttttgttctggggaaaattcctttctctcttcccaaattctttaccttgccggtcatgtctatttcgtatcgtatttgttgtagtattattctaatccatccataggtccaacaggttcctcagcttgcgtaagatccgtctgggttgtccgccctccattggactacccaaggtgcggcgcatccaccaggtggaagatatctgcgtaagtcaaaacatagaataagagtggactgctattagttttccataggatggaatccttgtggaagctgacctacttgctcgacccggcatcagttgccctcattgccacagccatttctgtggcctatgcatcagcatcacgagctctggactatggcaaggagatggagagaaacttggatttttcagaggcttccattacattggatcgttcgcaggctctaatgattccccttgcaagctcgtgcagtctgttgctgatgttctacttgttctcgtctgtttcacatctcgtgacagcttttactgctgtggcctcagcattggcactgttcttttgcctgtctccacacatcacctatcttaaggcacgattcaatctaatggacccattcatgtccagatgttgttcgaagtcatttacacggttgcaaggtttgctgatgctcttctgcatagccacagtcttagcttggttggtttcagggcattggatgctaaataacctactggggatttccatatgtatagcgtttgtcagccatgtgaggcttcccaacataaagatctgtgcactgcttcttgcctgcttgtttgtgtatgatattttctgggtgttcttctcagaaaggttctttggagcaaatgtcatggtttctgttgccacccagaaggcatctaatcctgttcacacagtagcaaataagctcagcctgcctgggttgcaattgattacaaagaagctggagcttccagtcaagcttgtatttcctaggaatttgttgggtgggattgttccaggaagcaatcctggtgattacatgatgcttggccttggagacatggccattccagggatgcttctagctctggtactcttttttgataaccggaagttaaaggatgtgaacgttgttccatcagacgtgtctcccctgagacggcggaattatgtgtggtatgctctaacagggtatggtattggcttggtagctgcactagctgccgggatcttgtctcagtctccccaaccagccttactgtacctggtgccgtcaacactggggcctgtcatgtacttgtcatggttccggaatgagctgtgggagctatgggaagggtctggaactattctgaacgacaaagctcgtttgttggaggtctgagatccaagtggacaataagaaggatctgagctcaccgggattgaatcttaattaattattaaacattacttgagctcatactgaaagggagtatttataagctgagtgttctattcatgcatgtgagctactatctccgttctcaaatatttgttgcccactagttcatttttaaactagaccgcgacaaataaaaaagaacggagacagtactaagcagttgcccatcgtgaatcatgtaactgtttgtaatagaaaggttcagttcaatgcatttcagcttttttt

SEQ ID NO: 2048 - DNA, 1516 bp, Zea mays
  Clone ID: ZEAMA-23APR03-CLUSTER20360_1
aagctttgtctgctgtccgctatctcactttctttctcgctgcgtccgccatgctctcgctttccttctctctgctttgcttttgtgtcgtcgatgtcgaaaactccttccagaccaagcttcgtctgctgtcggcttgcaccagtcctcacggcccacgtcgagggagacgaagggataggaggcggaggcggaggttgcaaaaaatggtcgggagcatgcaggcggtggacccagcgggccggataagcgcgttgctcgcattgcgccagctcctcgccatgctctagccgctggccctgctccgccctttcattggcgcgcgtggccggggcgtccgatgttgcggcctccgcgttggggctagcgggaaaaggggaaggcggcggcgtcagtggttctacgggtgccggccgtctcgcccatggtcgccacacgaaggaagatagccacgcgccggacgcaggaggccggggcgggtgtacgagctgatccccaggtagtgaacatgttccatctcttgctattctgttcctctctgctagttgttaggtctattgtttatgacattgtcgtcactcatcaggtttctatgtgatgtgttctacttctacactgtacattttctaccttttttatgttctactaggctattcaggtgaccagtactattaactaaataaactctatggttagtagcttcctgacagccttgcttgaattccaagcgatgttgttttgtttactttagttgcttacttacaaaataagatatacatgccccctactccttttgctacgtaggatgcagacctggacatgccatgcgcccatgccttcttggtggttggtttgttcttcagatgtagaaagctacccgaaatccattgaactttggcagtctttttcatggtttcctgctcctatttctatggcggtctcgtcttgtttgtcagtcaagcaacaaccatgtggcacagattaataattcaattcaaggaaatataagtaccgttgtatgccattctccagtcaattctatagcacggagggtgcttggttcgtttatccgaaatttgtcaggctcagctcaggctccgctcgaagcactgacctacatgatgattggtgccacacgtcatgccacaacctttgtgtttgtccttcctgcttccttatttgttacatttggatctttgttattgttgtttacagatgatccaacattttaaaacgttgcacggattgttggatttttgtttcaggtctccacggattgttggattggtcttggcctcttcagtattcttgcagcatgcatgtgggtagtatcatggaactggtatgtaataaccaaaaagatgttagcaattcctaaactatctagacacattggttattttcatgcttctatgtctaatcaaaactacaacggtgacctttcattggttcttaactatgtttacttgcccaaagaaaaacaaaaactcttgcccatacaaaaaaaaaaaaaaaa

SEQ ID NO: 2049 - DNA, 821 bp, Zea mays
  Clone ID: ZEAMA-23APR03-CLUSTER20395_5
gagatccattcccaactgcacctgcgcgcctcgactggtagcccgaaccctagctagcaggtcggaggcgagagagcagccatggcgcggtgcckksgcgctcgtctccctccttctcctcggcctcgcctccgccgcctcsgctgccgatgcgccctttgtcgtcgcgcacaagaaggtttcgctctcccgccccaagccgggcgtcgagcgcgtcgccgtctccctcgacctctacaaccagggatccgcgactgcytatgatgtgtcacttaatgacgactcttggccaacacaagcatttgagcttgtcactggagagaaatcgaagacattggaaaggcttgacccgaggcctactcaactcccatcttcccactggatattctcgctgagagacctccagagaagaagtttgaatgggctaagaggcttgtgatgaaatacgggtcacttgtgtctgttgtctcttttgttggactgtttatctaccttgtcgcgagcccgtcgaagagcagctcaaaggcaagcaagaagagacgctgatctacttataggtcgcagttgacggtgtagctggtggttttgcctggaggaactcttggtagtttgagctgtgcgaaagcctttaagtttatatttactcaccactccatgaacggcaacgaagtatgcatcagttagaaaagtgcacctataattttggttgcttataactttctgtttgtcagagatttaactcgaaggacctgtaactaggaaagttaattttgcttggaagaacattttgataaaaaaaaaaaaaaaaaactcgagcccgg

SEQ ID NO: 2050 - DNA, 1903 bp, Zea mays
  Clone ID: ZEAMA-23APR03-CLUSTER2042_10
accacactctcctccctccctccccgcccacactccaccacccgcgccccgccgcccgccgcccgccccgccgcctcctcctacttcgcctcggccgcctcggatccggaccgagcgccggccatggcgctcgccttcgacgagttcgggcgccccttcatcatcctgcgggagcaggagaagaagacgcgcctgcgggggctcgacgcgcagaaggccaacatcggcgcgggcaaggccgtcgcgcggatcctccgcacctcgctcggccccaagggcgcggacaagatgctccagtcccccgacggcgacgtcatcatcacaaatgatggggcgaccatcctggagcagatggatgttgacaaccagatcgcaaagctgatggtggagctgtcccgtagtcaagactacgaaatcggggatggtaccaccggggtggtagtcatggcaggggctcttctcgagcaggccgagaagcttctggagcgtggtattcaccccattagggtggctgaaggctatgagatggcgtcaaaggtagcttttgaccacctagaacatatctccgaaaagtttgagttcagtgcagacaacattgaacccctggtccagacctgcatgacaactctatcctcaaagattgttaaccgttgcaagcgggcgttggcagagattgctgtgaaagcagtgcttgcggttgcagatttggagaggaaggatgttaacttggatctaattaaagtagaaggcaaggttggtgggaagctggaggacactgaacttgtatatggaattattgttgacaaagatatgagccatccacaaatgccaaagagaattgaggatgctaagattgccatcttgacatgcccatttgagcctccgaagccaaagacaaagcataaggttgacattgacactgtcgagaaattccagacactacgtgagcaagagcagaaatactttgatgaaatggttcagaagtgcaaggatgctggtgcaaccctggttatttgccagtggggttttgatgatgaagccaatcatttattgatgcatagaaatctgccagcagtgagatgggttggtggtgttgaattggaactgattgccattgctacaggagggcggattgttccgagattccaagagttgagtcctgaaaagcttggaaaggctggattagtcagagagaaatcattcggaacaacaaaggaccggatgctttacattgagaagtgtgccaattctagagctgtaaccattttcatccgtgggggaaacaaaatgatgattgaggagaccaagcgcagtcttcatgatgctctttgcgtagcaaggaatctgatccggaataactcgattgtgtacggtggcggctcagccgagatatcttgctcaattgctgttgaaactgctgcagatcggcacccgggagttgagcagtatgctatcaggtcattcgctgatgcattagatgctgttccactggcgttggccgaaaacagtggtttgtcaccaattgataccttaactgcggtaaaagctcaacaagtcaaggagagcaacccgcactgtggcatagactgcaacgacgttggcaccacggacatgaaagaacagaacgtcttcgagaccctgattggcaagcagcaacagatcttgcttgccacccaggtggtgaagatgatcctgaagatcgacgatgtcatctcaccgtccgagtactgacggaaagaaggaacggatggctatgctggatatgcgtaggcggcatcgagtactgacggaaagaaggaacggatggctatgctggatatgcgtaggcggcattgctgatgtgttgattggtgtaccttcttgtccaggcttgctgcctaccactcactccctgtgtgacgtt

SEQ ID NO: 2051 - DNA, 1533 bp, Zea mays
  Clone ID: ZEAMA-23APR03-CLUSTER205002_1
ttttttttttttttttcgcttcaaatctcggtccttcagagggattatttactttcaaggtcgcgtgtatacatcacaagtgcatttttctcatacatcaaaatcttacgaaacacacttactaaagcaccacctggccacaatgctgtacctggaggggtgctgaagctcaaggttgtttaagacgtggaaaaacatacgacacgaggcagtcttccatatccagcagcagaaaccttacgcatgatgtattcaggtcaattggctcttccctgaaaactaccaactatactcttcccctagtaagtcagaaccatagacaaatacttgtccatacgataccaaaaagtgcgtcgagaagcctatctcaaactggtcagattatatgttagcctcttctagttcgcgcggaagtcctccagtcgttggcaatccagttaatatcttgattgtatcgtagaagaaccattgcatggttatgacgggtccgacaagagcgattcggatgggcaggcttcttgtgagcaaattgcgaaatccaatacttttcacagcatgtatgatattttcagcctttttgttatacagggatgagacgatattgtctgcaggattcgaaacaacagtaccgacggcaccagatatataaccagccagacaagtagcaccaagttgctggatcgttgagcagtcctcctttttcttttgaataactttctgatataggaagtccacggtatgctcaaaagtcgaaaacataagcatagaaaatggaaggttccgtccccaaagaggtaaaagccccctgtaaaagccagataggccttcagttgcatacacccttggaaagccatcaaccaaacctttagcgaacatgggctgagtctgaacacggactttcaccgattcaaacggacacaggccaacatcagctatgatttgagcagaggcactgctaaggaagtatatggtgctcttgttactgtctacaagcacgtcagagtacctcttcttgaaatactcatagaggccaaacctgcagccaccctgaacaccatagccaaaaaatttccctccccagcctctccaaagtgacgaaggttcctcttctttcacaagaacatttagtcctgaaaatatactgttatacttcatgggattcacctgcatattgaccttgagcacatcgagcggggtgatggcgaggtgggtggcgcccgccgcgagcatcccgccgccggcgcacagcgcgtagtactccggcgagaacaacctcatccccgcggcggcggccgcccgcctcctccccgccctcgaggcggactccgcatcgtccattcgcggcgggcgggcgtatgcgaatcggaatcgatcggcgtgctcgcctcgcctgcgctccggcgttgttggagactggactggaaatggaccacgtagcgcggggcggggccggggggcgcgtgccgccccatcccccttgtggccttgtctcactttttttcgattaggatgttctaggtaatggtctcgtgc

SEQ ID NO: 2052 - DNA, 1428 bp, Zea mays
  Clone ID: ZEAMA-23APR03-CLUSTER20565_4
attcaaaatcgatcccgaccttccgctcccgcaagaaaggaggagtaaaaggaacagaggtaagcgaagcacaagcagtcagaggcggccgccgcagcccgccgcagtagcgacacgcaaccccccttcccctatcacgccacccgactccacggaggagcgagaccgcgcgccgcagatccttggtcgccgctagggttccggcgagatggacgtggtgaaggcggcgcagctgtcggggcggacgctggaacgtgtagtggtgcaccccctggtgctgctcagcatcgtcgaccactacaaccgcgtcgcccgcgacacccgtaagcgcgtcgtcggcgtcctcctcggcacctcctcccgcggctccgtcgacgtcaccaactcctacgcggtgccgtttgaggaggatgacaaggatcctaggatctggttccttgaccacaattatcatgagtccatgttctccatgttcaagaggattaacgccaaggagcatgttgttggctggtacagcactggcccaaagctaagggagaatgacttggatgttcatgcattgttcaacagtgattattgatgttcaacccaaggagcttgggatacccaccaaggcgtattacgccgtggaagaagttaaagagaatgctacacagaaaagtcagaaggtatttgtccatgttccttcagaaattgctgctcatgaagttgaggaaattggagttgaacaccttttaagggacgtaaaggacacaaccataagcacacttgctacagaggtcactagcaagcttgcagccttgaagggactggatgcaaggctcagggagatccgaagctatttggatcttgtaattgaagggaagctcccactgaatcatgagattttgtatcatttgcaggatgtctttaatctccttccaaatctgaacgtaaatgagctaattaaagcctttgcagtgaaaacaaacgacatgatgttggtaatatatctgtcttctctgatccggagtgtcattgcgcttcacaatttgatcaacaataagatgctaaacaaggagcatgagaaggctgaggattcgaaaccagccgccattccaactgctgccggtggagggggagctaaatgaacttttgatcacttattgatggccaagaaaaaggaggaaacgtgattgcatgtttatcacggttgtgctggaaccaaatcgccttgaccttgaatggatattttcatgtttacttcacgtatgataaggtcaacggcaagagaaatcatttacgttgtatgagagcattagatcatacctcaagttttctgtagatctcgatgctatttcatctgatgcatcatgtttcgtgatgtagacttaagttatttattattatgattgatttatacgaaaaaaaaaaaaaaaaaaagcggcc

SEQ ID NO: 2053 - DNA, 1118 bp, Zea mays
  Clone ID: ZEAMA-23APR03-CLUSTER205778_1
aatcggtcaatcacgtctacttgcttgcagacgattctccagggatacgtcccatctgctgcgaccagggcgatgggggaggaggagacccgcgcaggcgacctcccggagccgtgcctggcgcacgccatcgcgctcacctcgccgcgcgacgcctgccgctgcgccgccgtctcccccgccttccgcgccgccgccgactccgactacgtctggggccgcttcgtcccggaggatcaccgccgcgccatcgccctgcatctgcatgccgccggccgggaccgtgggccgaggaaggacgcgtaccttgcgctctgcgacggcggcggcggcggcgtccccgtcgacgtcgacggcgacggctggtgcaggctgtggctggaccaggccagcggcgccaagtgctacgcgctgtcggcgaggaggctcagcctgccgtgggaggacggcgatttctgctggcgttgggcgccccacgcgcggtccaggtttggtgaggtagccgagctcatggactgctcgtacctggacatctacggccggctcccagttgccgtgctcacgcgggcgacatcctacgcggcgtacctggtctacggcatagcagaggggcaccgcggcctgagcttcccggaccaggaggcggcagtgagcttgggtggccgcgtgcccgcggagtcgcaccaccgccgctctgtgtgcctccgccccgacgaagccgaagcgcgcaagttctggggcgccggcgccgtcattccatatggcgtcggaggcgtccatgtgccgagactgcgagatgacgggtggtgggaggtggagatggggcggctacgcaccgtcgaggccggtgagcatgaagcccccggtgaggacgtggtggcgagcttcgaggtggttggatcgtatcccaagcgcggcctcatcctggaaggcatcgagttcaggaagctccagtagttttaaaatctggttactcggcagcatttatggatcaaccgactgttgatccaagggcgcctgtgtatgggtatggcgcaatgcattatgtatatactggataaccaatctcccaataaaagtaatatgatactttaaaacccctaaaaaaaaaaaaaaaa

SEQ ID NO: 2054 - DNA, 1295 bp, Zea mays
  Clone ID: ZEAMA-23APR03-CLUSTER2071_22
atatttcctcctttccccatcccttcccctggcttcacggctcggctggctgcacgccggagccccggcgccagatctcgcccagtgccagggccgccgcagggccctctttgcctgcgcgaggtcttagaatcccgagggggaaaaagaaaagaaaagatgatgactgcctctgcctcttactacctgtgccgctccctcgtccgggctcctccgctcaagtccaggagtgcagtgcgctgtccaagcgccgccccgccaggagccagcggtgccacctccacctccaagcttgtcctagaggtgaaagaacggctagcaagggagcacccaagcctccccacgggcaggaacgggagggacgatgacgacatggtcctctggttcctaaaggaccgcaagttctccgtcgatgaagccgtctccaagctcaccaaggcgatcaaatggcgtcaggactttggtgttgcagagttatcagaggaatcagtgaaactcctgtaccaaactggcaaggcatatgtacatgattccttggacatttatggccgaccagtgctaattgtagtggcagccaaacattttccttcgacacaggatccagttgaaaaccagaagctatgtgcctatttggttgagaaggcagtcaacagacttccgccaggagcagagaatatacttgggatctttgatctgcgaggctttcgggttgaaaatggtgatctccagttcctaaagtttttgatggacgttttttactattactacccgaagcggcttggccaagttctttttgtcgatgctccatttgtttttcaaccaatgtggcaggttgttaaacctctattgaaatcatatgcctccctggtaagattttgtgatgccgagactgtgaggaaggaatacttcaaagaagaaaccgtgcctcctgatttccgcgattaggtgacatgattatttcttcagtaattgcaaaaatgtgcaggtggtctcggaaacatgacctttaattgattgaaaatcgattggcacccaggggggctggcgccttcctataccttttgattaacttctcaaaagttgctcagacggcagcaagcgattggagagtccagtaaaaaatgaccctgtacttgtataacttccgtgaagtagaatgctgagtttaggatgctgtctggagtgctcatgtaccatatttttctggttttggatgaagctatatggaccaaattcatctctgttgaacaattgccaattacataacttgtgtttgctcaaaaaaaaaaaaaaaa

SEQ ID NO: 2055 - DNA, 1572 bp, Zea mays
  Clone ID: ZEAMA-23APR03-CLUSTER20738_2
aggcaccacatgtccatccgcgactccgcgtcggtatccgtcaagaaattttcaacaaaaaaaaacttaattttccactcctattcttccccgacgccggggaccagcgccagcgccaccaagaagtgacccacccaggtaggtacccgcccgtgccccgtcgccggcgatggcgaggtacgaggcgtcggcggccgcgccgggcgtagactttcaccttcccgacgagatcctggccgtgatccccaccgacccgtacgagcaactggacgtggcgcgcaagatcacctccatggccatcacctcccgcgtctcccgcctcgaggccgacgctgcgcgcctccgccgtgacctagccgaccgcgaccacgccgaggccgagctccgtgcccgcctcgccgactccgacgcgcgcctggccgccgctctcgacgagaacgcgaagctagcgaaggaaagggactcgctcgccgcgacgaccaaaaagctgaccaggaatttggcgaagttggaggcttttaagaaacaactgatgaaatcgttaagtgaagataatctattgcaactgtctgaaaccagtcaagatcacaacggagaagataatttgacagctcgagtcccgtattggaaagatgaagtttgtagcagtaacacttcttcagatacctccatcagatctacaataactgaatccatccatggtggaggataccagttctcaatcaaaccatatgtgcctccaaaattaactcctggctcaacacctatgatttcgtcttctagtggttctccccgagcttattcaactggcccaccctctcccaacttcttctctggtccgacttctcctacaaaagctcgatctgagggccaattgacattttcgtcatggcaaggatcatcaagtcatcagtattcagcacctacctctcctcaacgccactcattcacagggcggccacgtatagatgggaaggaattcttccgacaagcacgggcaagactttcttatgagcaatttggagcgtttttggccaacatcaaggagttcaatgctcaaaaacaatcacgggaggacaccctgtcaaaagcagaagagatttttggaacagaacacagagacttgtacatttctttccagaatatgcttagtcgcaaccagtcatgaaaaatctgtcagaagcggtattttctgtctctaaatcaagcagggaagaatttgttgcaataaacgacgcccttccatagttttttttttaaaatgctttcataggttctcaagatcacattgtagagatctgtatgttggcaatcttaatccaaggcgtccgttctcaatgatttggagccgtgacttgagaatgaaattctcataactgccggaaaattagcccgtttgatttagcatacatccaatcattccctggcattcaagacttcttgtttgtctttctgctgtaaaggtattcattgaaaaactgaaaaggggttcagcgtacattgtgcaaagcagtaccaggtgcttagctgaggaggcaccggctaaataaaaaaatgttgggttattatctc

SEQ ID NO: 2056 - DNA, 1518 bp, Zea mays
  Clone ID: ZEAMA-23APR03-CLUSTER207415_1
ttttttttttttttttgtggcataaagaatagtttgtgaattggaaatcaataatgattctcaccatttggcaaacacatgtacacttcactgttattgaaaaatttaataacagtgacctagcctaatatccttctgacgagagagcgaggtactatgcagcactaccgatgaggactgaaaaatagacagatacacataacaagaacataatccactaaaatgccgatgctaactgctccagagctcgttatatcatcacaagatcactaacaactacccttcaacaccttccttcggattcaaagtgccttggctaccaagaggcaacagctgaaaatttcgtaagacatgtcccatcatcttactgcctccttttaggacagtcatctcaattcctgcaacaggctaagctaattgaccctgcaaatttagttgatcattgtcctgcttaatctccttttcttgtatgctttcattgattctgtttcagcttcagcctcgtcgtcagcaaaattttgatcagagacctctctactttcatggagaagctggggttctccctcacaagcgtcccgttcccttccatgagacgctgagaggctcttccggtttgcctcagtgccagattcaagatcgcccacagaatccccgagcccatcgcctcgcgcgttattaccgccatcactacgtggcctgaaatgctgcatccaaggatttgcaggaacgccgcagcacttagccccccttcgcacaggagcatcggtcttctcatactcgacgtactccctgcggagagccttgaaggcggtgccgtttgcgttgcgcggacggctcccgtggttgtacagttgatcgacgaaagaggcctccatagagcttatatacagcctgtgtctctcgtctgtccacccggcggacatcgtgtccagaacttgattgcccttggcaatgccaccggcacctggctcagcagccttaatgggtccgttcaaggacacatcgcccattgtgttctttgtatcaggaaagaaccacctagcaaagggacgcgagttcccaggatttgcttgtattttcacccgacctttatccgatgcaacaattcttgtcttccctgcttcctcgatgagcagatttttaaaaaaaaatcccctttcgatattttaaccaggctggaggaaggaaggcgaggagcaaataagagaactgagcagcaattggtttcctagacgccggattgattacggattgggggacacgaaccagcagaagatcgcaactcaagaaccaaggaaaccccaaggatcacaaggcagcgacgaatttatttgggcggaattcaggtgaggtgactacccctagaattgaaaccacgctcggatgaaggaagcccctagatttggctcgggctctggggaaccgtggggggagcagaaggggacagagagccagttgcaggcgagggattgaagaaggatcggcagccgagccgaccgggcccggccagcccgaggg

SEQ ID NO: 2057 - DNA, 2061 bp, Zea mays
  Clone ID: ZEAMA-23APR03-CLUSTER20748_2
ccaagttcgagttggagttcgagtcctcgctggaggccatcgtgctgctgcagcgctccatgctcgagaagcagtgggagctgcccttcgaggacgacatctccacggaggacgaggacgagaggtccacggtggtggtggcgcggtctggcgtgtcggcgcggcagcggcggatgagcgggcggcggcggggcgctttcgttggccggaagagcgtcaccgtcagcccggagctgatgcagagtcggaaccgcatctacctccggggcaccgtcagcaaggacctcctcacgcacaagcaggtcgtccagctctccaggaagatcaaggacggcatctggcttcagcaccaaagatccaagctgaaggagaaactgggcaacgagccgtcatacaagcagctggcgcaatcgctgcggataccagctcctgagctgcgagcgaggatgcgcgagtcgtttcttgcgagggagatgctggcgatgagcaacacccgtctggtgatatccattgcccagaagtacgacaacctcggcgtcgagctgccagaccttattcagggtggcctgatagggctgctccgtgggatcgagaagtttgatgcctcaagggggtttaggatctccacctacgtgtattggtggatccgtcagggggtttcaagagcattggccgacaactcgagatcgttcaggctccctacttatttgcacgagaggttggtagccattcgcggcgcaaagtacgcgttagaagaccaaggaattgctccgacagtagagaacatagcggagtcgctcaacatatccgagaagaaagtgcacaacgctacagaggctgtgcacaaggttatttcactggatcaacaggcgttcccctccttaaacggcctacctggggatacactccatagttacatagaggatcaaaacgttgcaaatgatccgtggcacggatttgaggaaaggtacctcaaggaggaagttaacagtcttataaattcaactctcaacgagcgcgagagggacattattcgattatatcatggcataggaaagcagtgccatacatgggaggatatcagcagacaattcgggttgtcgagggagcgcgtgaggcaggtagggctcgttgcgatggagaagctgaagcatgctgcaaggagggaacatttggatgcgttgcttgaggaatactgagtgagatgttcttcgcttgagtcggttaattccaccgttgcagtggttgtatatactccggaaacataggggggcaggcacatcatccttgaaaggcttcactgccactcactcactctgcagataactatacatgtacatctgtgacgatcagtaggcatgcatagttaaagcatctgtggctgcaaaatcgtcaaggcgatccaacaaaaggagaaccttttttttggtcttggaagctctacaaagtgtgatgtggtatgtatatgcaaatgtaatgtatcagtaattcagtagagcaataacgtttatgtcctggatttgtattcttgtccacctacatagaaggaaaaaatgcttaccacttaaaaaaaaaaaaaaaaaaaaaaaaaaaaaaaaaaaaaaaaaaaaaaaaaaaaaaaaaaaaaaaaaaaaaaaaaaaaagcatgctgcaaggagggaacatttggatgcgttgcttgaggaatactgagtgagatgttcttcgcttgagtcggttaattccaccgttgcagtggttgtatatactcggaaacataggggggcaggcacatcatccttgaaaggcttcactgccactcactcactctgcagataactatacatgtacatctgtgacgatcagtaggcatgcatagttaaagcatctgtggctgcaaaatcgtcaaggcgatccaacaaaaggagaaccttttttttggtcttggaagctttacaaagtgtgatgtggtatgtatatgcaaatgtaatgtatcagtaattcagtagagcaataacgtttatgtcctggatttgtattcttgtccagttacatagaaggaaaaaatgcttacaactgcag

SEQ ID NO: 2058 - DNA, 1305 bp, Zea mays
  Clone ID: ZEAMA-23APR03-CLUSTER20748_3
ccccgcctcctcttcctcctcctctccgcccaacgtcgggcgcggcggggagctggtcggaagagcgttgccatcagcccggagctgatgcagagccggaaccgcatctacctcaggggcaccgtcagcaaggacctcctcacgcacaagcaggtcatccagctctccaggaagatcaaggacggcatctggcttcagcaccaaagatcaaagctgaaggagaaactggggaacgagccatcatacaagcagctggcacagtcactgcggatatcagctcctgaactgcgcgcaaggatgcgcgagtcgtttctcgcgagggagatgctgacaatgagcaacatccgtctggtcatatccattgcccacaagtatgataacctcggtgtcgacttggcagaccttattcagggtggtctgattgggctactccgggggatcgaaaaatttgatgcatcgaggggattcaggatttccacctatgtgtattggtggattcgtcagggtgtttcaagagcattggctgataactcaaaaacgttcaggctccctacgtatttgcacgagaggttgttagcaattcgtggtgcaaagtacgcgttagaggatcaaggaattgctccgacaatagagaacatagcagagtcgctcaatatatcggtaaagaaagtgcacaatgctacagaggctgtgcacaaggttctttcactggatcaacaggcgttcccctccttaaacggtctacctggggacacactccatagttacatagaggatcaaaacgtcgcaaatgatccatggcatggatttgaggaaatgtatctcaaggaggaagttaacaatcttataaattcaaacctcaacgagcgtgagagggacattattcgattataccatggcataggaaaacagtgccatacatgggaggatattagcagacaatttgggttgtcgagggagcgtgtgaggcaagtacgactcgttgcgatggagaagctgaagcatgctgcgaggaggaagcatttgaacgcattgcttgaggattattgagtgagatgtttttcgtttacacaaatgcagtggctgtatatactcggaaacatagggtacatcatccttgaaaggctttactgctactcactcggcagataactatacatgtacatttgtgacaatcaataggcacgattcagatatctatgtctgcagctgcagtcatcaaaacgagccaacaaaaagagatgtttttttccttggggaagcttcgtaaattttctgtaatgtatcatttagcacttatcagcc

SEQ ID NO: 2059 - DNA, 753 bp, Zea mays
  Clone ID: ZEAMA-23APR03-CLUSTER207620_1
tggcaattcgcggccgcgtcgacttttttttttttttttttttttgtttttttttttttttttactttttttttttttttttttttttttttttggacagcaccttcttgatcataatataagaggaaagatgaaaacaatcaccaaacccaaaagtgatcctgtactattagtacattatatccacaagcgcagaagactggttccgatcgaccagcgctggcgtttcatctttcaagggtccaggatgtgccgcccacacttgcatcgccagctcaggggcttgtagttggagtggtcgtagtaggaggccggcattgctcttgctcttccaccggtggcagcagcagcagcagctctgccaaggccgagaccctccttcttcctcctctgaagctgctgcggagatacgggcacctgcaccgcctcgcaatggccacaggacctgcacctcccctcgcaggtcggcggcctggatccgatcacgcctctgatgccagcgaaactcgcctcctcaatgaccgaagctctggcgtggacggcggcggcggcacgcgtggaggtgagcaggaggagggctaccaggaggaggaaaagatggcccatttgatgacgatgcggatcgggaaaaggcaggctctcgtgtggaaggaaggaaggaaggaatgggggaggaggcgatgatggcgaagaaaggcgaaagttggccagcagctgggacgctgggtcgtctccagactgagttctcagata

SEQ ID NO: 2060 - DNA, 1785 bp, Zea mays
  unsure (1)..(1785): unsure at all n locations
  Clone ID: ZEAMA-23APR03-CLUSTER20817_2
ccacgcgtccgcctgcccagagcannnnnnnnnnnnnnnnnnnnnnnnnnnnnnnncaccttcgcggacacacacacnnnnnnttgtcagctgnnnnngccccgtatnnnnnncgcaccaccagtggcggccaagccatccactgnnccccgcgcatcgccatggctctcgccgtccgcacgcctcgcttccagcctcgaccggcctccatttctgcgcccacaacacccgcatcgacctccctcgccgccgggaacgcgaggccccgcccctgcgccggcgccgccgttcgcgcctcgcccttcaccgaggccacctcctcctcgcgctaccgccgcgacgcctggtcatacgccgccgatggctcctccaactccgcatccccgtcctccgctgccgctgctgccgcgggccgtcgggatgacgagatcgcgctgcagctgccggaactgcggaggctcctggacgtgctgagggcgtccagggggaggggcgccgaggagggcggcggacccggggaggtggcactggtgggcacagggcccggggaccccgagctgctcacgctcaaggcggtccgggccatcgaggcggcggacctggtgctctacgacaggctggtgtctaacgacgtgttggacttggtcggggagggcgccaggctgctctatgtcggcaagaccgcgggataccacagccgcacccaggaggagattcacgagctgctgctgagctttgcggaggccggtgccaatgttgtgcgcttgaaaggtggcgatcctctggtttttggaaggggtggagaagagatggatttcttacagcaacagggaattaaagttgaagttatcccaggaattacttctgcttcgggtattgcagcagagctaggcattccgttaacccatagaggtgttgctaccagtgtcagatttttaactggccactccagaaatggtgggacagatccactatatgtagctggaaatgcggctgatccagacactactttggttgtgtatatgggtttgtcaacacttccatcacttgctccaaagttaatgaagcacggcctgccaccagatacccctgctgttgcagtagagcgcgggactacaccccaacaacgaacggtgttcgcctcgttgaaggatcttgtggatgaagtcaagtcagccgatctagtttctccaactctaataattattgggaaagtggtatccttgtcacccttctgggttgagtcatctgaacatgatgcactgaaagttcagagctcgtatgcaaatgaggccagatgacaacagattttcttggtttttagtgactggacaatacttgagaaatgcaagatcccagatatgggagcacaggttcgacctggtgtacacagaaacatctcaggaagcatggatcctgaatggcggatggtagcttaagcttataacagacttggggcagaagcgcacttggactgatcatgcttgattctttggcctaatctacatgagattcacaatttttcgatttagttgagttcgacaatagttgtgtgcttctttgttactagtagccatgtacgtgcggcgcaccggtgtttacgattctatgccctagcatagtaaggctattccaacgctgccacgttatgattttatgataatgggagtttcgtagcaccatgataatgagaaatagtgctacgaagctcttattatatgacaagtgccataaatcgtagcacttatgattttatgatatggggagcttcgtagagctctttct

SEQ ID NO: 2061 - DNA, 1348 bp, Zea mays
  Clone ID: ZEAMA-23APR03-CLUSTER2086_3
cgcgaacgtttcagccgatcgagcaccatcgtcacagtcagtagtagccaagcatatttctttctccgagtgatttgcgctgagcgatcagttcatccagagcgagcggagctgagctgagctgagcgagcttgcgttgcttgagagaccctgccatggcttcccaccaggacaaggctagctaccaggccggcgagaccaaggcccgcaccgaggagaagaccgggcaggcggtgggggcgaccaaggacacggcgcagcacgccaaggaccgggcggcggacgcggcggggcacgcggcgggcaagggccaggacgccaaggaggccaccaagcagaaggcgtccgacaccggcagctacctgggcaagaagaccgacgaggccaagcacaaggccggcgagacgacggaggccaccaagcacaaggccggcgagacgacggaggccgccaagcagaaggccggcgagacgacggaggccgccaagcagaaggccggcgagacgacggagacgaccaagcagaaggccggcgagacgacggaggccgccaggcagaaggcagccgacgccatggaggccgccaagcagaaggccgccgaggccgggcagtacgccaaggacaccgccgtctccggcaaggacaagtccggcggcgtcatccagcaggccactgagcaggtgaagagcgcggcggcggggcgcaaggacgcggtgatgagcacgctggggatgggcggggacaacaagcagggcgacgccaacaccaacaccaacaccaacaccaccaaggactcctctaccatcaccagggatcactagacgcgtgtatgcacacgcagcacttggtccgatcctgtcgtccgtgaccctgtttgcttgttcgcgagtccagtatgggtttgtgcatgttttcagtgtcatggtttccttttctacgaatttggtgttgtaattttgatttgcaggtacgttgctgtgttttttctgcgtcatcaagtgtctgtaaacgagtcgggcgggtttgagtgtcctttgttgtgataataaagttggtaaatcctaattaatatatagcatgcgactgtcttgctaaaaaaagggggggagggaaaaaaaaaaaaaaaaaaaaaaaaaaaaaaaaaaaaaaaaaaaaaaaaaaaaaaaaggcaagataactttacagataccaacatattaattcccatttctttgaccgtcatccttacttctatagggtcggcctaaaatcataccactggccaactgaaaaaaccttggggactggaaaatatcttgcgttgcccaatttactcctttggccagatatcttctttttcccagctgcc

SEQ ID NO: 2062 - DNA, 1515 bp, Zea mays
  Clone ID: ZEAMA-23APR03-CLUSTER20964_2
agcgccaggcctcgccgagccggtggaagcctcgtgatctccgccgcctcgagccctccgcgcgcctcttccagagcaccatccactcttcggtggcgaggccgcgggcccctcgagacgggcaatgcagagcgcggctgccatcgggctcctacggccatgtgccgcgcggccgctcgccgcctacactagcccacgccgcggcgccggcgcgtgcagcggcggcacccagccgatcatcacgccccgcggcatccgcctctccgcccgccccggtctcgtgccggcctcgccgctggaggagaaggagaaccggagatgcagggccagtatgcacacggcggcgtcggccggagaggaagctgggggagggctcgccaagacgctgcagctgggggcgctcttcgggctctggtacctcttcaacatctacttcaacatctacaacaagcaggttctgaaggttttgccataccctataaacatcacaacggtgcagtttgctgttggaagtgccattgctttgttcatgtggattactggtatccataaaaggccaaagatttcgggtgcccagcttttcgctatccttcctctagctattgtccataccatgggcaatcttttcacaaacatgagccttggaaaggtggcagtgtcatttacacatactataaaggccatggaacctttcttctcagttctcctttcagcaattttccttggggagttgccgacgccatgggttgtgttgtctcttcttccgattgttggtggtgtagctttggcatcccttactgaggcctcctttaactgggctggattttggagtgcaatggcttcaaatgtaaccttccagtcaaggaatgtgctaagcaagaaacttatggtgaagaaagaggaatctctcgacaacattaacctattctcgatcattacagtcatgtcattcttcctgttggccccagtaaccttacttacagaaggtgttaaagttagtccagcagtgttgcagtctgctggtttgaacttgaaacaggtatacacaaggtcattgattgctgcattctgcttccatgcataccaacaggtgtcatacatgatcctcgccagggtatccccagtcacacattcagtgggcaattgcgtcaagcgtgtggtggtcattgtgacctctgttctgttcttcaggacccctgtttctcccatcaactctctcggtaccgggatcgctcttgctggagttttcctatactcgcaattgaagagacttaagcccaagcccaagactgcttgatcatatacatttgtaggtccattcaatagaactttggaagttatgctatgtcattggagtgatcagtgagtgccgtagttagaatgataagcctctccgttttgttaccagttgggtggataatttatgatttacttgctagcatttttggacggatttgttcgtgtattaataattttgcagggatggttttcgttgtaaaaaaaaaaaaaaaaaag

SEQ ID NO: 2063 - DNA, 1074 bp, Zea mays
  Clone ID: ZEAMA-23APR03-CLUSTER21000_3
ccacctcaattattgcccacccatccccgctccctcctctcctctcctcccgtcccacccatctcctcgcaccagcgccggggaaatggcggccgcgctgtggacgctgctgctggtggtggccctgtcggcggcgctggcgctggcctcgaaccgccccgtggcggcggcggcgaccgcggcggcggaggcggcgaacgaggtgctccgcgcgcaccagctgccggggggcctgctgccggcggggatcacggcgttccggcacgacgccgccacgggagcgttcgaggcccggctggacgcgccctcggcggcgcgcttcgaggtcggcctccgctacaacgccaccgtctccggggtcatcagccccggccagatcgccgacatctccggcgtcgccgcgcaggacctcttcatgtggttccccgtccacgacatcaaggtcgacatcccctcctccggcgtcatctacttcaacgtcggcgtcgtcaagaagcacctcccgctcgccgtcttcgacgcgccgccggcctgcacgcccgacccgctcctgcaggtcatttctcatcctagcctcactctctcgatggcacgagctctaattcatcgatcttgggaccagtgacctccttgacatcattcaatcctcaatgatcttgaatgttggcacaacctttatacccagtttctttactgaaagctgcaagtagcatgcgcaggagcttttcagcatgtcatattccacggggcagagagtcgtgaatacacaagagatacggaaatattcccaactgagggcttgattagagggggatttaagagattgaattcttttctatttaattttgaatagcaagagatttaatccgctccaatctccttcaatctactcctaatcgaacaaggattaagggcttgttcgctttcctctcaatccatgtgaattggttggaattgagtgggtttaaatttcaaacaagtcaaaatcttttgggcttgttcgttttggacttaacccatgtgggatcttttgggcttgttcgttttggccttaacccctgtgggttggggggt

SEQ ID NO: 2064 - DNA, 1763 bp, Zea mays
  Clone ID: ZEAMA-23APR03-CLUSTER21059_3
aatacttcgatagtaactgtttgtgtgggaaattactaaaaacactttttgtttgtgtgggaaagaagaaaaaaagaactaacgttaaaggcggcttgtgttgtggcgcagggcaccagcagcagtgggcgctccccttcgccggctccttgcaggtcagtccgccgccgcagcaggcgcaaccggataggaagggccgcggcggaggcggggtcatggattcaggctccagatccagcggcggagccgggttcgacgacgaagacggcctcaccacgcgccgcgaggtctcctcctcgctccaagatttggcagtaagggtggattggaagggtgggagctgcagcgatggcggtacaaatcaggggccaaacacaccacggtcaaaacactcggccacagagcagcgcagacgcagcaagatcaatgataggtttcagatacttagggagctgttgccacacaatgatcaaaagagagacaaagcaacatttctcttggaggttattgaatatatacgttttttgcaagagaaagcgcaaaaatacgaggcaacattcccagaatggaaccaagaaaatccaacgatgcttccgtggagtaaaggccaaatcccaggagattccccgcctgacccttcacatttcgtgagaaatggatcctcccctggatctaatttcactgggaaactcgatgataatcacacatctgcagctgcatcaggggcactggaccaggcagaaactaatcacgtggctagcggctgctacagatcatcagaaactccggcgaatattacaaataatgctatatctcagtcccaacctcaatggacaggtccgtcccctgtggatgactctgcagtgaaaagtgaaatgcttaacagccaggagttggcaatagatgaaggaatgatcagtgtgtccagtacctattcccaagagttacttatctcgttgtctcacgcccttcagagctcaggtgtggatctgtcccaaaccagcatctctgtgcagatcaacctgggaaagcgtgctggcaagagatctgcatctgctggtggtgtatcctccaactccaaggaaccaccagccgatccagcatctagtaacgaactaggcggccatcacgtgacaacgttgggagctagcgctgacggtctcctcccccacgcgacgaaacggcataaacgggacaacagctgatgatgggcctctctcactccgcctcgttcccagacgacagacggattgatcattcttttttttttctcccagcccgacgggaggctctctcttggattggttgcacatcgcgtgctcggtgatgggctgagaccccggctgtattctttttgatttgatcgctcccgccgccatcccctgtctagcccattgtttttacgtagaggaacgaaccgtggagcttcccattgcggattgtgaagccgctcttcttgtacacaggcttccattcatctgagaagcttcttcccctccttgaacaggtctctccgcgttttagacctgtatactagcaacctgtaagatatgattatgatgtcccgccaacaaacaactctgccagaccactggctagtcgagtgtttgggtcacttatgtacggtgttctgttatgctgggagtgtaattgccctgctgtctcagtgaactgatcgtcagttgtgtgcttgtttgcccaatggtttactatgtgagaatagagatggcaacgggtacccacccactgggttttgccgtccc

SEQ ID NO: 2065 - DNA, 1172 bp, Zea mays
  Clone ID: ZEAMA-23APR03-CLUSTER21070_3
ggtgtgttttttttttttttttttttttttgagcgaccgcggaataaatgagtccaatggataacaactgtttcagtgggctggcccgctggggcttggttggacgaaagctcgtcccatactcccatgtcataaaacccactccccagggcgggggggggcgagaagacacaaagctgaaggcgagcgaagcaaagtagtagtagtagtactgccgttcccgtccccgacgcgcctcccgcccgagcccgcacaaccgcgccgcgtcaatcctcatgtggccgtcctgggtgaaggcgcacagctctgacagcgccgccgcctccacctccaccgccctcgtccccgccgcaggcgccggggcgtccccgcgcctctccatccccaacccgtctctcaaggacctccggtcgctgctcgcgccggactccgccgccacagccccgccctccgcctccccgtcgccgcgcgtcttgcaccgcatccgcgtcgccgcctccgcgctccgggccctccgcacgctccaccagcccccgtcccggcctccggcggcgcccgctggcaaggagccggtgccgggcggcgggcgggtggtgctgtacttcacgtccctccgcgtcgtccgcggcacctacgaggactgccgcgcggtgcgcgccatcctgcgcgggctccgcgcggccgtcgacgagcgcgacctctccatggaccccggccacctgcccgagctcgccgcgctcctcccccgcgtggcgctgccccaggtcttcgtcggcggccgccacctcggcggcgccgacgaggtccggcgcctccacgagtccggggagctccgccgcatcgtcgcccccgctcccggccccgcgttctacggcagctgcgcccgctgcggcggcgagcgatacctgctttgcggcgcctgcgacggcagccacaagcggtacagcctcaagggcggcggcgggttccgcgcctgcgccgagtgcaacgagaacgggctcgtccggtgccccgcctgctgcgtacccgtacccgtcgcctgatctagatccacgatccacctggtactggttttctgttttaattattattcaaactctactagctgtactctgtacacaaactgctaaggagcttgatgaggactggaggagaaagctaccactccgtcc

SEQ ID NO: 2066 - DNA, 947 bp, Zea mays
  Clone ID: ZEAMA-23APR03-CLUSTER21090_24
ctcgtccaaaaccctagccctcgcgccgccgccgccgtgcccagcgctcgagctcctcgcctgccgcgagctcgcgccgcaacgccaccatgaagttcaacatcgcgaacccgtctaccgggtgccagaagaagctggaaatcgatgacgaccagaaactacgtgccttttatgaccgaaggatctcccaggaggtcagtggtgatgctctgggtgaggagtttaagggttatgtcttcaagatcatgggtggatgtgagccaagacctatctgttatcaacttggtaattgttaagaagggtgagaacgatctgcctggtttaactgacactgagaagccaaggatgaggggtcccaaaagggcctccaagatcaggaagctgttcaatcttgcaaaggatgacgacgtgcgcaagtacgtgaacacgtaccgcaggacattcactaccaagaatggcaagaaggtgagcaaggcacctaagatccagcggcttgtgacccccttgaccctccagaggaagcgtgctagaattgctgacaagaagaagaggatcgctaagaagaagtctgaggctgctgagtaccagaagcttcttgcccagaggctgaaagaacagagggaccgccgcagtgagagcttggccaagaggaggtctaagctttctgccgccgccaaggcttctgctgccacctctgcctaagaatgatcagtgctttgagatgttttcaaggcctattttgttacagcttataagtaccttatgctgccctggctgtgttgcatcagtcgaccctccctacttagacttatgagtaattgttgcaattttgtatggacatggtactggcttgtcgggattttttgagtaccagaggtttgatatgttgttttattcaaaaaaaaaaaaaaaaaaaaaaaaaaaaaaaaaaaaaaactcgagagggg

SEQ ID NO: 2067 - DNA, 1835 bp, Zea mays
  unsure (1)..(1835): unsure at all n locations
  Clone ID: ZEAMA-23APR03-CLUSTER21136_1
accaccacaaccaccaaccaacgggcgtgcccaccacgcggcgccgttggggttggcgggcgccatgggggcgccgagcagccgcgcgctggcgctgggcgcggccttcctgctgctcctcgtcgcgctgccctccgccttcctctacctcacctcctccgcggccacccgcgccaccctcctcgacctcaagcccttctccgccaggtgcgcgcccgcagtcgcgccgctccgcgtcttcatgtacgacctgcctgcgcgcttccacgtcgccatgatgggggccgccgccggcgcggggttccccgcgtggccgccgtccgcgggcgggatcaggcgccagcacagcgtggagtactggatgatggcgtcgctccaggatgggggcgcgggaccggagcggggaagggaggccgtcagggtgcgggatcctgacgccgccgacgccttcttcgtgcccttcttctcctcgctcagcttcaacgtgcacggtcgcaacatgaccgaccctgacaccgaggccgaccgcctcctgcaggttgaacttgtggatattctctggaagtctaaatattggcaacgttctgcgggccgtgaccatgtcattcctatgcatcaccctaatgctttcagattcctgcgagcaatggtgaatgcatctattcttatagtttcagactttgggagatacacaaaggaactggcttccctgaggaaagatgttgtggcaccatatgtgcatgttgtgggttccttccttgatgacgatccacctgatccatttgaggctcgccatacactgcttttctttcgaggccgtactgtcaggaaagatgaagggaaaatccggtcaaaacttgagaagatattaaaaggcaaggaaggggtgcgctttgaggatagcattgccacgggcgacggcattaacatatctacagaaggtatgcggtcatcaaagttttgtctccaccctgctggggacactccttcctcatgccgcctgtttgatgccatagtcagtcattgtgttcctgtgatagtcagcagtcgaatcgagctcccttttgaagatgagattgattacagtgagttctcccttttcttctccgttgaagaggctctaagacctgattacttgctgaacgagctcagacaggtccccaaaaggaagtgggttgatatgtggttgaagcttaagaatgtctcccatcattatgaattccagtatccccccaggaagggcgacgcggtgaacatgatatggaggcaggtgaggcacaagatccccgcagttaaccttgctattcacaggaacagaagactgaaaattccagactggtggggataatgattggtggtgaatcgtgtacatattaccatatccactgttagtcctggttattttcggtgcgttatgatggaaacattgctcaccgtcctttgtgaaccaaagtgttcatcttaagatccaaggaccgagtccacaactatttgctgacaggaactgagattatcacctcttttttggtcgatttttgtgacggcttcctatttccccccctgatgctacaaaatagaggggacaaataaacttacagtaacattatagaggagtcatgcctgacaaataggatctgtagcttctttgtgctcccacactggaagtttaaatatataattcatatatgtctggtgctggactgccggtagatacggtttttctcntgtgtttgctactttgaaatctgctgactcgaataacgtaggtttcaatatgttgggtgtgtactaaaccatatcagtatgtgctgtcagctgtcttgtagcgtgatggc

SEQ ID NO: 2068 - DNA, 1566 bp, Zea mays
  Clone ID: ZEAMA-23APR03-CLUSTER211527_1
gcacgagaccattacctagaacatcctaatcgaaaagtcccgtgcagcgtttcccccctcaccctcaccctcatctagtcacccccgtgcgccgcgccggttcccataaaaaccaaaccccccgacgcctcgccctctctttcgttcccgaccaattcgcctggcttgccctcgcccgcccaccgctcggagccgatacaagacgagggcaatcgatctgttccgaatccgcatgcgcccgcggccgccgccgcccgtcgccacctgaactcgaacccctggccggagcgtgcggcccgcgcccgcctatggacgagtaccagacgcgccggtcgccggcgggcgagcggttcatcggcatgttctcgtcgccgtctacgccctcgtcgtccccgaccgagccttcgttcgtcgctggggacgaactccacgaggacgacttcctcttctcgtcgccggacgccgcggcgccgcagcccgacgggcctaggagcccgggccggggagcgccgcaggggcatctcggtcttcttgccgccctggcgctacgcgagggggacaggaggctcctggttcgcggtggccacggcgggggagtggcggccgcggccagcgcggggacgctgctccggcgcaaggcgaccatcgcggcggccgccgcatctgcctcggccacggtggcgtcggggaacgggggcgcgttgtcgcccacccagtccccgacctcctccgcgcgggccatcccggcgaccgcgaagccccagaacgccgggcccgcccggccgtaccaccagtcggcgcccgtgaaggtgcccgtgcgtccactccgaaagccagctacgggccggtgggacgaattcgatgacgacgcggacttcgggcgcggcgacgccgccatgctgccccccgcatgagatggtcgcccgcgcatccgctggtggggctgggcccgccgctccgttctcgatgctcgagggcgccgggcgcacgctcaaaggccgagacctgcggcgtgtgcgcgacgctgtgctcaggcaaaccggattcctcgattgaatccggcaaggtgacgtggttcttgccttttgttcagcaaccgtgtgctcagtcagagtcgaagatgcgttacattaggtatgtgtagtgggttctactgtgtgagcactgagcaaagcgggaaggtaagataacaagattgaatttcccggcttgcaattttggtgttcttggatgtctgcgtgtcatattaccgcaagcttcagcagtaataagaactggtgtcctgtgtgggtctttctctgcgagctctctgtaatccaggagggaagagattttttttgtttccgtcaaggttgtctgttaggcgtagtacatatgaattatcgttatgttagtcgagactaatgctttcagctcttagtgaaagttttgttagttttgtttcttactcttttgttgatggtactgaattacctatggtgatgaaaatatgcattgtttcaagaggaaaagagagaactgcgtttggtgaggaaaatatgcattgtttcaaaaaaaaaaaaaaaa

SEQ ID NO: 2069 - DNA, 1491 bp, Zea mays
  Clone ID: ZEAMA-23APR03-CLUSTER21200_1
agagacccaggtcagtttcatcttattctgatgatgatctgaattaatatactagtaatacctgttgacggtttatgtccattttcattacctgtcaaataaatcactcctgaaagcaaacctcgagtctgagagaatggctaacactgctaagggtaaggtctgtgtcactggggcgtctggtttcatcgcctcctggctcgtcaagcgccagcttgagtcaaggtccaatgcacctcgagtctgagagaatggctaacactgctaagggtaaggtctgtgtcactggggcgtctggtttcatcgcctcctggctcgtcaagcggcttcttgagtctgggtaccatgtcctgggaacagtcagagacccagggaatggcaagaaagtagggcacctctggggcctggaaggcgcaaaggaaaggctgcagctcgtgagagctgatctcttggaggaagggagcttcgacgacgctgtgatggcttgcgagggcgtcttccacaccgcatcgcccgtcgtcaccggatctaattccaaggaggagatgcttgattcagcaataaacggcacgatgaacgtgctacgctcgtgcaagaagaacccatcgctcaagagggttgtcctgacatcctcgtcgtcgacagtgaggatcaaggacgaagccgacctgccccctaacgtgctgctggacgaatcgtcgtggagctccatcgagttctgcgaaagtctccagatatggtacgccgtcgcaaagatcctcgccgagaaggcagcctgggagttcgccggagagcacaggatcgacctcgtcaccgttcttccgaccttcgttgtcggacctactctgtctcctgagctcggccccaccgcttctgatgtcctcggcctgttccaaggagagacggggaagttcacgacgtacgggaggatggggtacgtccacatcgacgacgtggcgaggtgccacatgctggcgtacgaggccgcgggcgcccgagggaggtacatctgcagcgcggcggtgctggactgcggcgacctcgccgccctgctcgcgcggcggttcccagcgtaccccgtcccgaggagcctgccccgcgcctacggcgagcagtcgtacggcttcgacacgtccaaggcccgcgcgctggggctggcggaattcaagggcgtcgaggagatgttcgacgacgccgtcgcctcgttcataggccatggccatctccccgccgccgaggaacgccggcacgcgtagcctcttggtctgaaactacatgaatgaacgtatcatgtactaattaaattatttaatacttttaactagcatctaatcatgccgtttagtctttatcagtgtgttttattttatagttatattatatttaatacttttaactagcatttaataaaaaaaaatgatggactaaaatttagtcggttagaaccaaaccgaccctaaatcttgtcgtaaccagtagaaagattatctc

SEQ ID NO: 2070 - DNA, 1538 bp, Zea mays
  unsure (1)..(1538): unsure at all n locations
  Clone ID: ZEAMA-23APR03-CLUSTER21204_3
aacgaaaggaaaatttccgaaacagaggcggcccgccgggcgagcgcgccggagcccgcatgggtgcctcgtccactccggcggccgcggccgcggccgcgccgagccggcgcaaggtgacgctctatctggtgctcctcaccttgcagtacggcgcccagcccctcatctccaagcgctttgtccgccaagatactatagtgacttcactcgttcttgcaacggaagcagcaaaggttatttgtgcaatcattttattgattgcagacggtagtctgaaaaaacagttcagtaattggaccctcactggatcactgactgcgtctggactgcctgctgctatctatgcccttcagaatagtctgctgcaagtatcattcaagaatctggattccttgaccttttcaatccttaaccagactaagcttttgtggacatcatttttcacatttcttattttggggcaaaagcaatcatccaagcaaattttagcattggccctcttaattagtgccgccgttcttttaagtgttggggagagtagtagcaaaggttcaaatggtggtggctctgactatatcttgctatatgggatcattccggttacagtcgcttctatgctgtctggtttggcctcttcattatgtcagtgggcatctcaggttaaaaagcatacctcttacatgatgactatagagatgtcatttattggaagtgtgtgcttgttagcaagtacctatcggtcaccagatggagaagccataaggaaatatggggttttccatgaatggacttcctggaccatggtaccggtattaatgaatgccgtgggtggaattcttgttggtcttgtcacaacttacgcagggttttgttatagtctcagctctccttgtaactgcactgctacaattcgtgtatgatgggaagccaccatcactctactgcctgatggcattaccacttgttgcgacaagcatattcatctaccagaagtatccatatgttgataagaagaagaaagtctgatgcacataattgtcagagatgggaagtatcatcagcaggatgtaatgctaaccttattttgtccacaaggctggaatttgcaccgtcaagtgggccagatgtgactcttgaagagttgcctgttcgtgaatctattttcaattatctactgatctagatatataattaaattagcagtacactagcctggaatcagtttcagcaggcagttgacatgcttgcatgtaacatctggaaggaggtttcatattaatggtgtttacttgcacagcatgatgaacttactgtctgcctttcctggattgttatttatagactgatttgtgaattttgaatatgttatttatgatgacagaaactaagaactaattattttgcgtcaaaccatctcataaggaatctgcactatgttagttgaaaaaaaaaataaaatatataaaataatttatgtgtgttaaaacttccttttttgantgnaaacaaaaaaaaaaataaatgggggttccttt

SEQ ID NO: 2071 - DNA, 799 bp, Zea mays
  unsure (1)..(799): unsure at all n locations
  Clone ID: ZEAMA-23APR03-CLUSTER21207_4
agcagcgtagaaactagaaagaccagtccccaaactccccagcgggggcgagtagaggaggaagagtcgccgccgcgcgcgcgcgcgccgcgccatgtctgggggaatcgcccgcggccgcctcgccgaggagcgcaaggcctggcgcaagaaccacccgcacggtttcgtcgcgaagccggagtcgctgcccgacgggacggtgaacctgatgatctggcagtgcaccatccccggcaagcaagggactgactgggaaggtggatacttccctctcacccttcatttcagtgaggattaccctagcaagcctcccaagtgcaagttccctcagggtttcttccacccaaatgtctatccttctggaccagtctgcctttcgatccttaatgaggacagtggttggagaccagctattactgttaagcagattctcgtcgggatccaggacttgctagatcagccaaatcctgctgatcctgctcaaacggatggctatcacctttttatccaggatcctacagaatataagagacgtgttaaactgcaggcgaagcagtaccccgcgttgctagtgtcttgaatggaagactaaagaacaaggtcaacatgaggaagactactataaagattgtgaggagttctaggccattgttgcttcgatcaaccaccatgtggaaagtcgttagttttctagtttatgttataaagatattcnnnnnnnnnnnnnnnnnnnnnnatattggtttgcagagaaatcatcatatttgtataatctggtcttgactcctagctacac

SEQ ID NO: 2072 - DNA, 1219 bp, Zea mays
  Clone ID: ZEAMA-23APR03-CLUSTER2120_3
ccacgcgtccgggcgcgcgcgaggaagaagttaggttagaaggactctccaaaagcgccgcttgagtaaaaaagatctcgccccaaggggtacgacgactacgatcacacaatataagcatctctctgctgctcaaagcaacccaggccggactcccgagggaggcttttttagagcaagagaggacggagaggtagagagagaagggggacggaacaagcagctagctagcagggaagatgggtcgcggcaaggtggagctgaagcggatcgagaacaagatcagccggcaggtgacgttcgccaagcgcaggaacgggctgctcaagaaggcgtacgagctgtcgctgctgtgcgacgccgaggtcgcgctcatcatattctccggccgcggccgcctcttcgagttctccagctcctcatgcatgtacaaaacactcgagagataccgcagctccaactacagcacacaggaagtaaaagctccactggagagtgaaattaactaccaggactacttgaagttgaggaccagagttgattttctccagactacacaaagaaacatccttggcgaagatctgggcccactcagcatgaaggagctcgagcagctggagaaccagatagaggtatccctgaagcatatcaggtcaagaaagaatcagatgctactcgatcagctctttgatctcaaaagcaaggaacaagagttgcaggatctcaacaaagacctaaggaaaaagctgcaagaaacaagtccgcagaatgtgatccacgacgtctcctgggaggaaggcgggcacagtgggagtagtgttcttggtccgttccagggactccttcagcaccatggcaatgatccttccctgcagacacggtaccatcagcaggcctacatggaccagctgaacgaggacatggcggaccctgacgagcacggtcggtctggatggatatgagatgctccggtccgatgccccccaaataatgtcgatgcatgcatatagtttcctgcggtatgcggaactatatatgtgttgaaactgcaccaacgattagctgcctgattgtaatggttaccttaagaactccagtgtattgtattgttgtgtgctgtgctgtgttgtcagaagcttgcaactttgtatatgtacatgtatggtattctgttagtttcttggagctgcgcaaaaaaaaaaaaaaaaaaagtccgctc

SEQ ID NO: 2073 - DNA, 1021 bp, Zea mays
  Clone ID: ZEAMA-23APR03-CLUSTER2120_4
aaacccaggactctgctgcttagagctagagaggacacggaggtagagagacgaagctagagggacgcaaaacaagctagctaggaggaagatgggtcgcggcaaggtggagctgaagcggatcgagaacgttcgccaagcgccgcaacgggctgctcaagaaggcgtacgagctgtcgctgttgtgcgacgcggaggtcgcgctcatcatcttctccggccgcggccgcctctttgagttctccagctcctcatgcatgtacaaaacactcgagagataccgcagctccaactacagctcacaggaagtaaaagttccactggacagtgaaattaactaccaggattatctgaagttgaggacaagagttgaatttcttcaaactacacaaagaaatattcttggtgaggatctgggtccacttagcatgaaggaacttgagcagctggagaaccaaatagagacatccctgaagcagatcaggtcaagagagaatcaaatgttacttgatcagctctttgatctcaaaagcaaggaacaagaattgcaggatctcaataaagacctaaggaaaaagctgcaagaaacaagtccagagaatgtgctccatgtttccagctgggaggaaggtgggcacagtggcgcaagtggtaatgttcttgatccttatcaggggctccttcagcacccggacaacgatccttccctgcagttcgggtaccatcatcaagcctacatggatcagctgaacaacgaggacctggtggacccgaatgagcatggtcgatctggatggatatgaaatgctctgatgacccaaaataaagttgatgcacagcagggattccccctgcaggacgcgagactatgtattgaagctaagacctcgtgtgtgttgtgttgtgtgcgaagcttggaactttataaatcgttgtcatgccccaaaaaaaaaaaaaaaaaaaaaaaaaaaaaaaaaaaaaaaaaaaaaaaaaagggcgactctgcgttgttaccactgct

SEQ ID NO: 2074 - DNA, 1024 bp, Zea mays
  Clone ID: ZEAMA-23APR03-CLUSTER212984_1
aaaatcacaaaagcacagctcgcattccttgtgcatgggttttgagcttttgggcgatactagcaatacgcaaaagctcaagcagagctatagcttcggatggcgtttcttctaacgctgctactaccgtggtggccgctgtcgccgtggctcagccccgctgcggcgtggttcatcttcttcaacgccgtcgtcagcgccattgccgtcatgtctaccagcggtagcggcagcggcggcgccggggccacgccgccgtcgcctacgcgcaggctctgccgcagcgggtcgtctatggtcctggatcgcctccggtccttgttcattttttccgtggaggtggagcagctgccgatcgatgaaagcagcagtgctgccgcggcctcgcactgttgctggccagaagcagaggcggcgtccgcactgagcgcaattcacaggctgcggccgcaacaaccggcgagacggcagcgatcagcagcaccgcgcaaccgagcgcctctgtggcggtggcaacagccgtggtccacgcgccttcggcaccgccaacggaggaggagggcaatgcagagaaggagcaagaacatgatgagtctgctattagcttggacgaggcctacgcgctagcccatcgccatcgcacgaagccgctggcgtcgccgccgtcagcagcagcctctgccaccgctgcgttgccgacggagcacaagaaggtggtggcggactggcggagggtacccaaagcaggggaggcgcttgaggggaaggcggagttgaacgcgcgcgcagacctgttcatccggcagttccgcgaggaactcaagctgcagaggctcaactccgtcctcaaccacacccacgcccttggctaacggcggcgctgtagccggtgtgctacaatgtgcttgctccattgttcacatggccatttttggattaatgtttttttgtaattaattagtttatacacagtatatataagagcaactcgttcgctcggcaaaaaaaaaaaaggccgcgtggg

SEQ ID NO: 2075 - DNA, 2560 bp, Zea mays
  unsure (1)..(2560): unsure at all n locations
  Clone ID: ZEAMA-23APR03-CLUSTER21363_2
gttcggcattactccacttcactccctccctccctcacctctggctcatcagtgcctgcctcactaacctcaccattactgaaatgcagagctcgcataaataggcaggacccgtggtgctactctcctgtccccttccggccttttccccccttctggagcttggggggaggcactctgcaccttcgtcttcgtcttggcgtcctccagcgctctgccttcctgagctggcttcttgtccgcagatccatggcgaaggactacccagcttctccgaaagctcagcagctccaggaatccaagaagcagcgcctgacatacatcctcgtcgtaagcgcgctctgcatcgccttctacgtccttggcgcatggcagaacaccacgcttccaaagcccataggcaactcggcgatcacccgggttggctgcgatcccactgccgccacggcacagtcctctggctctgtgccgtcgtttgggccaggctccggcgaggtgcttgacttcgacgcacaccaccggctcaccatcaacaacacggacggcgatggggaactgcagcagttcccggcgtgccctctcaacttcagtgagtacacgccgtgtgaggaccgtaggcgcgggcgccggttcgaccgaaacatgctagtgtatcgggagcgccactgtcctggcaaggacgagcaggtccgatgcctcatcccagcaccgcctgggtacaggacccccttcaagtggcctcgtagcagggactacgcctatttcaacaacatcccccacaaggagctcagcattgagaaggcggtgcagaactggatccaggttgagggcgacaagttcaagttccccggtggtggcactatgttcccgcgtggtgctgatgcctacatagatgacatcaataagctcatctcgttatcagatgggaagatcaggacggctgttgacacaggttgcggggttgctagttggggagcttacttgctgaagagaaacatcatcgccatgtcatttgcgccgagagacacgcaccaagctcaggtgcaattcgcgctggaaagaggtgtccctgccatcattggcgtcatggcgaagcagcggttgccttacccatctagggcgttcgatatggcacattgctcgcgctgtctgattccttgggatgaacacgatggactgtaccttgctgaagtcgataggattctgaggccaggaggatactggatcctctcgggacctccgatcaattggaagacacaccacagggggtgggagaggacgaaggacgacctcaagcgggagcaggacaagatcgaggatgttgcgaggagcctttgctggaacaaggtggttgagaagggggatctgtccatctggcagaagcccaagaatcaccttgagtgtgccaacattaagaagacatataagacaccccatatctgcaagagtgacaatcctgatgctgcctggtacacacagatggaagcctgtgttactccactgcctgaagtgagcaaccagggagaagtggctgggggagcggtggagaaatggccagagagggcgttcttggttccccccaggatcaaaaggggcatgattccaggactggacgccaagaagtttgacgaggacaagaagctttgggagaagagggtggcctactacaagcgcaccataccaattgcagagaacaggtacagaaatgtgatggacatgaacgccaacatgggtgggttcgctgcttctctagtgaagtaccccgtgtgggtgatgaatgtcgtccctgttaactccgaccgggacaccctcggggcaatatacgagcgagggttcatcggcacgtaccaggactggtgcgaagctttctcgacgtatccaagaacatatgacctcctgcatgctgacaatctgtttagcatctaccaagacaggtgcgatataactggcatcctcttggagatggacagaatattaaggcccgagggcacagctatcatccgcgacacagtcgacgtgctcacgaaggtccaggcaataaccaagcggatgcggtgggagagccgcatcatggaccacgaggacggccccttcaacccggagaaggtcctcatggcggtcaagacgtactggaccgccgaagccgaggaggagcactagcacacgagtgacaccgagctcacttgaaagcgtgaaccaagcctgttctacacttctactaccggtcgagagggatggcgtcagcgttttgcgtcncagtntagtatgtatgtcccttttcaccttttctctagttctttgtagctagctacaatcagatgggaagntaagggagagttttganacgggggnnnggnnngnntggttggtcctctagttgagatacaggaagcggttttgtagcaggggaaggtttcgctggtcttgcgtaggttcctggccctgtttcacgaggggttgaactaggttttagtttgtaatgcgatggcaccgggcaggcattgttaatcgtatattggggtgaccataatagtaacaggtatttatttagttttcatct

SEQ ID NO: 2076 - DNA, 1573 bp, Zea mays
  Clone ID: ZEAMA-23APR03-CLUSTER21375_2
cccttgcaagtcttggtctggaccgtggacggcttccagaacccagactccctgcacgcgcctacataagaaaaaagatccgtggccccagcacccgcggccgagtcagagccccagtcccagagggagggggaaatggcgagcggggacggggacggcggggacgggaagaagcagagcagacggcagctgtgggcggcgtgcctcccgcggccggggtgcttcacggtgtccgccgccgacgagggcccgtcggctcacggcgccggccagggggagagcaagcccaagcccacgcatctggtcgtcacggtcaatgggatcgtcggaagtgcagaaaattggcgttttgcggcaaagcacttcatcaggaaacaccctgaagacgtggttgttcactgcagtgggtgcaactcagcagctcgaacctttgatggagttgatgtgatggggagaagattggcagacgaggtggcttctattgttgacagtagaccagagctttgcaagatttcctttgttgcgcattcattgggtggactaattgcaagatatgctattgcattattatatgagagcgagacacaaaaagattctcatgaaaagtttgagaaccatgctgttgactattctagtaaccagcacagcatagggaaaattgctggtttggagcctattaacttcatcacttttgcaacaccacacctcggtacaagatcacacaaacagataccacttcttcgtggttccaacaaattagaaaagatggcgtatcgtttgtcttggattgctgggagaagtggaaaacatctcttcctgaaagatacggaagatgagaaaccaccacttcttctacagatggttactgattatggtggtctccatttcatgtcagctctccgctctttcaagcggcgtgttgcttactccaatgtttgtaatgactttatcgttggctggaggacatcatcaattcgtcgtcaacacgagcttcctgagccccgaagttttataaacaacaatagatatccacacattgtatatgtggaagggccaaaaattgaggatgttgattttttggatgcgatgatttacgaggcaaaaacgactagtgaaatggaagaggtgatgctcaaaggtctgaatagagtttcatgggaaagggtagatgttagcttcaagaaaagtagacaaaggattttcgctcatagcactattcaggtcaagacctatttcttgaactccgatggagctgacgtgatcaaccacatgatcgaccattttgtttattaagatgggtgtactaagttggtaccaagttctctttgtcgatcgattctcggccaaagaggaacatgtgggaaatgttcttgttctgaagacaggattagagttatactgaaggagtagaacccactgtaaagtgtaaaggggtatcttgtctctacccttcttgctaattttgggccgtttagtttcttttcttcccttttcataattcagaatctcagttgttttgtacccatatactggaccagaatttgttctccaaatacaaagatatttgctgcgt

SEQ ID NO: 2077 - DNA, 1528 bp, Zea mays
  Clone ID: ZEAMA-23APR03-CLUSTER213903_1
aagtcagtcaggtcacgtatgtgcactgtgtacatggcagtagcacccaaggtgcaagcaagccaagaacaaaatggtcactcctgcatctccgacgacgacgctgccggcggcccggaagccgttgcccttgctcctcttctccctctcgctccctgccctcctgctgctgctctccctcgtcttcctcctctcgcacaccaccttcagcctcctcatctgccctctcctcccgaggatgtcttcgacgcgcaatgcgacgagcgccggtagtagtggtacccacctcggtgtctccatggacaagaccttgcaagtcttccatgccacgatgccgacgacaccttcgaggcgcaatgcaacgagctccagttctagtacgagctttggtgtctcagcggacaggaccttgcagacattccatgccttcgcggcggcgccaccgccgccgccggcgtggccggctgctccttctgttactaagagcagcagaaagaaggcgtccgcaaagagaaacaagagcctcctcaagctcctgctcaggaagacaccgcagacgcggcaattcgcaccgtgcacggacgagctcttcgcggcaccatgcaccgaccgcttcttcatgacgtggctctccccgctcgagcagttcggtcgccgcgagctcctcgtcctggagagtctcttcaggtggcaccgcgatggttgcctcctcgtcgcctccgataccatggactccacgggcggcagggacaagctgaggccgttcctcgagcgcggcttccgcttagctgtcgcctcgccggaccttgcctacctcctgaacggtacgcccgccgaggcgtggctcggcgcggtccagcgcggccgcgtcagcctcgggagcatcccgctcggccagaacctctccaacctcctccgcctcgcgctgctatacaggtacggcggcatctacctcgacgccgacgtcgtcgtcctcaggccgctctccgagctccgcaacaccatcggagcgcaggccatgaacgatgccacgggcgactggaggcgactgaacaacgctgtgatggtgttcgacagggcacaccagctggtgcacgagttcatcgccgagttcgccgccgcgttcgacgggagcaagtggggccacaacggaccgtaccttgtgtcccgagtggcggcgaggctacgccacctcagcccggggctcgccttcacggtgctgccgccgcgggccttctaccccgtgcactggagcaagatcggcgggctgttcgttgcacccaaggataggaaaggcgagaggtgggtgaaggccaaggtggagaacatcaaaggccagagctttggcatccatctttggaacagggaaagcagtaggatggaaatggaggtggggagtgttattgaaacgctgatttcagacagttgcctgttctgcaactcctccatgtttgtaaaccaaggataggataacaggagattctgcacatttgcagctgcattcagaagatcaaaaaaaaaaaaaaaa

SEQ ID NO: 2078 - DNA, 1230 bp, Zea mays
  Clone ID: ZEAMA-23APR03-CLUSTER214076_2
cagttttacctagaataggtttggtcctccaggctccagcaaacatcccaggtgatcacctgtcgagaggcgcatgaggagcctgggtttgacagcggaagaacaggtgaattttcctcctggtcccgaaacctttttttcgatttggcgttcgtttcttcaaacacgtccagcacggcctgggcacttggcagggggatggcctggctggcgccggcctgagaagctggtggccgtttcacaggcagcccgttcaggcaccggagccagaggggcctaagggggcgagccggcgaggccggaggcgggagccggaccaccggcccttagaagccgaacgcagtgccgtgaggggtgggctgacgtctcctgttctttttaggaagtggattactatctccaataccatgcagataggcttcattgcaagatctccgattagttaagggcaacgcgaagaagggggtctcttgccagttgccaccagcttgagcttctcaaactgcaggagcagcacaaggatcatcgggaggaagagagtcgccgtctcgccgactccgggctcccggaccccgcactcgccatcacgcaccctgcgcaagcagcgtccgcttccacttccacatggacgacgccgtcaacctccttgagtcgctgccgcttgatgtactgataaaaatcttgtgtaaggtgaactacagtgatctgaggcaccttctcctagtgtcaaaacaagtcaaggaagcaacaatttatgctagggagctgcatttcaagttttcgacgccgtcgacgaagtccgtttttagagacgaggaaaccggcggtggcgacgacacttgcccttgcgcgcccaagcaacaccgggctgcaaagtcacgcttgcggggccagaacctagagagcatcgccgtcaacctgtcggcgtcgttcgagagcatgctccccgaggtctagatgcaaatatacgacatccacatgttttcagtttatggtttgttcatgcttgtatctagtagtttcaggtttacaagtttagtgccttttgtagcccacgtcatagagaggctcctagatagtgggaatagtatactcgtatgcgtgattcctagtcttaagtaatctcttctctactaagtttttcaatgctgtggttgaaaaaaaaaaaaaaaaaaaaaaaaaaaaaaaaaaaaaaaaaaaaaaaaaaaaaaaaatagttctagatcgcga

SEQ ID NO: 2079 - DNA, 1065 bp, Zea mays
  Clone ID: ZEAMA-23APR03-CLUSTER21408_2
aattcggacagccacctgctcggcgagccatggccggccgccgcgaaggcgagcaccaggcgagcccgtggcgatccgggacgcccgcggcggaggaggactcgggcgccttcccctccgccatcatcttcttcgctctcgttggcgctaccgccaccaccgccgccgtcggacaactgcgccggacggtcagctggttctacactcaacttagtaggtcggaaccatatgttttctgggaagacatacctcgtcgaccaaatcgtcatcggtgcggtgaagcctgggaacgatatcaccagaggatgcgtgacaggaccgaggatcaaagggaaagagtggaacgcatacggcacatgcaagatgtatttaaaaaggagagaagtaaatgtcgggattatcgaaattgggatagccataatcccaactattatcagcatcatcaaagagatgactggtactggaacgcagaagcattttatgccaatcaaaggacaaatttcagggcaatgaccagggaagccatgacttacactatgtcacaccactattctgttttgggccttgacaggtcaaggtcagagccattttcagatgctgaaatcaagaatgctttcaggagaaaagcaatggagtatcatccagaccaaaaccaaaataataaagaggttgctgaggcaaaattcaaagaggttatggattcttacgaagcaataaaacgagaacgacgagacagaagttgctgaatgtgaaatgtgctcatggttctcaggcggagtgaggaactgttgtatataaattgtttgatgtgggacaaactaaatctaaggtataaaactaccgctctgatccaaaagtgcgtgtagcttagtggttacaagggtcacaatgccacattagtattttatgttctggcttcgactctctgtagaagtaaaaaaaaatacaagagcctgttgaggaagataatgaattcagatgggggacgaaggcaggtcaaaaaaaaaaaaaaaaaaaaaaaaaaaaaaaaaaaaaaattcggacagccacctgctcggcgagcca

SEQ ID NO: 2080 - DNA, 1802 bp, Zea mays
  Clone ID: ZEAMA-23APR03-CLUSTER2140_1
atgcctcaaggcctccactgtccactcctctcgtacaaccataccagtgctgttcgttgctctgtacgtagctcttctccaactacgtaacgtaactagctagtacgtgtacgtccagcacttggattggatggctcccctgcgactgcgagcgggagcggcggcgccaatggcggcggccgccgccacggtcgtgctggccgccatacttgcgctgttcggctgctgtgccgctgccgcgtccgccgccgccaccgacgtgacggccgcggcagagctggaccgcatcgacaggctgccgggccagcccccggtcaacttctccatgtactccggctacgtcaccgtcgacgccgccgcggggcgggcgctcttctactggctcatggaggcctccggcgtgccggcgggctccgctccgctcgtgctctggctcaacggcgggcccgggtgctcctctcttggctacggcgctatggaggagctcggcgccttccgcgtcaaccccgacggcgccacgctctccttgaatccctacgcctggaacaatgtggcgaatgtgctgttcttggactcgccggccggcgttggctactcctacaccaacaccaccgacgacctgtacgctgctggtgacaacaagacagctcatgactcatatgctttcttgataaattggttggaacggttcccacagtacaagcatcgtgatttctacatcactggagagagctatggaggccactatgtccctcaattgtcttggttagtgtaccaaaacaacaaaggaattaagaatccaaccttaaacttcaaaggcttcatggttggaaatgcggtaattgacgattaccatgactacatgggcacatttgagtattggtggacacatgggcttatctccgatgaaacttatgcaaagttgtgggaggattgtaaaaatgatgtgtctgagaacccctccgaggaatgccaaaagatttatgaggttgctgaggctgagcaagggaatattgatttgtatagcatctacacacctacttgtaagaagacttcattgcaaaagcgcagactaataaggggaagaatgccctggctgccgagaggatacgatccttgcaccgagctgtacatcacgaagtactgcaacttgcccgaggtgcaggacgccttccatgccaatgttactggaataccatacgcctgggtgggctgcagtgacccaatatatgagtactggaaggattcgccgaggtccatgcttccgatctaccgtgaactcatctcggcaggcctaaggatatgggtcttcagcggcgacaccgactccgtcgtgcccctcacggcgacgaggtactccatcgacgcgctgtctctgccaacgatcaccaagtggtacccttggtactacgacgaagaggttggtggatggtgccaggtgtacgagggcctgacgctggtgacggtccgaggcgcggggcacgaggtccccctccaccgtccgccgcagggcctcaagctgttcgagcacttcctgcggggcgagcccatgcccaagcctgtcgagagcgtccagtcgttctagatgagcttgctgccgcgcttggctagttggctttgatgaatagtaaggccggacatgtggcaagccatctccactccacatttcttcaccacgttttcaataactggcgctggccgaaataataagagcagaacgaataaaatgccgctcgctagaatgatctggctgtgcgtgtttgctttcgagttatttttatataccaaaaaaaaaaaaaaaa

SEQ ID NO: 2081 - DNA, 2156 bp, Zea mays
  Clone ID: ZEAMA-23APR03-CLUSTER21447_1
accaccgtttgaaagaagatcatctcagatcgctcctctcccctcgtgcccctctcccctcgtgctcctcttcaaatagcactcgggtacaaaagggaagtacaacgaaggcacttggctgccttctgaggctgagagaggatcactcttcttacaagttgcagcgtaggggcggccaccacaccacatggctttcttcctcgctgtagcttgcatctacatcgtctccctcactctgctggtgctgctgctcgacgcgagcagacgacggagaacaaccggaggtggcagtagcagcacggaggagcacaagctgcctcctggctccctgggtctgccgttcctcggcgagactctccagctctactcccagaacccgaaggtcttcttcgcctccaggctgaagaggtacggcgaggtgttcaagacacacgtgctgggttgcccctgcgtgatcttggcgagcccggaggcggcgcggatggtgctggtgtctcaggcgcacctgttcaaaccgacgtacccaccgagcaaggagcgcatgattggcgcgcaggccctcttcttccaccagggcgactaccacctccgcctgcgccgcctcgtgaagggctggcttggcccggacgcgctccgcggcctcgtgcccgacgtcgaggccgccgtggcgtccacgctcgacgggtgggaaggccgcgtcaccagcaccttccataccatgaagaggctcaccttcgacgtcggcgtcatcgccatcttcggccaccggctggccggccacgtgaaggaggagctgaggaggaactacttcaccatggagaaaggctacaacagcttccccatcccggtcgcctgcaccagctacagccaggccatcaaggcgaggcagcggctgggcgcggtgctgagcggcatcctggcggagcggagggcgcggcggagcgacgacgacgacgaccatggcctcctgaacgccctcatgcgctcccgtgacgacagcggggcggcgccgccgctctcggacgaccagatcgccgacaacgttatcggcgtgctgttcgcggcgcaggacacgacggccagcgtgctcacctggatcctcaagttcctccatgacaacccgaagcttctggaagccgtcaaggtggagcagatggcagcctacgaggagaacgatggcgggaggctcccgctgacgtgggcgcagacgaggaagatgtccataacacacctggttatcttggagagcctgaggctggcgagcatcatcgccttcacgttcagagaggccgtcgaggacgtgcactaccaagggttcctgattcccaaagggtggaaggtgatgcccctgttcagtaacctgcactacagcccggactacttcgaggacccacacaagttcgacccttcccgattcaaggtggcgccgcggcccggcacgttcctgccgttcgggagcggcgtgcacgcgtgccccggcaacgacctggccaagctcgagatgctcgtcctcatccaccgcctcgtcaccacctacaggtgggaggtggtggggtcgagcgacgacgtgacctacagcccgttcccggtgccgaaacgcggcctcctggcgaggctcagcagggccaccaccggcagcgcggtcgtcggccgtgcgccgccgctggacattggaggacctgcaggcgctagctatagctagctcctcggaccaaaaggcaatgcatgcacccaagcacccaggagatagataggcccggcaggcggcaggggacgacgacacacacatccagacatcgtccagtcacgtggcagtagcaagctagtactactactactgtgtgtgctgccattctgcatgcatgcgtttcctctcattctcgtgttccttcatggcatgtgtttccttcccttcgtttcccctcgatcgcttatacagatataaatatctggtcaatcattgggatagcaagcagacggtgtaccgtaccgccgcctgccggtctagctagctatatatatgcatgcatgcatgctccgtcctaaaagaatataataataggatccgtgtgtcctttgttagaatatatttaaagtttggccaaatacgcaggcaaaataaagtacttaaaaatcaaaaaaaaaaaaaaaaaaaa

SEQ ID NO: 2082 - DNA, 695 bp, Zea mays
  Clone ID: ZEAMA-23APR03-CLUSTER21515_1
aggacgatgatgggacgactgcgcataacagaggtgttcctcgcggcggcggtggtgacggcggcggcggtgacaactagtggtggcatggtcgccgcggtgcgggacgacgacttcttcgtggacggctcggtgtaatgcgacacctgccgggcggggttcgagacgaacgcgacgacgccgatcgcgggcgccaaggtgcggctggagtgccggcactacatgagcgcgagcggcgcggtgcagcggtcagcggaggcaccacggacgcggcagggaagtaccgcatcgagctggtggacaaccgcggcgccgaggaggtgtgttcggtggcgctggtcagcagccccgtgcccgggtgcgccgagaaggaggttggccgcgaccgcgcccaggtgtcgctgttcacggacgccggggccggcctcgccaccaccgtgcgccgcgccaacccgctgggcttcctcaaggataagccactcgccaactgcggccagatactcagcagctacgcgctgggctccgcgcctagctactgacggcccttggctttgggaccaattcgcacgctgcctgctttctattgcatttgatttgcacgtgtctatttttagtagtatttagtaaacattacgaataatcttcatcggctagcaatacaaatcaattaattagagttaaaaaaaaaaaaaaaa

SEQ ID NO: 2083 - DNA, 1295 bp, Zea mays
  Clone ID: ZEAMA-23APR03-CLUSTER21550_2
aaaacgggaaagacggagaacgaagaggaggggggcgacgtcgccggcggtcggaggcgacggggatgagtcggaaggaggcggagccggcaggacaggatgggtcttcttcgtcggccactgatgggggaggaggaagtggcagtggccgggagctggcagatgcgctggcgcggcgacgtttgtaccgggaggtgacgctggcgctgcactcagggttgcgcgacgccaaggcggacttctccttcctccgcgcgcgtgggctccgcagcctgctcggattccttcgctccaccgcctccgcggccgacgacgcgctgctgctccttttccgccactcccaatccatccccgatctccaaggaaacgtcaggtcattgaaaaataacaggaattaaaccatttcttggtctctgtatcaaaggtagtggcaccttctaattattcctgttctctttcagaattcgttgcatcaaccaaagcaagatcctgttgtgacattggatcatatatttggaacggaaccaatgaagattacaagcccccctacagattctgaaattgctcttgcacttagagtcttggaaggttgttgccttttatatagccgatgcacagctctggcccacaaatacaaggctgtgaaggtactcttgaatatattagccagccgaggtccaactgagcaaggagtttgcttggacacactgatatcgctgatgttggactcaccctccaatcagatggatttcgaagaatacagtggacttgaaaaggttgctgaacttttaaaggatgtgcaagtggaaaagcatataagattgaaatgtggggagttcctattgttgctcattggacatgtttttgtgaaggaaaactctcccatacatgaacaaatgaaaaatctgtttggtgagcagtgcgcatcacttatatgggcagcaagccggttcggctccaccttggatgcagagcaaaggcagacgaccttgcaaatacaagcaatgagagttgtcgaatccttggaaccctactaggactggtgcattcatctgtgtaacttacgggtgatgacaatttgatgtctctaatctgagctgcatgctccattttgttcatgcaagctttgttgtcattctcttctgtgtaaagccattcttatgctactctttttagtaagctttgttaaaaggattgtattagttccatttgagaacaatgcattagggagacactaggaaaacattaaaatatccattttgttgtggtaaaaaaaaaaaaaaaaaaggccccta

SEQ ID NO: 2084 - DNA, 1993 bp, Zea mays
  Clone ID: ZEAMA-23APR03-CLUSTER21596_1
gcggagcacaagagaatcgagaacgtcaccaaggccgtctgaaagcgaaaaggccctttgcctctcgctctaccccaaaccacagcagtcagcagcagaccctcgccatgggactgagatccccgctcgtgctcctgctgctcctcctcttcctcgccgctactttccgtcccagcgcggccgctttggcccctccaacaggcagcatcgtgaagcagctgtcgtcggtcgtcaggtggccgcgggccgccccctcgacgcacgggcccaaacagcccggccacccccagtacgccgatggccacgtgggggtagccctgcaatttgagagcggctactttgtagagacacttgttgagggtgacaagcttggtgtcacgccgcacaccattagagtatctcctgttgagggcggggagctccttgcggtcgactcggcacatagcaacattgtgcggataaccccgccactttctgagtatagcaggggaagacttgttgctggttctttccagggccattctggtcatatagatggtaaaccaagtgatgcccgattcaagcgccccacaggcgttgccgtggatgatatgggcaatgtttatgttgctgatacagcaaacttggcgattcgaaagattggagaatcaggagtgaccaccatagcgggtggtaaatcgaatatcccaggatacagggatggccccagtgaagatgcaaagttctctacagattttgatgtggtgtatgtgaagaaaatgtgttctcttctggttattgaccgtggaaatgcagcccttaggaagatttctcttccacaagaagactgtacttaccaggattctgcactcctatcttcagatctcatattggtcattggtgctgttgtggctggatatatcttctctggtttccaacacgggtttggattctcaggctccgagaaggtagaggcacctgaaaacgagcagcacgagagcagcacaatcgggaagccacctctggtggtggagagcctgaaagaggaaccaggagctgggtggccatccctcgggacgctaattgccgatctcttgaaacttgccatcgagggagtggggaaactgctactcagcgtagtccctcaacgcatgcaacacgggaagaggaagacagatctcaccccgctcagggacaggctggtgatgcccgaggacagagaggagacggcagcggcggcgcagaagctcagcagcacaccaatgcggcccgagacagcccacgcccctaaccccgtaaccgagacggcagcacccaaggccccgaagagcacgaagccatccaagctcagggattcttcgaccctgtcaagcaagcacaggtcctccaagcggcaggaatacgcggacttctacggcacctccgagcccgctcccgtaggtgccgccgccaaggtccccaaggacaggctccgccaccgccaccaccaccgcgagaagagcggggaggtcgcctacggcgccgcccatcacgacctgaagcccgcggaagcgaagcctgccgattacagcgatccgagctacgatccgtacgtgaggagcaagtatgccgccgagagtgggtacaggtattgacgtgtcgctagctgtcctgtcctgtcctctcctgccgggggaaacagcggaatgaaaacctttcgccggcgtctgcctggcaatgttgtaagtgtgaagctatatagcctccacaagcgcaaagcgaggcgcaaacaaagctgctgctggtgcctggtgctgctcatggtttggtggtgcccatgagatgtggcaagtagtcatcctagttaggttaggtatggacggccaggacggggttggcatctggcccggtttcaggatatgctaagtgcgattttcgcagagggcgacatgcagagaaaaaaggcggttttgatttcgtatctgcagttcgatgtatccatccatggatcaaaaaaaaaaaaaaaaaaaaaaag

SEQ ID NO: 2085 - DNA, 866 bp, Zea mays
  Clone ID: ZEAMA-23APR03-CLUSTER21648_15
agtttaacattttggactactattgcatcaccacactcaccgcaccaccgaccactgcctccgtacgcgtccctctggcggaaaatcggtcctagtgccgagctcgttttgtttggatcttctgtatatctattaaggaggcttctccatctcctcggagcagcaaggctgtgcagcaatggagaagtataacagcaacactcaatttgcaccattgagagagactccgtttgccctccgtggtgctcttggtagttcaagctcatatcttgagcaagccaggggctacacatcttcccctgtagcagctctgcgcccaaagatgtctacacctggaaatcgactcctgcatacgagctgccccctgtcatctgctgtagcgaaccgcccgctgtcgccccatcttcctctgaagaagccacagttcagcgctactttctctatcccgcaccgtatcttcggtgtcgcgctgggagttgccatcatatccgtccccctcgccaccaagttcagcctgatgtttggcgtttgagagcgatttgctgcatcttatgaggaactgcatttccccgttcctgtgactgtttcatcgttcgtctgggttaccttgcaacacaactttaggtgcagttggaataacatctttgtcatgctgacagacttctgtaatacagtaataagtaaaactataaaatatcagtgtagggaggtttgccccattatggatgtacatggtcatgaggtctgcagcctgcaggtttggctgggaaatagttgattatcatcacaacatattaactgcatggtgcgtatcttcgctacgtgcccttaagctcgtctagaaaaaaaaaaaaaaaaaagcggcc

SEQ ID NO: 2086 - DNA, 2056 bp, Zea mays
  unsure (1)..(2056): unsure at all n locations
  Clone ID: ZEAMA-23APR03-CLUSTER216720_1
gtatcacgctcacaaatcgcagagcgcacggcggccactgcccactggcctcctgaatcctacgctcgccaagtcatcattcgcgaccagctcccgtgatcctcagctcacctgagctccgcgtataaaaagcgcgagctgcagaacccaaccaacaaaagactccacttcgccaagtcacgctcacgcacgcgttttctcggtggacggtgggcacggacacggaggagccgccgcaagcgcagcgcagcagtgggcgcgaaagcaaggcatggcgtggtcggagacggacgccgcgctgttcgcggcggtgctggggcgggacgcggcgcaccacctgagcaccacgccgccgcaccaggacgcgcccgcggcgtcggcccccgagctccaggcgcgcctgcaggacctcgtggagcggggcggggcgtggacgtacggcatcttctggcaggagtcctgcgccggcggccgcgccgtgctcggctggggcgacggccactgccgngacggcggcgccccgcaccacgacgacgcggaccggagcgtggcgcggaagcgcgcgctgctgcggctgcacgcgctctnacggcggcggggacgacgagggggccgactacgcgctccgcctcgaccgggtcaccgccgccgagatgtactttctggcgtccatgtacttctccttcccggagggcgcgggcgggccgggccacgcgctcgccacggcccgccacgcctgggccaccgtcgaccccgcgcccgggtggtacgtccgggcgtccctcgcccagtccgcggggctccgcaccgtcgtcttcctcccgtgcaagggcggcgtcctcgagctcggctccgccgtgcccgtccgcgagactcccgagaccctgcgcgcgctccagaccgcgctcgctgtcgcgcggcccccggcacgcgaggaatgcatgaggatcttcggccaggacctctcccccggcgggagcgcccgagccccgcgcagcgtcgacaattgggctccacatccacacctcgccgcccaagccaccgccgcgtccgcactagccagcaaggaagccgccgcgggacacaaggctccggagccgcccaggagcatagacttcagcaagccagggaagcctgggcacgggcaggccggcggcgaggagcggaggccgcggaagcgcgggcggaagccggcgaacgggcgggaggagccactgaaccacgtggaggcggagcggcagcggcgggagaagctgaaccagcggttctacgccctgcgcgccgtcgtccccaagatttccaagatggacaaggcgtcgttgctcagcgacgccatcgcgtacatccaggagctggaggaccggctccgcggcggcggcggcggcggcggcggctgctcggcggcgcgcccggacagcccggacgtggaggtgaaggcaatgcaggacgaggtggtgctgcgcgtgaccacgcccctgtacgcgcaccccgtctccagggtgttccacgccatcagggacgccgagctgatcgtggcggcgtcggacgtggcggtggcggacgaagccgtcacgcacacgctcgtgctgcggtcgcccggccccgagcagctcaccgcggagacggtactcgccgccatgtcacgggggatgaccagcgccaccccctccccgtgactctgtagcggtagctgtaagtcgtaaaccgtactcgccctcgtgcgtgccggccacatagtaaagccacagaaattgcaatggccaaggcccaacattaaatttactgctcgtttcctagtttttttgcatttggattttaattagatgagatgtgtacacgcaaggcggcaaggcacagtttgttgctcttactagctatagctactttagtttgttgctttcccaacctactagtatttttttctgaacaagaaaaaaaaaaaaaaaacttctagtggctaactgtactagtagtagttctgttgttttcagtttccacagtccacttattagcttgtcgtgactcgatttcgagatcaaatctattccattcgatt

SEQ ID NO: 2087 - DNA, 1135 bp, Zea mays
  Clone ID: ZEAMA-23APR03-CLUSTER21698_4
aattctcgcaggcctccacgcgaccacgccgcggttttgcacttctcgccttctctaatctctttgcctctttggctccctccaccaccagtccaccaccactgctacccaaccctcgcttccccaaaccctagccaagggacacggtggccggcgatggacggcgacggaggaggcgctggtgcgctgcaccaccacacgcgctcacccgaggacgtcttccgcgatttccgcgcgcgccgagccggcatcgtcaaggcgctcaccacggatgtggagaagttctatcagcagtgcgatccagagaaagagaacttgtgcctttatggtttgccaaatgagacttgggaggtcactcttccagctgaggaagtacctcctgagcttccagaaccagcactggggataaactttgcccgtgatggaatggtcgaaaaagatggttgtctctagttgcagttcatagtgatgcatggctcctgtctgttgcattctattttggagctcgttttggatttgacaaagatgccaggagaaggctcttcaccatgattaacaacctgcccactgtttatgaagttgtgacgggggttgctaagaagcaatcgaaagcccccaacggcagcagcaaaagcagcaaacctaactctaaacccacccaaaagaagaggaggacagcggccgggaggacgcagaggaggaccaggcgtacctgtgtgggtcctgtggggagagctatgcgaacggggagttctggatctgctgcgatgtgtgcgagaagtggttccatggcaagtgtgtccgcatcacccctgccaaggcggagcacatcaagcagtacaagtgtcccagctgcagcaccaagcggagccgagaatgacggcaccctgggaacaggacctgctcccagttaacggaagcattttagaatcattaggagctatgaagcggtgtcattagaaccgcttcacctgtttagcgtaccggtgcgcgtgccggcctgttgtatcttctctcgacgtgtgttgtaaactgggcagggacaaggtagctagtggtgatgtgttgtgttagcaggctgactgctgtcatcgtagtgacggatgaactgctggcgtttaaaaaaaaaaaaaaa

SEQ ID NO: 2088 - DNA, 1654 bp, Zea mays
  Clone ID: ZEAMA-23APR03-CLUSTER21729_1
gttggggacaggacagcctaccgaaatctctctgctcggtcttccttcactctctctcatagtctcatgcatgcatggctcccactgcccatcatcaggcagcgcgggacgatgagctggagaagagccgccgcaagcccggcggcggcggcaaggcggcggcggtccggtgccacccggtcctggcggaggagcgcaaggcgtccatcaggggcgtggtgggcgacctgctggccatggcgggcggcggccggaggagcctcatctcgctcggcgtcggcgacgcgtcctcccacgcatgcttccgccgcggcggggagttcgccgccgaggccgtcgcccacgccgccttgtccggcgccttcgactgctatgcgccgtccttcggcttccccgacgcccgccgcgcggtcgccgcccacctgtcgaccggcgcggtgcaccgcacgcacgaggccgacgtgttcatgacggcgggcggcacgggcgcgatcaccgccatcgccacggtgctcggcggcgcgccgggggccaacgtcctgctgccgcgcccgggcttcgcgccgtacgaggccgcctgcgaggtggccggcgccgagccccggttctacgacctgctgccgcggcgcggctgggaggccgacctcgccggcgtgcgcgcgctggccgacgccgccacggccgccctcgtcgtcatcaaccccaacaacccgtgcggcgccgtctactccgctcaccacctccgctagcttgctgaaaccgcaagagagttggggattcccatcgtagcagacgaggtgtacgcacacatggtcttcggcggcagcaggtttgtgcccatggcctccttggcgcacatcgcgccggtcgtcagcatcggagctctgtccaagaggttcatgctgccaggatggcgtctcggttggctggccttctgtgatcccaacggcgcgctcaagcatgtcagggctgcgaccgagatgctgctcaacgtgacttctggccctgcctccatagtccaggcggcggttcccaagatcctttcagctgaacaccatgagttccataggaatgttgttcacctgctcgagtctgcagctgatgctctgtacagaagagtgaaccaaatcgaagccctgcggtgctactccaagcctgaaggctcaatgtttatgatggttgagatcaacacttcaattctacatggcgtcgccaacgacatggactttgctcgtgagttgatcaaagaagaatgtgtcctggttctacctggttctgtcattgggttgaagaactgggttaggatatttttcggagcacctgttagtttaatactagaagcttgcgacaggattgagatgttctgccgaaggaggacgctcaagcaaaacaactgaagagctgaaaatgttttgaaaccaggaagtagggtttttgttagcccagtaacatatatatacagcttcgatttattttccaatgcacattctgaggtttgcatatagaaaactgagaacagatgcttgtctatagttaaaatatatgttatacataattccaggaaatggtgtaaacatttatcatttctttacttgtgccttctacttcacagctgcattaaggttattgtctttttattgaacagccagcaagc

SEQ ID NO: 2089 - DNA, 2148 bp, Zea mays
  Clone ID: ZEAMA-23APR03-CLUSTER21731_1
actgctgcggcagtaatggccgcctggttccacttccaccacggtgtgcactagcgctacaccgaggccaccttttcttggttccttcaacacgcctactccggcctccggatcgggcaccacgtctgccccctgctcccggaatctttgccaagcggcgccgctactgtccggcaaggcgaccccgtctctcggccggcgttgatctggtgatgcgcttttcacggtgtttttttttttttgtttcactcccccctccgtcctgtgtgattgtgctgcagttttgtgccggtgctaacggaaaccggaaagtttgcgtcctttatgttactgtggttgaggcgggcggagtggcggcgcgatgggcatctcggcgaggtggctcaagtcgttagttgggttgaggaaggtggggcggcagcagcagcagcggcgaaaggatgatgcagatgttggtcgaatgaaaaccgatgtcgccgaccagtttcattttcagattcagcactctcaagatgacaatagcattgctgcacaagaaattccagaggtttcttatggaaatgatccacctgaagatgattctaatgtaccttcatgcttcgagcctgctcgtagttcagctcatatgccattttgtcaaactgaagaagcccagaaagagatctgggctgctacaattattcagacagcatttagagctttcctggcaaggagagcccgccgagctttaaaagggttggttaggcttcaagcccttgtaagaggtcatatagtaagaaagcgagcagctacgacactccgttgtatgcaagctttggtcagggttcaggcccgtgttagagcaaggcgagttcgcatggctttggaaaaccagactgatcggcaaaatacttcaccagagcacacgatcgaggcacgtgtcagagaaatcgaggatggctggtgtgatagtatcggttctgtgggagatatccaagcaaaacttctaaagaggcaggaagcggcagctaaacgtgagcgagccatggcctatgctctagctcatcagtggcaagcaagttcaagacaacctacagcatttgaacctgacaagaacagctggggctggaattggttagagagatggatggctgttcggccttgggagagtcggttccttggcacttacgggacagatgggatttttgtagttaatgaaaacaggcaacctgacagaagtgcaaccaagaccccatacagaaaacctgttaaaaagcatgattcaacccttcaatcaaacatgttgaaccagaaggtcttcccatcaaactcagagggtggtggctcctcgacaaatcgatcaagtggtttggtatcaactaaatctagactgaaggttttacccagagaaggttctgaggaagcctcatcccatccttcagtaattgtgcggtccactagtaatccgaaggagaggatttccagtattaattcaaaggagaggactggggacttggattttcaagttcataaaagatcctccttgcctggcattggtccagaagctggcaaacacctgacaaagaaaggcacggttaaccgatccctgaaggccacaaaagattcccaaatactggggtcaaggcatcatcttgccagttccattgatccagttcccaccagagttgaactggagacttgagaaggcatgttatgctcgaacatcgccatggattgcacctagcagcttggatgccgttcatgcctcaatggctgcatgaatgtgtcgcaacatctatgttatactggtggtggcggttttcgagtttcgacaccatatatgtaggctcatttcatgagataaaatcagatgcatgtgagcatgtccatatatgttaagaggattaccattggttttattgttgtatttgtaagttgccgttaggaggtgtaaatttgtgtcgtcgagtggtacttattatgtgttgtcgtatagttgtgactcgaaggttaaaggtggttttggttctactgcgaagtgtgaactgtagtgagctgtgttctgtaaaaaaataaagttgttgtgatttgtctactgtaaaaaaaatggaagtaacttggttcaagctgccgtgaaaatgtagattttatatgattttttttttttgc

SEQ ID NO: 2090 - DNA, 1867 bp, Zea mays
  Clone ID: ZEAMA-23APR03-CLUSTER21746_1
atgcgaacaccttgcagtgagtgacacacctcctgctcttccatacgcctccagtagtccagtgcagcctgagctgagctgcactgaggtacgagtagctcacgacaccactcggtgataaactaatggcgtcggcctccgccgctcccgcgccggacagggaggagattgtgttcctggacgtggagacgtcaaccccgccgtgcgtgctcctcgagttcggtgccgtagtcgtgtgctcgcgcaggctcgtggacgtctcctccttcgccacgctcgtgcggcccgcgaacctcgacgcgctcccggacccgaccgcgcggagcaacggcatcacgcgcggcaccctcgctgacgcgccgccgttccgcgacgtcgccgacatggtctacgacgtcctgcacggtgggtgtaggtgtagctagtgctgcgcctgcgcgcccccgcggcctcactcgaccacatgcatgggagggtgtgggcagggcacaacatcgtgcacttcgattccatgataatcatggacgcgttcgccgagattgggcgaccccctcctcaacccaaggccatgatcgacacccttccgttgcttacccagtgtttcgggccgagagcaggggacatgaagctggcaagcttggcaaactattttggtctagggaagcaaaggcacaggagcctggatgatgtgaaaatgaatattgacgttttcaagaactgtgctacagtcctgttcctggaggaaagccttcgaggtgtgcgtgtgcctaccgttcagaacatgtcgtcggggggtgcaacaatcagaacccaaggaataacaagtgatcctgcaccgaacagggataatcccaacgagtcgttgctggtgggatcgtccactgtgcatgtggaggaaatgatgctagacaccactgtcactgtgcagacggatacaaggagctcaggtgccttttctgggttcgttgagctagacgacgtttcaacggagagtatcaagatctcagctccgctgttcctacgcccgttcggtccgagagcaatcgtccagcacaagggttccccgctccagctcatctgtccaggtctggaagtcctctgggtcaacacaaaggggttcccaaacagcccacatcgaccaaaggtgggcataaaggtcgacatacctgagaaccttagtaaggtactagggttttgcgacgatctagcgcagagctcgtcgtcgtcgccaggaccaggagcaatatgcagtaattccagatggaaatccctgattgagagagacgcggatcggcgtccaacggtctggctgaagattcctacctttggcagtggcgacaccgcagcctgccggacacatgtatacgaaaaggagtgcgacggtgtcgttccaaggcttgtttccgaaagggtcgatccatcggaactggcctcgatgcttcaagggaacaaggtggtggatgcgttcgtctcggtggaaacattcgaccactaccaaagcgctggcattcggttggttgccaataggctggatgtgcacttcaaaaggcaacagcaggcctagctagttccttatggtgctctccggtcaggccgaggctggattgaaggggattgacccatccaattctcctgtgattctcttgttaccgaatcgatccaggactatataaataagtaagtttatgtcgtctccgtatgtgcttgcaaaacttccgaccatattttatatgtgttcagacttcttatttgatgacgctagctaggagaatgctaccgttactatcgacatggcatttttttgtttgtagtcgacgatgtcaaacatctttgcagacttaaaaaaaaaaaaaaaaaaaaaaaaaaa

SEQ ID NO: 2091 - DNA, 1941 bp, Zea mays
  Clone ID: ZEAMA-23APR03-CLUSTER2175_18
tcgatcacacaacccaaagcagccacagcagcctccttcctggcttcctcctctcactctcgctcgtgctgcgctcgctacctcgcttcgcattccattcgaggagagcggtgagaggggaggaaaggcaagatgttcatcgagagcttccgcgtcgagagcccccacgtgcggtacggcccgacggagatcgagtcggagtaccggtacgacacgacggagctggtacacgagggcaaggacggcgcctcacgctgggtcgtccgccccaagtccgtcaagtacaacttccggaccagaaccgccgtccccaagctcggggtgatgcttgtggggtggggaggcaacaacgggtccacgctgacggctggggtcattgccaacagggaggggatctcatgggcgaccaaggacaaggtgcagcaagccaactactacggctccctcacccaggcctccaccatcagagtcggcagctataacggggaggagatctatgcgccgttcaagagcctccttcccatggtgaacccagacgacattgtgttcggaggctgggacattagcaacatgaacctggccgactccatgaccagggccaaggtgctggatattgacctgcagaagcagctcaggccctacatggagtccatggtgccacttcccggtatctatgatccggacttcatcgcggctaaccagggctctcgcgccaacagtgtcatcaagggcaccaagaaagaacaggtggagcagatcatcaaggatatcagggagtttaaggagaagaacaaagtggacaagatagttgtgttgtggactgcaaacactgaaaggtacagcaatgtgtgcgctggtctcaacgacacgatggagaatctgctggcatctgtggacaagaacgaggcggagatatcgccatcaacactatatgccattgcctgtgtcatggagggggtgccgttcatcaacgggagcccccagaacacctttgtgcctgggctgattgatcttgctataaaaaacaactgcttgattggtggtgatgacttcaagagtggacagaccaagatgaaatctgtcttggtcgatttccttgttggtgctggaataaagcccacctcaatcgtgagctacaaccacttgggaaacaacgatggcatgaacctgtctgcccctcaaacattcaggtccaaggagatctccaagagcaacgtggtggatgacatggtctcgagcaatgccatcctctatgagcctggcgagcatcccgatcatgtcgttgtcatcaagtatgtgccgtacgtgggagacagcaagagggctatggacgagtacacctcagagatcttcatgggcggcaagaacaccatcgtgctgcacaacacctgtgaggactcgctcctcgccgcacctatcatccttgacctggtgctcctggctgagctcagcaccaggatccagctgaaagctgagggagaggacaaattccactccttccacccggtggccaccatcctgagctacctcaccaaggcacccctggttccccctggcacaccagtggtgaatgctctggcaaagcagagggcgatgctggagaacatcatgagggcctgcgttgggctggccccagagaacaacatgatcatggagtacaagtgagccgagtggcgtggcctgcagcgcgaggttagctgctggaaggaaactagaaaggcgagattagctgtgggattgtgttgggcttctcgtgttttattttgcgttctttcctagtcatcgctgttgcgcttgtgtatttgtcggacccgtaactaccagggctctgctattaacggcacggagcctgtaattgtactgtatgataatgtgatcgagggtgctacttcccctcggcattcctagtgttgggttaaaaaaaaaaaaaaaaaaaaaaaa

SEQ ID NO: 2092 - DNA, 5669 bp, Zea mays
  Clone ID: ZEAMA-23APR03-CLUSTER2179_1
ccgcctctcacctctccagtccccacccccgcccccgtccgctccctatcctgttcgttcccctcctctccacacgatcccctcccttgtcggcttccgcgcgggcgggagtggccgcggccacgactccaccgcctcctgctcgcgccaccacccctcggcccctcgcggcgccgcgcgaccggcgcgtggtgcgcgtttgcctgcccgtcgtcggccccttcttattagttattattaggcggaggagaggctagctctgcggggggtcgccgcgcgccgccgaatcggatcacacgcctccccttcccgccaggccagggggccatggccacgctcccgcgcgccgcgccgcccacgcccgccgcgctgctcccgctgccccgcgccgcgccgccgctgctgctcgccgggagggccgccgccgcgcgccgctctcggctgcgcgcgcggggcccgtccgcggcggcgcgccggagctgggtcgtcgcctccgccgcttcctcctcctcacgggccgtggtcggcggcgtcgcccgccgggaggcccctcccgcgccgcagaagcccacgcagcaggctgcggacttgaaccatatcttgtctgaacgtggagcttgtggtgttggatttgtcgcaaacttgaaaaatatgtcttcatttgacattgttcgtgatgctcttatggctcttgggtgcatggagcatcgtggtggttgtggagcggacagtgactcaggtgatggtgcaggactgatgagtgccgttccatgggacttgtttgatgactgggccagcaagcaagggcttgctctctttgacagaagaaatacaggtgtaggcatggtcttccttccacaagatgagaagtcaatggaagaagccaaagctgcaactgaaaaggtttttgtggatgaaggccttgaggttcttggttggagacccgttccttttaatgtatcagttgtaggtcgcaatgcaaaagaaaccatgcctaatatacaacaaatatttgtgaaagttgcaaaagaagataatgctgatgacatagagagagaattatacatcagccgaaagctgatagagcgggctgcaaaatcttttagttgggcagatgaactttatttctgctctttatcaagcagaacgattgtctacaagggaatgctacgatctgaggttcttgggcaattctatttagaccttcagaatgaactgtataaatcaccttttgccatatatcatcgaagattcagtacaaatacaagtcctcgatggcctcttgctcaacctatgaggttacttggacacaacggagaaattaacacaatacaggggaacttgaactggatgcgatcaagggaaaccacactaaagtctcctgtatggcgaggtcgtgagcatgaaatttgcccgtttggtgaccctaaagcatctgattcagcgaatcttgacagtacagctgaattgctgctaagaagtggtaggagtcctgcagaagctcttatgattctcgtccctgaggcatataagaaccatccaacattatctataaaataccccgaggtaactgacttttatgactactacaaaggacaaatggaagcttgggatggacctgctttacttctatttagtgatgggaggactgtaggagcaactcttgataggaatggtctccgtccagcacgctattggagaacgtcagatgacttcgtttatgtcgcatctgaagttggtgttataccaatggatgagtcaaaagtagtaatgaaaggacgattaggtcctggaatgatgataactgttgatctacagactggacaggtgcttgaaaacacagaagtaaagaaaactgtggcttcagcgagcccctatgggacttggttgcaagaatgcacacgtttgataaagcctgtcaacttcctctcttcaactatcatggacaatgagactgttttgagacatcaacaggcatttggctattcaagtgaagatgtgcaaatggtgattgaatcaatggcttcacaaggaaaggaaccaacattttgtatgggcgatgacattccattagctgtattatcacaaagaccacatttgttatatgattatttcaagcagcggtttgcgcaggttacaaatcctgcaattgatccccttagagaaggtttagttatgtctcttgaggttaatattgggaaaagaggcaacatcttggaggttggccctgaaaatgctgatcaggttgcactatcaagccctgtgctgaatgaaggtgaactggaaactctattgaacgactcaaaacttaagcccaaagtactgtcaacatacttcgatattcgtaaaggtctagatggttcacttgataagacaattcaggctctttgtgaagaagctgatgctgctgtgcggagtggctctcaacttcttgttctttctgatcgttctgaagcacctgaacctactcgtcctgccataccaatacttctagctgttggcgccatccaccagcatttgattcagaatggtctccgtatgtctgcttctattgttgctgatactgctcagtgttttagcacacatcattttgcctgtctgatcggatatggtgccagtgctgtgtgtccttatctggcactagaaacatgccggcaatggaggctgagcaacaaaactcttaatttgatgcggaatgggaagatgcccacagtgaccatcgagcaggcacaaaggaactttatcaaggcagtaaaatcaggtctgctcaaaattctttcaaaaatgggtatctcactgctctcaagctattgtggagctcagatctttgaaatttatggtcttggtcaagaagttgttgatcttgccttctgtggaagtgtatcgaaaattggaggtctcacacttgatgagctgggtagggagaccttatcattctgggtgaaggcgttctctgaagatactgcaaagaggctagaaaactttggatttatccaatccagacctggaggtgaataccatgcaaataatcctgagatgtccaagctgttgcacaaagcaattcgcgagaaacgtgataatgcgtacactgtctaccaacaacatcttgcaagccgtcctgtcaatgttcttcgagatcttcttgaattgaaaagtgatcgtgcacctattcctattggcaaagtggagtctgcaacctccattgttgaacgtttttgtactggtggaatgtccctaggagccatttcaagggaaacgcatgaagctattgcaattgcaatgaatagaataggtgggaaatctaattcaggagaaggtggtgaggatccaatccgttggaatcccctcactgatgttgtagatggttattctccaacacttcctcatctcaagggtcttcagaatggtgacacagccacaagtgccattaagcaggttgcatctggacgttttggagttacaccgacattcttagtaaatgctgaccaaattgagataaagattgcgcaaggtgcaaagcctggtgaaggaggtcaacttcctgggaaaaaagtcagtgcatacattgctcgtctgaggaactccaaacctggagttcctctaatctccccgcctccacaccatgacatttattctatcgaggatcttgcacagttgatttatgacctccatcagataaatcctaaagctaaagtatctgtaaagcttgtgtctgaagctggaattggaactgtagcttctggagtttcaaaggcgaatgcagacataattcagatatcaggtcatgatggtggtactggagctagcccaatcagctccatcaaacatgctgggggtccgtgggaacttggtcttacagaaacaaatcagacacttatacaaaatggattgagagagagggtagtacttagggtggacggtggattcaggagtggtcaagatgttcttattgctgctgctatgggagctgatgaatatggctttggttctgtagccatgatagctactggatgtgtcatggcacggatttgtcacacaaataattgtccagttggagtggctagtcagagagaagagcttcgtgcaaggtttcctggtgttcctggtgatcttgttaactacttcctctttgttgccgaggaggttcgagctgcattagcccagttgggttatgagaagttggatgacatcattgggcgaacagatttgcttaaaccaaagcacatctcattggtgaaaacgcagcacattgatcttggatacctcctatcaaatgctggattgcctgaatggagcagctcccaaattaggagccaggacgtccacactaatggccctgttcttgatgagacaatccttgcagatcctgagatagctgatgctattgagaatgagaaggaagtttccaaggcatttcaaatctataatgttgacagagctgtctgtggtcgggtagcaggtgtgattgccaagaagtatggagacacaggttttgctggccagctcaacatcacgttcaatggaagtgcagggcagtcctttggttgtttcctgactcctggaatgaacattcggctagttggggaggccaatgattatgttggaaagggtatggctggtggagaactggtggtagttcctgtagacaaaacaggatttgttcctgaggatgctactatagttggaaacacttgtctgtatggagctacaggtggtcaggtatttgtgagaggcaaggcaggagaaagatttgctgttagaaactctctatgtcaggcagtggttgagggcaccggagatcattgctgtgagtacatgactggtggctgcgtagtcgtacttggcaaagctgggaggaatgttgcagctggaatgactggtggtcttgcctacattctagatgaggatgatacacttgtcccaaaggtcaacaaggaaatcgtcaaaatgcagagagtgaatgctccagctgggcagatgcagctaaagggcttgattgaggcctatgttgaaaaaacgggcagcgagaaaggtattgcgattttgagggaatgggaggcctatttgccgctcttctggcaactggtaccgcccagtgaagaagactcgcctgaggcttgtgcagagtttgagagagtacttgccaagcaagcaaccacccaattgtctgcgaagtgatcgaatcagactacaggaaggtggtaggtgttttctatttgacacaaagtgatctcatcttatcacttcaagaaaatcgaagaccataaccggcactctgaggcaccgaagtgcccgtctgaagactgcaactttgtggaggctctgcccaggccatctttttgagttgagctaacagaaccgagggttcttctcgacgctcgtgcacctaggtaacccctgtaaattggtttgctgacgctaggctgcaaggggcctgccctgtttgaactgctgtactgtacatgattcttggccgttgccctgtgtaattatgttttggttagctcgtaaatttatacgcatccaatggaggcatacaatgcaagtcgcaagcgcaatagtacggtgcatgataaactgtacggccaggttggattggaatgtttgcttcgtgaatgaacgaaaccggcgtcatgcctgtggtgtgaccgctcctctggttggcatcc

SEQ ID NO: 2093 - DNA, 1275 bp, Zea mays
  Clone ID: ZEAMA-23APR03-CLUSTER217_101
aaataaaaaaaaattgcccacgcccgactcttcttcactcgagccaaaccccctcaactcaactgctgaacgcagagttcgatctagcacgcgcagcggcggccgccgcccacaatggcgtcccttttcaaggacccgagcaagctctcagcgtacaaggaccgccgattcaagggcacacaggaggagtatgaggcaacgctgcatgcgtcgacaacgctgtacattgggaatatgtccttctacaccacggaggagcaggcctacgagctcttctcccgcgctggcgagatcaagaagatcatcatggggctcgacaagaactctaagaccccatgcggtttctgcttcgtactgtactactccagggaggatgctgaagatgctgtcaaatacatcagtggaacgatgcttgacgatcgtccaatccgtgttgatttcgattggggctttgaagaaggcaggcaatggggccgtggacgaagtggtggacaagtgagagatgagtaccgtacagattatgatcctggtagaggtggttacggtaagatggttcagagggaactagaagcacaaagagaactagttgactatggtggatctttccaaccaaatgcaccacctccctatgagagaggtgagcggaagagaggatacggggactctcataggaatgacagaggagattaccagcggaaacgctaccggagcagcgatgaccggtcagcaccagaggagtccaagagagcgcccgactctgatccagcggagaagaatcctagatttcgcgagaaaggtgactctgatgaagaagaggatgactacgacaagagacgtcgtcgctaaagctgtgtggaacagtcgttgctacatgcagctgttctggtgtccagtcgctgcagaagagtccacagcgagcagcagtatccggatttcgccctgctgtgcctgtactgttcctccttttcgggctagtttggagccacaaaactagagcagattggaggggccaaaatacacttcttattcaaaatttgaataataagtggatttttgtttctccaatcccttccggttttatggctcccaaactagtccatctagtgcgtcggttttacatgtggttcaagtggggtactgtgtgctaacagatacaacaacgaggcttgtctgtatgtctgctgacactagagaccaatgcatataatgattctaatttaggccccgtttgatgattctaatttaggctccgtttggtaaggcttcggtttcttt

SEQ ID NO: 2094 - DNA, 1624 bp, Zea mays
  Clone ID: ZEAMA-23APR03-CLUSTER217_86
aactagcacctccgcctcgcggctcgctccatcccttccaccaccaccgcctcaccagtcaccactcccctatcacgggacgggaccaccgccgccgcgtcctatgacgtcgccgtcctcgcaccacccggactccacctcggcgtcctctacccctcgcgccggtgtcgggaacggcggcatccaccacctccatccgccatctctgcacccggcgcccgcgcctaccccggctgctccccccgcgcaggcgcaggcggcgcacgggggcccgcaagtgcgcctcatgtgcagcttcggcggccgcatcttaccgcgccctggggaccgccagctgcgctacgtcggcggggagacccgcatcgtctccttcccgcgcgccgcaacttccttcgccgccctcgtcgccgcgctcgccaaggtcgcgcccgtgctcttcgccccgggggcgcccaggccgtcgctcaagtaccagctgccccaggacgacctcgactcgctcgtctccatcacctccgacgacgacgtcgaccacctcatggacgagcttgaccgcatccaagacctctccgccaacgtcgccaggccaccccgcctccgcgtcttcctcttcgcgcccgcgcctgacgccgccttcggctccgtcttctccggcaccaccagtgaggccgcctccaccgaccagtggtttgtcgacgcgctaaacgcccccgcgccgcagccgcaccccaccgagcgcggccgatccgaggcctcctcgatcgtctccgaggtccccgactacctcttcggcctcgaaaccacgtccggtgagcccagccccggccccgcggccgtccgcgccaagtccgatgccacggagactccgcgccaccacgacgacgacgaatgcgacgtgccaccttccgcgcgccagatgccgtacgttgtagagggagcgtcatcgtggcccgcccccgccgccgccgtacatggcgcagcctgtgtactacttccccgtgccgccgccggtccactatctcgaaccgtctgcgcagggcggctacatgcctcgcccggtctaccacattgtcgctggcggaggaagcgaggcgcctggcggagatcttcacgcggccggcggcgtctacggcgtcccgcaggcacatgcaggcgttcccggcgatgatgtacgcgccgccgcgcgcggtcgtctacaactacaactcggaggggatgccatcgctgcctcccgaaggtggggcacactcttcctaggcgcatcggctgcttcacatctctggttcctgattattattgcagatgcctgagttctgcgtgcgtattagatttttatcgattcgtcttggttggtgtatagatgactaagatgagggaggcggatgatggatagatattattgcagttttcgtctagtggaaatatattcgtgaaatggatctatgagcatgatataatactaagtagtatagtatttggtgtgattaatcagtaccgagttaatgtaatgttggattcatatattctaggtggctctggtcttcttcctctggaagccaattttgggtattttatatttacataaactggatgttgggtaaaaaaaaaaaaaaaaaggccccta

SEQ ID NO: 2095 - DNA, 1405 bp, Zea mays
  Clone ID: ZEAMA-23APR03-CLUSTER21819_3
tttttttttttttttagaatatacgctgctaagatcgaataaatgtatttagcaccttatatctctactaccatgttgtttggttcacgaaatgtaaagtaaataacaatgttaatgattcacactcgagtaccagccgtaacaagtgattttatgtctatttgtcgcatagaataaaaatatcagtaagagctaaacaatccgtagcttttcatgctgaaggtgatgattgttattaacttgtttaccgccgttactccgtctctcatgctaatggaacttttgactgcaaaaattccgaaccaggtggatcaacttgagggtaccgttccaggaagtgtacggggacgtccgctgcaacctgaaggaggcagtccagctggccgggctcacatgggaggggcgcgctcactgcgggctcgacgacgcccgcaacaccgctcgcctcctggcacttctgatgcaccggggcttcaagttctccatcaccaactcactggtgtggcaacctgccgccgctccgcagtcaaccgccgccacctgccacttctccccggaccgctctccggacccagtcgtcgtccagctccagcaccagcagcagcagcacaagccgaaggaggcgctggggtctcccgcgtcgctggtgaacccatcgtacgccacccccgcgggagggaaggacagagccatgtactgctactgcggggtgctgagccggtggagcgtcgtgcgcaagccgggacccatgcaggggcgctacttcttcgggtgcgggaactggaccgccacccggcgcgccatctgcccgtacttcgcatgggcctcgtgaatagcaaagcaagcagagatctgggctggtgctttaaccgagggaggcgcgccatgttgctgcggctggctgctgcgcctcccagttccgtatatattattgttgttattattatggtataataactttgctcgcgagacaaatggaggttctctaggtagtgtctctaacctgtcgtactgacttctgtcgatagaagagaatggggccagatgctgcttaggtgtgatctatcctatccatccatggataataaagaagtttgtggattgctgttttattaaaaaaaaaaaaaaaaaaaaaaaaaaaaaaaaaaaaaaaaaaaaaaaaaaaaaaaaaaaaaaaaaaaaaaaaaaaaaaaaaaaaaaaaaaaaaaaaaaaaaaaaaaaaaaaaaaaaaaaaaagggggggcgccttttaaaaaaaccaaattttacttccccgtttttccaaataaaaatttttttttaagggaccccaaaataaaataaatggccctgttttaaaaaacgtggaaatgggaaaaaccctgggttaaccaaaataaaagtttttgaaaaaaacccctttttc

SEQ ID NO: 2096 - DNA, 1637 bp, Zea mays
  Clone ID: ZEAMA-23APR03-CLUSTER218454_1
agaaaatcctggctcgtgcgatgcgacctcttggctctcgctaggttgtatgtgtgtgtgtgtttaaaagcctaatctaccgcaccagcggcctctagtgtctcctcctcctctatccctcgcaaagcaaacacacacgcgctttctcggtgccaccaccagcagcaccccgtctccgtcccggcccccgacgcccggcgggacatgaagaaagacgaggagggcgccaatgccaccgtcgccggcgacggcgacgcacgacgacgttccgcgctccccgtccgcctgctgccgctccggtgacggtgacccctacctagctctctccttcgtcctcgccttctgagtcgccgtccttcttgcctctatggagcgagctcgccgtcgccgttaccgtcgtcgtggtgcagaccagcggctcagcggattgaggggagccctggcggcggagaaggcgtcgtacgtgttctggtgatgggtgcggatttggcatgcgggaaagccaggcatcgtttttttttaatttcccccctcggtggtgattgttgctagctgttgctgcttttgttgtcagttttagcccccttttttcaccttctctcttctttttgaccccccctcccaactactttgtagttttgccaatcacggttctactaagaacatatcggttatcggagagcgaaatgttcgtgcggattctgctctttatctctctccctctctctatgtataaagctggctaccatgctttggcaacacgcgcgacttaactgcagctgtgcaatgctacagcctacagcagctcaattaactaactagtccaatacgaaataggagtacctttctctcatcattcttcttttttacatgatgcaagcaaacaatgtccttcggtgatgattattaccttctgaaaccatgaatcctgcctgccttttgtttgtttgtgtttcaactgtgtgtctaatagtgcaatgcagttactgtttactgcagctactgtgcatgtaaagcgtggcataataatgtaatccccggtagattttcagcgctaagcatttctcgtgcagataagatagagcagcagcagcccgcagctgatccttaccgctgcggctgtgtatcaattaggcctcgccggctgcactagccatgatgaatcccatggagaagagaggagaagagaagagaagctagccacaaaagggatgaggtgacagatgagggggagagccagacagacaacctaactggcgaaccctatgcagtcagatgcccctgcctctgaccaggcaaaaacttcagcggtccccaacgatgcagcaaaatggcattcagaggcagtagtgatcggcgaaaccagacgggccctctgcgtgctgtattttgtgtttcacacaggatgggcatagcttggttctatgattgagctgtcattggtgatatgggaagcagcgggttctaagaactactcgtgtactgcctgatattattgttgtttgttctgggatgtgctgcgggcgtgcctgataaatgggcgatggcatgcatacagttgttctcaatcttgtgaccttgttaagaaccacatgataatgcgcatgtatgtatgtactccaaaaaaaaaaaaaaaa

SEQ ID NO: 2097 - DNA, 1218 bp, Zea mays
  Clone ID: ZEAMA-23APR03-CLUSTER21924_3
gatcccctggtacgactcatcaatcccttcccttactttctctcctagatctagccgcttacttggttgttcatcctcctcataacttacgatgtgtaaatgcgtgctaagagctttctggtattgcaaaagggaaaggaaagtagacggtgtgtttacttatatagttctagatttgaaggggtgattgtttacaagatattctaaggcaggaaaaagtgggaggtatttgtcagtttatgactcgtaaaaaaaatgtcaggttatcactgagctcatctgcccttacaagatttttcaattttcaggacgattagcagttagcaccatgctaaactgttaataaacagctacacttacatgaactttagtctccattggtgcaaggtggttagattgtttcagctagactagacaaacatctcttttgccatgcactcatgcttttgggctgtaagacaagactgaaacttgcctaaccgtgattgaacaggagatggagcaaagagaaaagctagtgcgccggatgtgggatgtgtacacacgcacagataatcatgtacggctaccacggttctggcaagaagcatttgaggctgcatatgaggagcttgctggtgatgatacgcttactactgatgcagctatatctgagattgctcgcatgtcaatccataggcctgaggttgagcaatcgtcgaataaggattaggagatcagaggaacaggacagatatttggaagggtggaactggtacgctgaaggtgaagaacgttaaaaatggtgccgtcccatctaaagacggagttgcaaagtctgacccttagcgccgcagcaatttaaggagatgtttggtttgaataatcaatctattttagatgaggtgatgtatcataagttcattccacaaatttggtagaataaatttattcctcatattatgactaattattaacctatgaggaataaaattatggtggatcaaaaaaaaaaaaaaaaaaaaaaaaaaaaaaaaaaaaaaaaaaaaaaaaaaccagcccggccgggcggataaaaagggggaaaaaacaccacactaacgaaaagatgttcctccccccggggcgcccccctcaaagggggaatttctcaccccccggggggcggtttttttggggaaaccgcactccgcccccaatttggggaaaaataggagaaaaatgtttcctggggaaaaa

SEQ ID NO: 2098 - DNA, 1815 bp, Zea mays
  Clone ID: ZEAMA-23APR03-CLUSTER21935_2
atttccgtccatttcccaggttctaaccggttcctcaaaccctaaaacctccaaaccccagcaatggcggattccccttcgttccgtcgctacccgctcgcctcctccgtcgacctcgtccgctggctcccttcctcctccatctccccttccggtcgcctcctcgccgccgccgtccacgatcccacctccggctccttcgcctccagcatccgccttctccccctctccgaccctgtctcccggctcgcctccgtcccgctcccgtcccgcgccacggcactccgctgctcccatgctgcgctcgccgctgccacctcctcgggctcgctccacttcgttccctcctcattcgactcggacgccgcagtgtccgtccccggcggcgcgggcttccatgtcggtcctgtccggggcctcgactgcggcggggaggagtgggtcacagcgggagaagacggaagagtgcatgtggtcggcggtgtagctgacgggagagtggtaacgaggaggatgtgggacgggaaaggaatgtcagggtatgaagctgccagatgggcttcgccggtggagtttgccacgggtggagccggatgtggtgttcagtggtgggatcggaggaaaggggacgccatcgtggcgcagtgtaacggcatctggggccgtggcatagttactggcatggtgcattccattgacattcatccatcaagaaagcatatctgcgtggtgggaggttcatcggggaccgtatttgcctgggatctgcggcagccacaggagctgataccaatctctgttctaggtcttaatgaaacagctgagcctgtgtgtgaaagtgaggtttgggaggttcttttcgacacttacactaagtcttccgatatcatctcatctgcatctgcaagaatattgccagtgatgatgtgttcagaggatgggatccttgcagttgtcgaacaagataagagaccccttgaattgcttgctgaatcttgtgccatcaactccttcgacatagatcctcagaacccctctgtaagtccttggcttcacctggtcaaatgaacagtttttcttatttgtagataatgttactactgttatcgatttgtgcaggatgttgtttgcgcattagaatgggaatcggtcggtgtcctaactcgtggtagagatgcaatgtcagaagaatgaaaattttcatcacccagggatctcaatcagatttttttccaaggtggatgaaactgctatcagaaagaatcttctgaattctgagggcttccatattcagtcaccattctaatgcccgtgaccatgggcaacggtagaaggaataaagcgtgcatgacgaatgccttttcctgtctttgcatactaaccaacactgtcttgtaccgttggaagttttactctgttgtcatgggtagttgcagattgcagaaaccttttctgggctagcttcaagatgtgtaattgctcttggatgccaactgctgacagtttgaaggagtggtcacaaacaattcaatccttttagctgggggctgatgaactgaagctataattagtttcataatgtttgcttgtggtattaaattggctcctgaacaatatggactccgatacatattttatttatctggcttaccatttagattccattagatttttaactctagagtctagactaccttaacttgtttgagacaagttgggataaaaggttttgttattaatatgtttttttataacctcagataaagatggtttttatatgaaaattgtaacctttgatgacatttccaactttat

SEQ ID NO: 2099 - DNA, 2994 bp, Zea mays
  Clone ID: ZEAMA-23APR03-CLUSTER219428_1
gcacgagaccattacctagaacatcctaatcgaaaaatcgattcaccctccccgcccctcccggttttcttcctcccggaccccgccccggcggccgccgattttggggaagcccggccgtttcgcctcccgaaaacccggtaggacacgcgaatccaattgtgccgttcctgacgctgacgcccggcggtgatggctgatgcagcagcgttcgtgctcttgcctgatggagagggacgcggttctggaggacgcggcggcgggggacggggaggagcaggaccaggaccaggaccaggaagagttggtggtgccgatcggagcgcagaagcacgatccggcgtggaagcactgcgtcatggtgcgctccgacggccggatgcgcctgaagtgcgcctactgcggcaagcactttctcggcggtggtatccaccgcttcaaggagcacctggcccgccgccccgggaacgcctgctgctgccccagtgtgccccgcgacgtccaggacaccatgctccgcagcctcgccgccgtcgctgccaagaagatgcagcgcaagctcgccgccgccagcacgacgcccgcctctgtctctacggctagcgggggtaccggcagccccatccacatgatctcgctcaacgaggtgctcgacttcgaggccgtgccgctcgaggagcagaggcctccggttccggagggcagcattagggggagtaccagcggtaagaagaagaggaagcaggtgacctacgcccctgctccgccacttataccccagatccggccgcagcatgttcggtctacccctcagaacaatcttcttcacgggctgcagcatgttccgcctactcctcagaccaaccctcttcatcaggttgtcatggcagtgaacgcagtgacaccagcagagcatttcgaacatgctgccccctcggagaaggagcatgtttccgtggcagttgggaggttcttgtatgacgccggtgtgccattggaagcggtgaactcggtctacttccaaccgatgctcgaggccattgcggcggcaggggggaggcctgagacgctctcgtaccatgactttcgcggtcacattcttaagaggtcactcgacgacgtgacggctcgcttggagttcttcagggggtcatggaccaggacgggctgctcggtgttggctgacgagtggatcactgataaaggcagaaccttgataaacttctccgtgtattgcccggaaggtactatgttcctcaagtcggtggatgcaaccagcatcgtcacatcttcagatgcactgtacgagctactaaaaagtgcagtccaggaaattggcgagaaaaaagttgtccaggttatcacaaacaattctgagatccatgcagctgcaggaaaaaagctaggtgaaacattccccacattgttctggtctccatgcactttccagtgtgttgatggcatgctcgaagatttcagtaaagtggacgcaattagtgagataataagtaatgcaaaggccatcacgggatttgtctacaacagcgcatatgcgttgaatctgatgaagaagtatctgcaagggaaggatctgctggttcctgcggagactcgtgctgctatgaactttgtgacgttgaagaatatgtacagtttgagggaggctttgcaagctatggtcaactcggatgaatggatagacttgctgccaaagaaaggagggattgaagcagcaatcttgttaataatttgcagttttggaactcttgtgctgccgttgttcacatcactgagcaacttgtgcaccttcttaagctagtcggtaaccccaagaggccttctatgggttatgtatatgctggactgtacaaggcaaaagcagcaatcaagaaagagctggtgagtaagaatgattacatggtttactggaatattatcgactggaggtgggacaaccagacaccacagccacttcattcagctggtttcttcctgaaccctctatttttttatggaattcgaggtgacatatcaaatggaatattctcaggaatgctagactgcatagaaaggctggtacctgatgtgaaaatccaagataaagtacagcgagagctccacatataccggagtgaaacagcagtggattttcgtaggcagatggctgtccgatctagacgaactttacctcctgctgaatggtggtatacatatggaggagcttgcccaaatttaacacgtctagcggtccgtattctcagtcaaacctgcagcgcaagaggatgtgaccggacgaacattcattttgaacaagttcatgatgaaagaatgaatagttttgagcgtcagcgaatgcatgacctcacctttgtacaatacaacctacggcttcagcaaagacaacaacgcaaggcgaaagcgtttgatcctctctctgtggactacatagacgtagtcgatgattgggctgtggatagacctgcaatgttctctggcccagctgagcagccaaactggatggagattaatcaatcgggcaaccgaatgacatcaagggaaccaactgaagatgaatttgaatccttcattgaaggagttgatgacgaaatgatccaaggtgctgcacagggcttccatgaagatggcgatgatcctgcttgtggctgaggctatatagattgacagccagttaacctgtaagctaatgttgcatggctaaaatctggggttgcctgctgtattttttcgaaacagggccatcttattgtgtatcttatacttggtgtctatttgtactagttgtagagatattttagtgtccagatatcttcccgagtccatcgttggtctacgacacacatttttgtcacaataaagtttgaggtttcagttcccgggacattttcagagatattttagggggtgtttggtttacgtatcactccatccaaaatgagatggtgcatcataaatctatttctcaaatttggtggc

SEQ ID NO: 2100 - DNA, 1669 bp, Zea mays
  Clone ID: ZEAMA-23APR03-CLUSTER2196_2
aggcgatgagcgcctctcgcgacgccagggcggagagctagccggccggagcccacacgcagctggaagcaccagatcaccgatcgtgccggccgagcggcggcgcaggcgcacaggcgcttacatgggagtagaggcgggcgggtgcgggcggagggcggtcgtcaccgggttctacgtctggggctgggagttcctcaccgccctccttctcttctcggccgccgtcgccgccgcagactcctactagcaagctacctaccttctttctttcattcccttaggtagctcagccgtacacacaacagcacacaagtcatcagttactagctagttagtagcctatacaacacatacatatatacatacaaaggtgagtgaggttcgcgtgcaagcagagccaatcgtgccgatcgagctatatacatagccggcggcgagagatgggagaagcggcctcggccgtggcggcgtcgaagaggggcggcggcgggccggcgccgttcctgaccaagacgcaccagatggtggaggagcggggcacggacgaggtgatctcgtgggcggagcagggccgctccttcgtggtgtggaagcccgttgagctggcgcgcgacctcctcccgctccacttcaagcactgcaacttctcctccttcgtccgccagctcaacacctacggtttccggaaggtggtgccggaccggtgggagttcgcgaacgacaacttccgtcgaggcgagcagggtctcctgtccggcatccgccgccgcaagtcaacggcgctgcagatgtccaagtccggatccggcggcagcggcggcgtgaacgccacgttccccccgcctctgccccctccacctcccgcgtcggccaccacgtccggcgtccacgagcgcagctcgtcgtcggcgtcgtcgccaccgcgggcgcccgacctggccagcgagaacgagcagctcaagaaggacaaccacacgctgtccgtcgagctggcgcaggcgcgccggcactgcgaggagctcctgggcttcctctcgcgcttcctcgacgtccggcagctcgacctccggctgctcatgcaggaggacgtgcgagcgggggcaagcgacgacggcgcacagcgccgcgcgcacgcagtggccagccagctggagcgcggcggcggcgaggaggggaagagcgtgaagctgttcggcgtactcttaaaggacgccgcgaggaagaggggccggtgcgaggaagcggcggccagcgagcggcccatcaagatgatcagggtcggcgagccgtgggtcggcgtcccgtcgtcgggcccgggccggtgcggcggcgagaattaactgtcatccaatgtgaggttgatgacaaggacagtttcatccatcatatcgagcaagtaacaaagccagtgctgtggtaaaactgcaaagacagaacacaggacacaggagaaatataggcgtaaggcatgttaattaagaattaattatatatgggatgcttttgaagtagcaagattggaagtagagataagtaaaacgggctagaagcagcgcccatgtgttcagaatggaaaattagcgtttccgtgtgtgtgttaagaaaaacttatatgcgctttctgcgagcacggttgattcttaagagcgacagcaaatgaaaggtg

SEQ ID NO: 2101 - DNA, 1551 bp, Zea mays
  Clone ID: ZEAMA-23APR03-CLUSTER21978_2
gtacgcaggcaggacgcgacgcagcgccgaagcaccaaggatggagcccgagattcagagcctgtgtccgagtacgacggccgtgctcctcctgctggccgcctgtctcgccgccgcggtggcagcgctcgacgctgcggactacgccaggccgccgctgcctgcaggcggaggcggccggcgcgtcctgttcgccaacgggctcgggctgacgccgcagatggggtggaacagctggaaccatttccagtgcgacatcaacgaggcggtcgtccggagcaccgctgatgcgctcgtcgccaccggacttgcaaaggctggctacacgtatgtcaacttagatgactgctgggcggattccgagagaaccaaagaggtagcacgagtgctgctacgtgaccttgtcggatacatggtcgctaaccccaagacattcccatccggaatcaaggccctgggcagattacgttcacagcaaggggcttaagcttggcatctactcttccgctgggacaagaacttgcagcaacaggatgcctggatctctgggctacgaggagagggatgctaagatgtttgcgtcatggggcgttgactacctgaagtatgacaactgctacagagacggcacgcctgaaaccgtgaggtttgggcgcatgtcccgagcgctggtgaactctggccgcccaatcttctactcgctttgcgaatggggattcatggaagttcccaaatggggcggcatgtacggcaacagctggaggaccaccggcgacatcaacgacacatggtcaggcatgctggacaacatcgacctgaacgacgcctacgcccggtacgccaagcccggcggctggaacgaccctgacatgctggaggtcgggaacggaggcatggcgtacaacgagtacgtcgtgcacttcagcctctgggccatcgccaaggctcccctggtcatcggctgcgacgtgacgagagtctccaatgagacgctgggaatcctctccaacgcggaggtcatcgcgatcagccaagatcggctgggtgtccaaggacagaaagtgagcaagtacggcaacgatctcgaggtatgggcagggcagctctcggggcacaggaaggcggtgttgctgctcaaccggggggccacgcgctccgcgtccatcaccgcggcatggccggacgtgggcatccgccgcggcgtcgccgtgcaggcgagggacgtctggaagcacgagacgctaccgggctggttcaccggcagcctcacggcggtggtcgggccgcactcgtgcaagctcttcgtcctcacgcccgttcctagctgacggcgccgctggagatctgtccatccaatatctgcccgtggatccagctagagttattaattgtatgatttcagatactgtaactgccttgtgactgctccgacaacaagagctcaccaccatctgtctaatgatttgacatggtgcaacgctcagtttggcttagatttgagatccgaacgtggtgaataaaataataaaatgacgtctcctgacttctttc

SEQ ID NO: 2102 - DNA, 2407 bp, Zea mays
  Clone ID: ZEAMA-23APR03-CLUSTER22014_2
ttttttttttttttttgatgaatcgtcttattatattatacaaaacaaatagaaaaaattaaaaacgagaacataatagactaacttatttcttaaacgagaaaatatataatgactactccgtatagcattaattaatatactcctcgcaaaacgatatagaagttgtagtacggactttggctggccacccacctcccgtcccgtcttgaaccatccacacgaacacaacacgcctctcctctactagacttgttttttccgtccatccatccatacgttatacatttcgtttgttccacctgcgcaactgcgacggggataattacgtcttccagatgacgacggcggcatggccgcggccacgcctcctcctcctcctcccccagcctggattcctccgctcggtctgccacggtctctgcgcccgctgtctcttctgcttcctgctgctcctcgccttcgcctgcagctccagctccggacgggtggtggtcaccagcttgcctggcttcgacggcgacctccccttccacctcgaaacagggtgcgcgtgcccgcgtggcgtgtctactagtagtatcctccttcttcttcattcattcatcctggtggtgtactactagactactactagtagctcacgcgcgcggcacatgtagatgtagcctctaaccaccgttgctgccctgaaactgaaaactaaggtacgtggaggtggaggaggacgccggcgtggagctcttctactacttcgtccaggccgagtccggcgccgccgccgccgccgatgacacccctttcctcttctggctcaccggcggcgaccgctgctccgtcttcagcggcctcgcctacgagatcggtacgccaagtatttggatcccatcagattcgtcctggaaccctacaacggcaccctgccgcgcctgcgatacaaccacaactcgtggtcaaaggtgtcacatatcctcttcgtcgattcaccggttggagctggattttccttctcgagagatcccaaaggctacgatgtcggagacatctcggcctcactgcagctacaggaattcctcatcaagtggttcagtgatcatcccgagtacctcgcgaatcctttctacattggcggggactcctatgtcggaaaaatcgtgccgttcctcaggcagatgatttcagaaggtattgaacttggaagaagacccttccctaacctcaaggtatgtccatcatacatttctctccggaatggaagatgctatatcgacgtgggatactagctagtctatatccaagaaattaattgtagtcggtcacttaggctgatgatatgcaggttctgaatttgtcatgatcagggctatctggtgggtaacccaatcacgggcgaaagtatagatttcacttccagagtgccctacgctcatggagtcggtatcatatcagatcaattgtatgagacgatattggggcattgccaaggagaggactacactagtcctgcaaacgctctgtgtgctcaggctctggacactttcaacaatctcatcaacgaagtccagaacgcccagatcttactggacacgtgcgtctacgcgtctcctgcgccaaacgttctcagcagaccggtggacggtggtagaaggatcctgagggcggcggggatgggaggaggggcgacgctgaaccatccgccagctcgtcctcggtttggctgcatcacctacggctactacctgtcgtatttctgggcgaacgatgaacgcactcgaacagctcttgggatcaagaagggaacagtggacgagtgggtgaggtgtcacgacgcagacctgccgtacacgatcgacctcaagagcgccatcaagtaccaccggaacctgacgtccagaggctaccgcgccctggtgtacagcggcgaccatgacctgctggtgccacacctgggcacccaggcatgggtcaggtccctcaacttccccgtcgtcgacgactggagggcgtggcatctcggtggccaagccgccgggttcacgataaattactcaaacaacatgacgtttgcgacgatcaaaggtggcgggcacacggcgccggagtacgagccggagaggtgtttcgccatgttcagccgctggatactcgaccgtccactctaatctccactcgtacattgccggattcttgcaccatgaccatgattgatggactgtgtggattgcagttcataggtggaataaaatggatgatttctgtgaatggataggtctgccaactaggcaactttgtgtaaattaactaggtctgtgtcagcgcgctttaacgtaatatatgcggggataaatcgtgcaaatccagccaccaagattttaggaaaaaaaaaaaaaaaaaggaccctagggcc

SEQ ID NO: 2103 - DNA, 2075 bp, Zea mays
  unsure (1)..(2075): unsure at all n locations
  Clone ID: ZEAMA-23APR03-CLUSTER22014_7
gttttttccgttcatccatccatacgtttcgtttgttccacctgcgcaactgcgacggggataagtacgtcttccagatgacgacggcggcatggccgcggccacgcttcctcgtcctcccccagcctggattcctccgctcggtctgccacggcctctgcgcccgctgtctcttctgcttcctgctgctcctcgccttcgcctgcagctccagctccggacgggtggtggtcaccagcttgcctggcttcgacggcgacctccccttccacctcgaaacagggtgcgcgtgcccgcgtggcgtgtctactagtagtatcctccttcttcttcttcattcattcatcctggtggtgtactactagactactactagtagctcacccgcgcggcacatgtagatgtagcctctaaccaccgttgctgccctgaaactcaaaacgaaggtacgtggaggtggaggaggacgccggcgtggagctcttctactacttcgtccaggccgagtccggcgccgccgccgccgccgatgacacccctttcctcttctggctcaccggcggcgaccgctgctccgtcttcagcggcctcgcctacgagatcggtcccatcagattcgtcctggaaccctacaacggcaccctgccgcgcctgcgatacaaccacaactcgtggtcaaaggtgtcacatatcctcttcgtcgattcaccggttggagctggattttccttctcgagagatcccaaaggctacgatgtcggagacatctcggcctcactgcagctacaggaattcctcatcaagtggttcagtgatcatcccgagtacctcgcgaatcctttctacattggcggggactcctatgtcggaaaaatcgtgccgttcctcaggcagatgatttcagaaggtattgaacttggaagaagacccttccctaacctcaaggtatgtccatcatacatttctctccggaatggaagatgctatatcgacgtgggatactagctagtctatatccaagaaattaattgtagtcggtcacttaggctgatgatatgcaggttctgaatttgtcatgatcnnggctatctggtgggtaacccaatcacgggcgaaagtatagatttcacttccagagtgccctacgctcatggagtcggtatcatatcagatcaattgtatgagacgatattggggcattgccaaggagaggactacactagtcctgcaaacgctctgtgtgctcaggctctggacactttcaacaatctcatcaacgaagtccagaacgcccagatcttactggacacgtgcgtctacgcgtctcctgcgccaaacgttctcagcagaccggtggacggtggtagaaggatcctgagggcggcggggatgggaggaggggcgacgctgaaccatccgccagctcgtcctcggtttggctgcatcacctacggctactacctgtcgtatttctgggcgaacgatgaacgcactcgaacagctcttgggatcaagaagggaacagtggacgagtgggtgaggtgtcacgacgcagacctgccgtacacgatcgacctcaagagcgccatcaagtaccaccggaacctgacgtccagaggctaccgcgccctggtgtacagcggcgaccatgacctgctggtgccacacctgggcacccaggcatgggtcaggtccctcaacttccccgtcgtcgacgactggagggcgtggcatctcggtggccaagccgccgggttcacgataaattactcaaacaacatgacgttcgcgacgatcaaaggtggcgggcacacggcgccggagtacgagccggagaggtgtttcgccatgttcagccgctggatactcgaccgtccactctaatctccactcgtacattgccggattcttgcaccatgaccatgattgatggactgtgtggattgcagttcataggtggaataaaatggatgatttctgtgaatggataggtctgccaactaggcaactttgtgtaaattaactaggtctgtgtcagcgcgctttaacgtaatatatgcggggataaatcgtgc

SEQ ID NO: 2104 - DNA, 1012 bp, Zea mays
  unsure (1)..(1012): unsure at all n locations
  Clone ID: ZEAMA-23APR03-CLUSTER22037_2
gaatgcccagcccgtgtccttgcaccgtcgttgccgcggtcgtgtaagagatgttcaattcttggtcatggccgccgccgggaggaggtagccgcgaggcgacggttgcggcggcgctagctcgggaaccccgacgctttttcgcgggtgcggccgtacgggagagagcgcatccttgccgttggaggccggagaagttttttgaagtggagatgaaggtgcgcgactatgaaattgactagtatggtgttgtcaacaatgcaatctatgctagctactgccaacatggtcgtcacgagctgcttgagagcgtaggcatcagtgcagatgcagtggcgcgcaggtggggaatccctggctctctctgagttgaacctcaagtactttgcccctttgaggagtggcgannagtttgtttgttnaggtgaggcttgcaggcatcaaaggtgtacggatgatattcgaccacatcattacaaaactgcctaatcatgagctaattctggaggcaaaggcaacggctgtttgcctgaacaaagactactatcctacccgtattcctcgtgaactattgtccaagatgcagctcttcttacccgtggacagcagagggtcaaatgaagacgttaataatcggaataacagctgcaactaattctggaggcaaagacaagggctgtttgttcgaactgaagactaccatctcatctccaaaactgtttatgtcatccaagctgcagctcctcatcgaagaatatagtagaatccctccgttcttttttatttgtcgtggtttagttcaaaaatgaactagcggacaataaatattcgagaacggatgtagtagaatctagtcttggagactggcggctgcttggtcctgcagtgccaacgaaaaccacctatgtatctccatctcaggagctctgtcatagaagagcacagtccatcttcattctttgtaactgttcacccgaaacatttgatccgttactgcagtcgtttggtacag

SEQ ID NO: 2105 - DNA, 1001 bp, Zea mays
  Clone ID: ZEAMA-23APR03-CLUSTER22040_2
gaaaaacatctcacgccacgcctgctgcagcacctcgctctccgctccgttggccccatggagtccgtcgcgtccgccgcgatcgccaccacctcccgctctctcccgctccccttctcttctaccccggtccaccgccggcgccgtgccgccttcctccccgttgccgcctccaagcgtcacgacgacgacaaggaggccgcgaaagggtccggctcggaaccacggcgcgagcctaccagcctcgcgccgtacggactctccatctcgccactctccaaggacgcggccatggggctggtggtgaggcgctgccacggggagcggctggacgacgggatcggggatggagagcccgccgacggcgagcaaagccggtggggctggcaggccggaggtgtcgacgctgccttggtccctcttcacgaaatcaccgcggcggcgcatgcgggtggccttcacctgcaacgtgtgcgggcagcgtacgaccagggccatcaatcctcatgcctacaccgatggaactgtgtttgttcagtgctgcggttgcaacgtgttccataagttggtcgacaacctgaacctgtttcatgagatgaagtgctatgttggcccagatttccgctacgaaggggatgctccattcaactaccttgacagaaacgaggatggcgacagtatcttccctcgctaaagcctaaagcctcccttatgttgcagacttgcagtacccaaaaaaatgatcggtcctgttctaatttgttcgtgtagctgtacttaataagcagatgtaccttcatgaacctgtaagactagtttatcatacgcatagatgaccagtcactagaatctacactggagttgtaatgtcggtgaccagttagtgtaattttctattgcctgtctgcttttgggcatataataaaaaagacctgcatttcgtcatttgtttccccaaaaaaaaaaaaaaaaaaaaaactcgaggaagggccgcggtaccc

SEQ ID NO: 2106 - DNA, 1714 bp, Zea mays
  Clone ID: ZEAMA-23APR03-CLUSTER22059_1
aaggatttcccttacttttatgattgaacagctcgtgacttcactatcacttggtgcttcttgtgtgcatgtttctttgtaaaatagatagcttatattctctacatatttggtggaggaattaccttttcggcgtgtttgtgactttgttctctggtcatggctctggccttctaggcatgcaaacgagttttacagataccacgtagcaggcagtgtcctggcctcctggcctcctggccctgggtcaacgccgtctaacatcaacgcccgtcgcacctttgcttctctccctgaaagtgcctcctctaaggggagagagagtactatgagaaacaatttgccacattgaggtcctttgaggaagttgactcactagaagaatccaatgaaatcaacgaggatgaggagcttgcggagcaaatccagagtgaatttgctatgaagatatcaaattatgcaaacattgttctcttagcgttgaaggtatacgctacaataaaaagtggatcaattgctatagctgcctcaacactggattcactgcttgatctcatggctggtggtatcctttggttcacacatctgtcaatgaagagcatcaatgtctacaagtaccccattggcaaactgagggtacagcctgtaggcattatcatcttcgctgctgtcatggccactttaggcttccaagtatttattcaggctgttgaaaagctggtagtgaatgaggctccagataaactgaaccaagtgcaattattgtggctatattcaatcatgatctttgcaacaatagtgaaattaggtctgtggctctactgccgaacgtctggtaacaagattgtccgtgcttatgctaaggatcactatttcgatgttgtcacaaatgttgtgggtttggctgctgctgtccttggtgatagattctactggtggattgacccaattggtgcaattgttcttgcagtgtacacgatttcaaactggtctggaacagtgtgggaaaatgcagtatcgctggtaggtgaatcagctcctccagaaatgcttcagaagttgacatatctggctatcagacaccatcctcagattaagcgtgttgacaccgttcgagcatacacctttggggtgctttactttgttgaggttgacattgagcttccagaggacttgccacttaaggaggcacacgccattggagaatctctccaaatcaagattgaggagctacctgaagttgagcgagcattcgttcacctagatttcgaatgtgaccataagccggagcattcaattctcaacaagcttcccagcagccagccttgatccgaacgaatcctgtgtggtagattgtcgtgcagaatctgctgcagttcttgcattggcgtcttgtgctgtatgacaaaactaagagttcaattagttttgtggcggtgagtttaagatcaggcgcatctaagactacgagagatgaaggtgccgaatgcagagatttctcgagtgtggaaccctttgtggttctgttggtatggtcttcgttttgagcgaaattaagcattttgctgttggcatcaaaaaaaaaaaaaaaaaaaaaaaatgtgattggaggcgaagccgtgtgctatcgactacggtgatgtttagacatggtttcgagaaagagagtagatccttgatttctttaagcaaaaaaaaaaaaaaaaaagcggcc

SEQ ID NO: 2107 - DNA, 1919 bp, Zea mays
  Clone ID: ZEAMA-23APR03-CLUSTER22081_2
gtaaaggaaggcgaggcaatacacccaccgagagagaagaactaagctttggacacggaagatcgcaagagcctcaaccacactattcaggtggcctaggactctacgagggacgttcgtcgtgcctcggatgagatgggcggcggaggaggaggaggaggcgggaagtccgagaaggcgcggcgttcgtcggcgcgggtgaggctgtgggtcgcgcgcgccagcaccgtgctgctctggacgtgcctcgtccagctcgcggcctaccgggagctctgggcgcccagcgtgctctccaggtggcctggctgcctcaaccagccgcacgtcgcgcggaggccatcggagcgtgtggcggacgccggccagacgcaggcagcgcgcgcgttggtggtgctcccacccaaaagaatctacaggaacaacggctatctaatggtctcctgcaacggcgggcttaaccagatgcgagcagcaatttgtgatatggtaaccatcgcaaggtatcttaacgttactctcatagtaccagagttggataaggcttcattttgggctgatcccagcgatttccaagacatatttgacgtggactacttcatagcgtcgctgagagacgaggtccggatcctgaggcagctgccgccgaggctcaagagaagagtggagatgggatccctccggtccctgccaccagtcagctggtccgacatcggctactaccgccgtcagattctgcctctggtaaagaagtacaaggtcgttcacctgaacaggacggatgcccggctcgcgaacaacggcctacccgtggagatgcagagactgcggtgtccgtcaactacaatgccctgaggtttacccctgaaatcgaggatctgggcagacgcctggttcgagctcttcgccggaacgggccctttgtggtccttcacttgcggtatgagatggacatgcttgccttctccggatgcacgcacggttgcagcagcatggaggctcaagagctcacgaagatgagatatgcctacccatggtggaaggagaaagtgatcgactcggacgccaagaggaaagacgggctgtgtccgttaacgccggaggagaccgcgctggtgctgcaggcgctcggcattgaccgcggctaccagatctacattgccgcaggcgaaatttacggtgggcagagaagaatggctgcgctcacctcggcttatcccaacgtggttagaaaggagacgctgttgccttgggaagtcggcctcttccagaaccactcctcccagatggctgcgctggactacatggtgtccctggagagcgatgtcttcatacccacctacgacggcaacatggccaaggtcgtagaaggccatcgcaggtacctggggtttaggaagacggtgctgctggaccggaggcgtatcgtcgagctcgtcgacgagtacaggaacgggacgttgagctggaccgacttctcgtctgccgtcatggcgtcgcacaccagccgcatgggcgaaccgtccaggaggcagacggttcctgacagacccaaggaagaggactacttctacgcgaacccgcacgagtgcctgcaccagccggaagatgtctcggccttgtgatactgatacagtggatgatgcgcgggctttcggaatccagaaccacatgtatatgttaatagcgcattcgacaccgttgcgttggcagaggattaaacgtaaacggacgaggagggcctcgtttggtccggccggttgaacgggcatgtgagttaggtttcggtacagattcatggaacggtggttcgccgattcttttttctgttcagaagaataagcagaccctttcgttgcaaaaaaaaaaaaaaaaaaaaaaaaaaaaaaaaaaaaaaaccgagtgggggaacccggtac

SEQ ID NO: 2108 - DNA, 3355 bp, Zea mays
  Clone ID: ZEAMA-23APR03-CLUSTER22165_1
tccgcacccaaagctgacacaccaaaaggtgcgccgcgggtgatgccagctcaggctcacaacacgagcaatctcgcgttgatctccagtgatgaaaggggcacgaggctgctggaccagttcgaggacacgctggtgcgcgtcctcgtcgccgccgccgccgtctccttcctcctcgcgctctcctccagcgccggcacactcacgctcgccgccttcgtcgagccgctcgtcatcttcctcatcctcgtcgtcaacgccgccgtcggggtctggcaggaggccaacgcggagcggcgcgtggacgcgctgcgggagatccagtcccaccacgccgccgtcctgcgcgacgcccgatgcgtcccccgcgctccactggcccgggacctcgtcccgggcgacgtcgtccagctccgcgtcggggcaaaggtgcccgccgacatgcgcgtgccagcctcgcgtgcacctcctagctccgcctcgagcagggcttcgctcacgggggagacggcctccgtcaacaagacctcccgcgcgctcccgctcgaggacgccgacatccaggccaaggactgcatggtcttcgccggcaccaccgtcgtcaacggcgccgcgctctgcatcgtcgcgcgcaccgggatggacacggagatcggcgccatccacgcccagatccaccaggcctcgcaggaggacgacgacacgccgctcaagaagaagctcaacgagttcggggaggcgctcaccaagatcatcggcctcatctgcgccctcgtctggctcatcaactgcaagtacttcctcaccttcgacctccagggaggatgggtgcccaggaacatcaccttctccttcgagaagtgcacctactactttgagatcgccgtcgcgctcgccgtcgccgccatacccgagggcctgcccgccgtcatcaccacctgcctcgcgctcgggaccaggaagatggctgccaagaatgcgctcgtcaggaagctgcctagcgtcgagaccctcggctgcaccaccgtcatctgctccgacaagaccggcacgctcacctccaacaagatgtccgtcgccaagctcgtggccgtcggcgattcctcgcaggaggttaggaccttcaaggtggacggtacgacttacgatccccgggacgggaaaattcacgactggcctgctgggagcattgacgccaaccttgagacgatcgccaaggtcgcagctgtgtgcaatgatgccaatgtggcacattcttcgcatcagtatgttgccactggaatgccgacagaggcagctcttaaggttttggttgagaaaatgggtctgcctggaggaaagaatggtctgtccttggatccgtctgagatactaggctgctgcgcatggtggaacaatgttgccaaaaggattgctaccctcgagtttgatcgcacaaggaaatcaatgggcgtcattgtgaaaacaagttcaggaagcaatgccctgctcgtgaagggagctgttgaaactttgcttgagcgaagtagccacattcagctgaaggatggttccgtggtgccattagatgagaaagcaaagagaactatcctggcaagcctccatgagatgtcgaccaatgctctgcgctgcctcggttttgcatacaaggaggcgctagcagaatttgcaacatatgatggcgagaaccatcctgctcataagctcttgctggatccggccaattatgcagctattgagactgacctaatatttgcgggtcttgtaggcctaagggacccaccccgggaagaggtctatgatgctattgaagattgcagagctgctggcatccgagttatggtgataacaggggacaacaaagaaaccgctgaggcaatatgccgtgaaatcggcgtgttttcacctgacgaggatatcaccttcaagagccttacagggaaggagttcatggcgctggaggacaagaagacgctgctacgcaggaaaggtggcctcctgttctctagggcggaacctaggcacaaacaagagattgtgaggttgctgaaggaagatggggaagttgtcgccatgactggagatggagtcaatgatgcccctgctttgaagctggctgacatcggtgtagctatgggcattactggaactgaggttgccaaagaggcgtctgacatggtgttggctgacgacaattttagcaccatagtttctgcagtcggtgaaggaagatcgatctacaacaacatgaaagctttcataagatacatgatttcgtcaaacattggtgaagtcgcttctatattcctaacttccgccctgggcattcctgagggtttgattcccgtccaacttctatgggtcaatctcgtcaccgacgggccccccgcaactgctctaggtttcaatccgcctgacaaggacatcatgaagaagccacctaggaggagcgacgactcactgatcactccctggatcttgttccgctacctggtgattggcctttacgttgggatggcgaccgttggcatcttcgtcatatggtacacacatgggtctttcatgggcattgacctgaccggagacggccacactctggtcacctactcgcagctttcgaactggggccagtgctcttcctgggacaacttcacggcctcgcctttcaccgccggagccagaacgttcgcgttcgacgacgacccgtgcgactacttccacgcaggcaaggtgaaggcgacgacgctgtccctgtccgtgctggtggccatcgagatgttcaactcgctgaacgccctctccgaggacagcagcctgttggccatgccgccctgggtcaacccgtggctgctcgtcgccatgtcggtctcgttcggcctccacttcctcatcctctacgtgccgctgctcgccacggtgttcggcatcgtcccgctcagcctcaacgagtggctgctggtcctgctggtggctctcccggtggtgctcatcgacgaggctctcaagctcgcgggcaggtgtacgagcccttcttcgggccccaccaggcggtccaggaagaagaagcagaagggcgagtagcgagcgggcgctaacatttgactccgtgctcagttactaaaccattccattaatcatgtaaacaaaagatgaacctcagtcagtcaatcaatcaatacaggagataacccattttcactgtttctctttctactctctctccaccctaacgccaaaacaacagcagcacagtagcttctttgttctcagaacaagttgttaattagttggcaacatatgttatcctgtgaattatgtagcgttgagtcagatctttcttcataaaaaaataata

SEQ ID NO: 2109 - DNA, 2905 bp, Zea mays
  Clone ID: ZEAMA-23APR03-CLUSTER222436_1
gcacgagaccattacctagaacatcctaatcgaaaagcgattaatcaactccgccacgaccaacacgtacgtaaccagcggcggttcggcagcatgcggcgacgacggtgtccgctcctcgccgccgtcctcttcctcctccccctcttccaccgccaccacgccgccagcggcaccgacacggacacggtcacgctggccgcgccgctcatggggaaccggacgctggtgtccgccggcagcgccaagtacgtgctgggcttcttcgcgccggacccggacgccacgggatcaggacgggcgtacctcgggatatggttcaacggcatccccgcgcggaccgtcgtgtgggtggccaaccgcgagagccccgtcctgggcagcgtgggcgccgccgcgctcagggtcctcgccaacgggagcctggccatcgtcgtcgtggacgagaccgactacgaccacgaccagcagcccgtggtctgggcgacgccgccgccggccacgtccagcggcagcaacgccaccgcgcagctcctggacaacggcaacctcgtgctgcgggtcccgggcgccggcgtggtgtggcagagcttcgaccaccccacggacacgctcctgccgggcatgaagctgggcatcgacttccgcacggggctggaccggcgcatggtctcgtggcgcgccgcgggggacccgtcaccgggggagtactcgttccgcctggacccgagcggctcgccggagctcttcctctaccgcgggtccgcgcgcgtctacggcagcgggccctggaacggctaccagttcacgggcgtgcccaacctcaagtccaacagcctcctcaccttccgcttcgtctccgccgcggacgaggcctactacagctacggcgtggtcgacagcgccgccgtgctcacgcgcttcgtcctagactcgtcggggcagatccagcgcctcatgtggattgacatgacccgctcctggagcctcttctggtcctacccgctcgacgagtgcgacggctaccgcgcctgcgggccctacggcgtgtgcagcgtcgagcgcagccccatctgcggctgcgcgccgggcttcgacccgcgcttccccaaggagtgggcgctcagggacggctccggcgggtgcaggcgccgcacggacctcgcctgcgccggcgacggcttcgccgcgctcaccaacatgaagctgccggagtcggccaacgccaccgtcgacatgtccctcaccctcgaccagtgccgagaggcctgcctcaggaactgcgcgtgccgggcctacgccggcgccaatgtcagcgcgccgggggccaccggctgcttcctgtggaccggcgacctcctcgacatgaggcagttcggcaaaggcgggcagaatctcttcgtccggctcgcggcgtccgacctacctctcagcagctcttcgccagcagacacggacgggcgaaccaagaggctcgtcgagatcatcgtcccgtcggttgccgcaccggcgctgctgctgctggccggactctgcatctgcgccgtgaggacgagaaggcgtaggacgaaggagaaggaggccatccccctggcgctgctgagagacgcgcagaggcagagcgcaccgttcggccgaaggaaccagattgccgcgtccaccgacgcgcaggacgagtccctgcacgacggccagcagggcggcagccaggactgcgacctgccgtcgttcgacgtcgagacgatccaggccgccacgggcaacttctcggctcacagcaagatcggccagggcgggttcgggcccgtctacatggggaagctggacagcgggcaggacatcgccgtgaaaaggctgtcgcggcggtccacgcaggggctccgggagttcaagaacgaggtgaagctgatagccaagctgcagcacaggaacctcgtcaggctcctcggctgctgcatcgacgggtcggagaggatgctggtctacgagtacatgcacaaccggagcctcaacaccttcctcttcaatgaggagaagcagccgatgctgagctgggagaaacggttcagcatcatcaacggcatcgcgaggggcatactgtacctgcaccaggattcggcgctgaggatcatccacagggacctcaaggccagcaacattctgctcgacaaggacatgaaccccaagatctccgacttcggtgtcgccaggatattcgggaccgaccagacggccgcgtacaccaagaaagtagtcggaacatatgggtatatgtctcctgagtacgccatggacggagtcttctccaccaagtccgacgtgttcagcttcggcgttctggtgctcgagatcgtcagcgggaagaagaacagagggttctaccacaccgagcttgacctcaacctcctaagatatgcgtggaggctgtggaaggacggcgagagcctggagttcatggaccagtccatcgcggacacgtccaacgcggcggaggtgctcaagtgcatccagatcgggctgctgtgcgtgcaggagcagccgaagcgccggcccaccatgtcggcggtgaccacgatgctcacctgcgagaaccccacgctgccggagccatgcgagccggcgttcagcacggggaggaaccacgacgacgacgacgaggacccggaggcgaaggcctgccggtctaacagcgccagcagctggacttgcaccgtcgtcgagggtagatgagatagattactgactgtttctgctgcgatgtgtactgtaaatatcaaagcatttttaacttcaacagcagtgagattaattcaattgaatttacctaaacattgaacagcagtgggcctcgtcaatgatggtccagataattcatattgcttttttcgcaaaaaaaaaaaaaaaa

SEQ ID NO: 2110 - DNA, 2128 bp, Zea mays
  unsure (1)..(2128): unsure at all n locations
  Clone ID: ZEAMA-23APR03-CLUSTER22251_2
gcacgagaccattacctagaacatcctaatcgaaaacccaatcctgccgccatgtcgtccacgccgccggccgtcgcgtcccccgcctccgagcaaacaaaatccaagaagaagaagcacaagtccaaggatctccccgccactgacccgccgtcgctcgccgaggctgaggagaagactgatggctacctaatcaagccccagtccctggtgccgtccctggacacctcgacctggccgctcctcctcaagaactacgaccgcctcaacgtccggactggacactacaccccgctcccctccggccactcgccgctgaagcgccccctcgccgagcatctccgctacggcgtcatcaacctcgacaagccgtcgaacccgtcctcccacgaggtggtcgcctggatcaagcgtatcctccgagccgagaagaccggccacagcggcacgctcgaccccaaggtcaccggcaacctcatcgtctgcgtcgaccgcgccacgcgcctcgtcaagtcgcagcaaggcgccggcaaggagtacgtgtgcgtcgcccgcttccacgccgccgtgccggacaccgcgcgcgtggcccgcgcgctagaggcgctgacgggcgccgtgttccagcgcccgccgctcatctccgcggtgaagcgccagctcagggtgcggaccatctacgagagcaagctcctggagcacgaccctgagcgccacctcgcggtgttctggatctcctgcgaggcaggcacttatgtccggactctgtgtgtgcaccttgggctgctccttggcgtcggcgcgcatatgcaggagctgcgccgtgtccggtcggggatcctcggggagcaggacaatatggtgaccatgcacgacgtgatggacgccatgtggtcgctcgacaactacaaggacgagacctacttgaggcgcgtcgtcatgccgctggaggtgctgcttacaagctacaagaggcttgtcgtgaaggattctgccgtcaatgctatctgctatggcgctaagcttatgatccctggcttgctccggtttgagaacgatatcgagaccggggaggaggttgtcctgatgacaacgaagggggaggcgattgccattggtattgctgagatgaccactgctgttatggcaacctgcgaccatggcgcggtggcaaagatcaagagggtcgtgatggacagggacacgtacccgaggaagtgggggcttggtccagtggcactcaagaagaagaagatggtcgccgagggcctccttgataagcatgggaagccaaacgagaagaccccagctgagtggctccgcaatgtggtgcttcccactggcggcgatgtatcgatcgctagcatcgcagctgctcctgagccagagaaggtgaaggtggaacaggatgcagttgccggtgaaaaggtcaaggagaagaagaagaagaggcagaaggatgaaaacaatggcgacgatgcttcggttccggcgaagaagatcaaggtcgaggaagatgccgaggtagtggaagtggaaggggacaagagcgaaaagaagaagaagaaaaaganagatgaggtagaatcagaatcagctgatgcggcggaagcgaaggaggtggagaaggctgatgcagctgacgagacgggcagcgaaaagaagaagaaaaagaagagcaaggaaggaagcgcagctgacgagacgggcagcgaaaagaagaaaaagaagagcaaggaaggaagcgccgccgtggatgcagagagtgctgagcatgtagatggggcaggcgtggagaagaacaagaagaaaagggagaagaaaaagaagattggggagacagagcaggcatagtaattagaacttagaatggacgggttgtctaatctgttctgagttgcaggggggagggggcggtatttccaattttccggctgtatttttgtttctgtgagtacgagacaatgcgatgagttttggcctcttgcagacacaggatccattgagctggtaactttcgagctttgagaatgggtggcgagtctgctgtgctgaagagctcgagcagcacttgcttaagcatgcacttgatgctatgtttatagggttcaaagatgtgcacctgctg

SEQ ID NO: 2111 - DNA, 1203 bp, Zea mays
  Clone ID: ZEAMA-23APR03-CLUSTER222943_1
gcacgagaccattacctagaacatcctaatcgaaaaatcgacagcctccgccgcacgttcacacacacagcaagcagaatccagctagctcagctctcactcgctcgctcactccagtgtccagtctcccttcacttcaggacgtcctcgattcgccgccgtctgtcaaccgagatggacgcgctgtggaatggttcgtcgtgcgattggccggcgccgacggtgatcatcagcgacgacgacgcggcggcagcggagctgcggcgggggccgtggacagtggacgaggacgcgctcctggcggcccacgtggccgcgcacggcgaggggcggtggaacgagctggcgcgcgacgcggggctacggcgcaccggcaagagctgccgcctccgctggctcaactacctccgccccggcgtgcgccgcgggggcttcaccccgcgggagcagctgctcatcctcgacctccactcgcgctggggcaaccgctggtccaagatcgcggcgcacctgccgggccgcacggacaacgaggtcaagaactactggaggacgcgggtgcagaagcacgccaagcagctgcactgcgacgtcggcagccgcaggttccacgacgccatgaggaacctctggatgccgcgcctgatcgagaggatccacgccgacgactcagccgccgtcgccgctaatgccaccggcgacgtctcccacttctactccgcgagcccatcgcatgagctgtcgtcgtcctcccagccggcgccggcgtaccgaaacgctgcgcccaacggcagctgcgcgcgtgcgccgtccccggacgcctcctgcgtcaccgggccgtcgtcgtggtcacgggaggcgtcgcccgcgtcgcagttccaatcgagcggctcgaccattgccggaccgtctacttccaccgagctgtgccagaacggatgctccagcgcgacgagcgttgacatgttcgacgagagctggtcggagcttcttgcgcgcgccaaccatgacgacacggatttcggattgggagaaactggagacaactggtggggtctggaggatatctgggaacaaccgctttaaactgatcgctccctacttttgtactactacatactacgtatgctgcccgagacgaaatgacagaattgttgtttctagtgttattgaaaaaaaaaaaaaagaaaaaaaaaaaaaaaa

SEQ ID NO: 2112 - DNA, 3162 bp, Zea mays
  Clone ID: ZEAMA-23APR03-CLUSTER2231_2
gagacggaagccaagcctccaagggggccgtcgcagaactcgcgccaccgcccgccatggcttcgtcatctaaggcctccgactcctcctcccaacgatccaagcggtcggatcaagggacgggcagggaagccgctcccgcctctgttgtcccgatccacgggaacctgacgcagttgatacgccaaatcaaatcgaggcgcctcttgtacatcaaggagaaattggaggctaacaggaagacgctgcagaggcactcctgctcgctgttcgacgtggcagcggcggcggaggtggcgtcgaggggcagcgatggcggcaacgctttgtcgcagcgagcggcggagggacagttcaggctcgctgggtcagacctggcacacgggataggggagagggacgtggtgtacatgcaggaggagaacctggcgtccgggacgctcgtgctctcgagctcgggcgctgccgcgcagcggacagtcgtgcggttcgtgaagctgccgttggttgagaggatccctccgtacaccacttggatcttcctggacaaaaatcaaagaatggctgatgatcagtcagttgttggtaggagaagaatttactatgatccagtcggaaacgaggctctgatctgcagtgacagcgatgaagaaattccagaaccagaggaagagaaacactttttcacagagggagaagatcaattgatatggagagctactcaagagcatgggttaaaccgagaggttgttaatgtcctctgccagtttattgattcaactccatcagaaattgaggaaagatctgaagtcctatttgagaaaaatgagaaaaactctggatcttcagataagatagagaggcaactttctcttgacaaaactatggatgccgttctggattcttttgataatctcttctgccgcagatgcttggtttttgattgtcgcctccatggttgctcacagaatttggtattcccaactgagaagcaaccctacagctttgagcctgatgaaaacaagaagccatgtggtcgtcagtgctaccttcgatggagaggaggatttcaagagattcatgatgttggtcttagtggctgtgcaacatataatatggaatcaggaactgtctcacacaaagttgatgttagtattatgtctgaatcagaagattcaaaccgagagaaaggcaacattaggtccatgacactagttggaaccagtggatcaaaaataatttcttctgttagtgctgaagaaagcactactccgccttcagcagatacctctgaaacagagaatgcatcctctgatatgcctcccagtagtttaaggaaatacaagatttcaaaacgtggacctaggtacagggagcgttctcctggcaaaaggcagaaggtttttacttctgacatttcttttgcaagcaatatactgaataaactttcgattccggagattcgcgacacaagactagagtctagagaacctggaggtgataaactacaaattcttgacgagtccactaagaaaacttcaagcaaagatatctgtggagaaagcccaattactactactgaaaatgtgggaagagagagtaaaaaagtatcttcaacaaagaatttcttggagcacactctttcatgttggagtgccttagagcgagatctatacttgaagggcatagagatatttggaaagaacagctgtctcattgccagaaacttactatctggtatgaagacctgcatggaagtggccaactacatgtataacaatggtgcagcaatggcgaagagacctctcttgaataaatccatctcaggcgactttgcagaaactgaacaagactacatggagcaagacatggttgccagaacaagaatctatcgtcggaggggccgcaatcgaaagctgaaatatacttggaagtctgcagggcatccaactgttagaaaaagaattggtgatgggaagcaatggtacacacaatataacccatgcgtgtgccagcaaatgtgtggtaaagattgcccctgtgtggaaaatggaacttgctgcgaaaagtactgtgggtgttcgaagagctgcaaaaacaagtttagaggctgtcattgtgcaaaaagtcaatgcagaagcagacagtgcccctgttttgcagccagtcgtgaatgtgatccagatgtttgtaggaattgttgggtgagctgtggagatggttcactaggtgagccacctgccagaggtgatggttatcagtgtggaaatatgaagctccttttgaaacaacaacaaaggattttgttaggaagatctgatgttgcaggttggggtgcattcatcaagaatcctgtaaataaaaatgattatcttggagaatatactggtgaattgatctctcacaaggaagcagacaaacgtggcaaaatttatgaccgggcaaactcatcatttctgtttgatttaaatgaccagtatgtgttggatgcttatcgcaagggggacaaattaaagtttgcaaatcactcatctaaccccaactgctatgcaaaggtgatgctggtggctggcgaccatcgggttggtatctatgcgaaggagcatattgaggctagtgaggaactcttctatgattatcgttatgggcctgaccaggctccagcttgggctaggagacccgaagggtcaaagaaggacgaagcatccgtctctcaccatcgagcacacaaagttgctcgatagctgaagagcagctccggatgatacaatatgcagtaaattatatatttaatacatgatttagtcctagttcattatacgaggacttcgttggtagataagcatattgtatattcattagtgaataaactcccatacatcaagttggggaataagtgcatataaatattttttaccttaggtcggaaggtgacaaactgacaaccttgttaggttgagtaaagttagtgcttacaggttttcaaactggtgtggccattgctagagtatcaaatagctgagatggctacaactatagccttgtttgtatttttttttggcaagagggatggaatttatttgccaaatgtacacattgttgctggaagtatttaatgattcaggtgttcttcttcagtcaccctcctaaattttagaaatt

SEQ ID NO: 2113 - DNA, 557 bp, Zea mays
  Clone ID: ZEAMA-23APR03-CLUSTER2232_7
aatccctccccagcagccgtcgtcgccaccgctgcagcgcggaggcgaccccccatcgccgccaagatgcagatcttcgtgaagaccctgacggggaaaacgatcacgttggaggtggagtcctcggacaccatcgacaacgtgaaggccaagatacaggacaaggagggcatcccgccggaccagcagcggctaatcttcgccggcaagcagctcgaggacggccgcaccctcgccgactacaacatccagaaggagtccaccctccacctggtgctccgcctccgaggtggcgggtggactccttctggatgttgtcttcgatcggggaggagtcgggtatgctgggaaggagaattagcggagtatctgtttttttgaatgggatgtgaacgtggctgtgaatctcaggattgtatgctcgttgagaaagaaatggaaggacttcgtgatgcacgatgttgatgccgcatcatattcagcgtagaactgcatttcttctgagtggcaatggtgtcaccgaaaaatgaaagtatttggctggtgtcgccaatctg

SEQ ID NO: 2114 - DNA, 788 bp, Zea mays
  Clone ID: ZEAMA-23APR03-CLUSTER223_30
atctgctctcatcccccgtcttcttcccaagctgccacgttgcctccctccctccgctccagcggcccatggcgttcgccctggcgggggccttcaagggcctctccctggtgcccgccaccacctcctccttcccgcgcggcgaccgcgcctcgctctccgtcggcggcgcagccggcgtgccggtgccggtgccggcgcggcggctcaccatccagatggcgcacaagaagggggccgggagcaccaagaacggccgcgactccaagggacagcgcctcggggtcaagatatacggcgaccagctcgccaagcccggggccatcatcatcgcggcaccagggtctatcctggaaataacgttggaatgggcaaggatcacacactcttttctttgatagatggactcgtcaagtttgagaagtatgggccggacaagaaaaaggttagtgtttacccatatgagaaggagcctgaaaacccaaacagttacagagcaaggaagagagagtacttccgcatgcggcgtgaacggaagaaggcgagagcggagggcgccgctgagcctcagttggtactagctgctgttgatgaaaactctgaggtcagcgcggactgctgataagtttcctgtgtggtgtttctctttttcacagcccttgttacaccttttcttccttaattgtaagaccacataatctataaaggtcatatttacatgtgttgtttagataaatggatatgttctacttgtaaaaaagaaaaaaaaaaaaaaaaaacccgcggcc

SEQ ID NO: 2115 - DNA, 1737 bp, Zea mays
  Clone ID: ZEAMA-23APR03-CLUSTER22415_3
agcgatcacctctggtggggtctccagcgagtcactgctcaccggtcaccgccatggccgggaagcagttcccctccccggcgaactcgcgctccgcctcagcctcctcccgccgactcctcgccgccgtcgccgcctccctcatactcctcacagcttcctacttcctcctcctctccccatcttcgcaccgatccgccccagccatcctcgcgaaccctagcgccaccacatccttcctcgcctccctcgaccgcttcctctccgatccgcatccctctgcctccgccgccgctcctgtagaacttgacgccgcgatccgggtccaggaggatgcccgtctctacggggaccccacatggcccgcgccggccgcggggctgctcagggtctacgtttacgagatgccgagcaagttcacgtacgatcttctgaggttgttcagggattcctaccgggacaccgacaacctcacgtccaatgggagccccgtgcaccgcctcatcgagcagcattctattgactactggctatggacagatctcatcgcacctgattcacagagacttttgaagagtgttattagggttcagcagcaagaagaagccgacattttctatgtgccattcttcacgacaatcagttatttcttgctggagaaacaagaatgcaaagcactttatagggaagctttgaaatgggtgacagatcagcctgcttggcaacgttcagaaggcagggatcatgtcattcctgttcatcatccatggtcatttaagtcagtccggagattcgtcaagaaagcaatatggcttctacctgatatggactccaccgggaactggtataaacctggacaagtatatctagaaaaggatgtcatccttccatatgttccaaacgttgatctttgtgatcacaagtgtgtattagaaactcaatccaaaaggagtatattgctgttctttcgaggaagactgaagagaaatgctggaggaaagatccgcagtaagcttgtagaggaacttaaaagtgcaaaagacatagttatagaagaaggttctactggagctcagggaaaagcagcagctcaggatggcatgcgcaagtctctcttttgcttgagtccggctggggataccccatcttctgctcgcctgtttgatgcaatcgttagtggttgtatcccagttataataagtgatgaactggagcttccatttgaaggaatacttgactatagggagatagcattgtttgtttcagcaagtgatgctgtgcaaccgggctggctcttgaaatacctaagaggaatcaatgccaaaagaataagagaaattcagtctaatcttgtgaagtattcaagacattttctgtattcaagtcctgcccaacctctcggaccagaagaccttacatggagaatgattgctggtaagcttgtaaatatcaagttgcagattcgccgttctcaacgtttggtcagagagtcaaggagcatatgtacatgtgaatgcagagttgggaacaccacgagaatgctttgaccaatatttttcatttgtgcctttaaacttttgtagcatagccgttttttgttaccaatgaggcgagctttgagtttggcaaaatttgccgatgtatttgtaaatgcaaccgagctggaaagagttgtgatactgtaaaacagagaaatgtaaaaaaaatcaagagcttgaagtagatatttatctccaa

SEQ ID NO: 2116 - DNA, 1051 bp, Zea mays
  Clone ID: ZEAMA-23APR03-CLUSTER22425_2
ctttgtacggcgaccctgcggacgctgacacgcgcttgcttcctctgctcggttctattgtacccccccacaggttcttcttggggacgtgggcgccggcaagtccagcctggtcctccggtttgtgaaaggccagttcgtcgagttccaggaatccaccatcggcgcggctttcttctcgcagaccctggcggtgaacgacgagacggtcaagttcgagatatgggacacggcggggcaggagcggtaccacagcttggctcccatgtattaccggggcgctgcggctgccatagttgtctacgacatcacgaacgcggcctcttttacacgtgcgaagaaatgggttcaagaacttcaagcacaaggaaactcgaatacaatagtggctcttgctgggaacaaggctgatttgttagatacgaggcaggtgtcagcagatgaagcaaaggcgtacgctcaagagaatggtctcttcttcatggaaacttctgccaaaacagctaccaatgtgaacgacgtgttctatgagattgcgaagaaactgcttcaagggcagcaggttcagaacccacaaggcgggatggttctcaaccagagaccacctgagaggatggtgagctcttcttcctgctgtgcgtgaagcgcaagatgggaagtgtggatcacatgtcccatggcctggactccaggagtattatgtgcgcggaggcggcgaagaatgttgccgaatgttgtgaagtggttgccatcccagttgctggaatcctgtacttttcactgcttgttcgttgccgtgttccttgtaaatgtgaatacttgttactttggagactcacgtgttcttacggcgcatgatcgtgcttgtctttccaagacttgagagaacagacatgatcgtgcttgtctttctaagacttgagagaacagagtgaaactagacattcgtttgattcacttataccaatcacacaccaatcacacgatgacaaatttatgggttttaaggcttcttaaaaaaaaaagaaggcaggtcgaccgctttaaagga

SEQ ID NO: 2117 - DNA, 1374 bp, Zea mays
  Clone ID: ZEAMA-23APR03-CLUSTER22437_3
gcagttcctccgaggcagcggcggcgggggcgggggcggtgggttcccgggggtggcgtgggaggtgttgcggcggcacttctctaagaagcggtccgtggacgtgaggcggatcaaccccaaggtgcccaaggaggaggccgtcgccatttccggccgactcctccagatcctctccgaccatgggcccctcaccgtcggcaacacctggaaccacgccaaggtacaacgataaacacgctactgcccctacaaacctgtataaaatatccaaatcactctgctacaacatcagaaaagcagcctaatgcctttttgcgtaccagtagtggtagtaagataaactaggcactgtcttatggaataccacgaaagatggattcaatcgtagccccatcccaacagctatttgttgtggtatctggtacctttgcaattgcaacgtttcccttctgttccaaattttcaatccacggtacctttgctcaatatgcttggacccccacaagggtgtctatttttttttaaactctgtgaacttgagattaaattggatcatctcgtctctgtaatcatacgcacattctgctatacgatcacgttgctaaggaaccgaaatcgggattactttcttcacagtgtatgaatttaggtacctaatcagtcaatcagacaggcagagtggcaaataactcttccatgagatttgacaggcttgggttgcagtctgtagcatgtatacatgatcgttttacctccagttatatataagcgcctgcagatggttctgaaactgtcattgttacccactaaggcctgattcaggttagctttagctacagaagaatgtatagtatctgaacccgaaaatgaaatttaccctgcttgctgccttgtccagagctgtacactgaccctggcgtatttgtaccacaggatgctggcatcgctggtctgaacagcaagacgcacatgaagatcctgctgaaatggatgacggggagaaatgtcgtgaagctgacctgcgtgcacgtgggcaacgcgaagaagttcctctactccccgtccactgaaagcagcagcagcgccggcgcatcaccgtcatccacatcggcctcgcagtgacggtcagtcgccgttaagccttggtgtggttcttgatgttgctttgtggatcgatggaggttgcctctggtcatggtgatcccatgtttaaccttgatgacgaacattggaaaaagcattttgttttatggactggaatagtctgcaaacatcacgatagcaatattgttctgctgctcatcagctgaggatgctgccctgtcctgaactcctgattttgcttttgatctactatgtgatgatttgccc

SEQ ID NO: 2118 - DNA, 2593 bp, Zea mays
  Clone ID: ZEAMA-23APR03-CLUSTER2243_1
gcacgagaccattacctagaacatcctaatcgaaaataccatttcctcctcgtttcaaggtatgttttcctcgttttgtttgaaggcatgtttgttcatcagagtgtcagtcactaaactctaccattttcttaaattcttacggcacaataatttgattattctaatatgcttctgtaccagtgccaaacagacgttgtataaccgttgaaattgttatcaacaatcttcatactttttagggtcttgagttgatttcccttttccgatgtttaggatatatgtgttggcatattggttgaaatttcaaactcaggttgtgcatcaaagcatgactacaggatatagtgacagctccttttgtttagtgcagtattctaataaacatctagtcttctaatacttctgttgtgttgtgacttagaacttatttgcatataaaacattagggcttaatgagtgaaaaagttaccgtttgctcaagctcaaatcccatgatatgtattgcaacattattatcgttcacaggaaagagtatttctcatgtctgtgtacctgagaaaagatttccccgaaccattgatatattgcttaatgtacactaaaaaagaggaatgtcaatctggtggcctagacctaggggtggtaatagatcgtgatccaaatgtttcttcacgatttgttatggccctaaataaattttggttcaaaaatgaatagaattagagtccgatccttaaattttatagtgtaaaatttagagcccattgtcacctctaccaggaccagaagaaaggaatttaaactgttgctttctcattcttcttgtaattggttggttgagtggtctttagttttcaaacaatgaactttatatttggaaaaggtgtaactgatgttcagttacgtttctatatctagaaagtttcctactatataacttaatgatgtgctctatactgcataccagttggtatggcacactactcttaaatcaatcgatggcttagcttacaagagtataagagtttccttcaaagctttgttcgtcttgctatgttgcgtccagtttgtcaactttggtttcaaaaggcttcatgtcttagctttaaagtctgtagttaaggaaaccactcaaacaaaaagttagtggcagcagttctttgctcagtaaagagaaggaaagagaccgtgttgtcatgttccacgacttcattacttatccatagacatgcagttgtttcttgaagctaaaaatacctatgttatataacatggaggaagagttgttcaatagaccatctttggagaaagcttgtttggattgcgatatgtgcaaaagcacctaggttcaccagctgtccttcccaagaaaacaaatgatgatatatagagtccaaatcaagccaagatctttaagcttgaatatgctttgcatgtgaatacattgactttcggtcagttatttgttaatgtatgtccttaatcacggctgcaccagcgatgaccttagtactgttttcaaaccctcagtaacctgtgttatgtttctcacaataatctaggtccaaaatgcaaccagttggagtccgatccttaatggcttgggtttaaagtgtgatgccgagtgtcacgacaacaaggccagatgcaagggttctacctctgatgtatctttgttcaactgtgatgtgttatggtccaacaggaagcgtccagggcacctgtactttgagttctttgaagtaggttcaccttatggaagggttcctctcattgacaaggtttatgaactatcccagggctttcctggattgacatcactgaagagtgctgagctttcgcctgttagctggatgtcagttgcctggtaccctatataccacattccttaccagcgcagcgtgaaggacttatctgcatgcttcctaacttaccataccatttcctcctcgtttcaagatcacgggcttgagaccatgaccactgattgttgccatccagttgcaaacggcaaacaaaatggccacatggataagaagagcaacaccgtatcactgcctccatttggcctcgcagcacacaagatacaaggttccctctggaccaaccccatgacaggagaccgcagaaagatggacttcctcttcagtgcggcagactcctggctgaagcagcttggagtccagcatcatgacttcaacttcttcatcactcaccccatgtgaactgctgatccggagtggcttgcaaagaaccacatgggtacagtttgaagctagttatattacctacaccaccaccaacggggtagcaaaacgtttacagtacaatgcgctggtgaaatgagtctaacaatcgcaggatagatttatacttgagtttactgctgcagcgaataccaaacatgtcggcactcaaaaaggttttctgtttcttgtttcttggcagaaaaatgtaactgatctgtacagaagttttgcaactaatttggtatccaatgtgggggttggatccatatgtagctgttaaaaaaaaaaattagtgccctagagaatgttagttccaggacgaaactgtttgcgcagactcc

SEQ ID NO: 2119 - DNA, 1654 bp, Zea mays
  Clone ID: ZEAMA-23APR03-CLUSTER22444_2
acgcagctcacgtacacgcgatgagcacaccgcgtcgcggcgggcagcaccacggcgacaagcgcaccgtgacacgagcagcctcccgaaacagcgacggacacggcgcaggcgacttgagcttcgggtccacggcggggcctcggttcgccgtcgccccgccgcgcccttgggcgccgccgcctgagcacgcggccgtcttcgcgcagccaccagacgatccgtcgacgttgaccatgctgtggggaccgcccggcgaggtgcccgttgccggcttcgctgcggcaccggaagggcgaccggatgcgttcgctggcagcgcgtcgtgcctgccgctcgcgaggcaggtcggcggccagcagggggcgcgcaacggcgcaacttcgtggtgtcgccgctgtcgttccacgcggcgctcgcgctggtggccgcgggcgcgcggggcgagacgcagcgggagctcctgcgcttcttggactccgagtcgctggtcgagctgcaccgcgccgcggcgacggcgctggtcgccaggctcagcgacctcccgcaggcgtccttcgcctgcggcgtctgggtggaccggagccgcgcgctcacgccggagttcatagaaaccgccgcgtcgcgctacgcggcggtcgcggagtccgtcgacttcttgaagaactccgaaggcggcaagggcagcaagtcaacgacttcgtgaaaggagcaacgaaagggctcatcgacgacgtcctgcctcccggctccgtcgactcgtccacggcgctcgtcctcgccaacgccatctacttcaagggggcgtgggctcggccgttcgatccgtcgagaaccatcttcgcgccgttccatctccccgacggcggcaccgtgcgcgtgccgttcatgactacgactacgagcggtttcgaggaccagcgggttgccgtgttccccggattcaaggcgctcaagctgccctacaagaacgacggcggcgcgcagcaggacgcgttctacatgcttctactcctccccgacggtgagaccctaaccctcaatgatctctatgataaggtcgtgtcgtcgccgggattcatcaggaagcacacgccggtggacgaggtcccggtcgggcggttcatggtgccgaagttcaagttcacgttcgagtttgaggcgtctcacgatatccagaagctgggagtcaaccgagcctttcaaagcggtgacttctccggcatggtctccggtggaaacgggctcatcatctcaggagtgtaccacaaggcaaccgtagaggtggacgaggccggcaccgtggccgccgcggccacggtcgagttcatgtcgtttgtatgtgcaagaatcgatccgcctgtggatttcgtggcggaccggccgttcttgttcgccatcgtggagagaagtggcgtcgtgctgtttcttgggcatgtggtgaaccctctggttgagtgatgacacaggagtggcagctatattttagtcgttatggctttacggaaatgacgttgttatttaacaataaataaataccgtccattatgtggttcatttttatgggaaccttgaagatgtttatcagaggtagtggctatgaagatttttgtaatatatggatggtggtttaatgctagaattgcaatgtctt

SEQ ID NO: 2120 - DNA, 1224 bp, Zea mays
  Clone ID: ZEAMA-23APR03-CLUSTER224668_1
tatgctacgccaagcccgcaattaaccctcactaaagggaacaaaagctggagctccaccgcggtggcggccgctctagaactagtggatcccccgggctgcaggaattcgcacgagaccattacctagaacatcctaatcgaaaagttgcgttccagggcgagctatcgcgcagcaggcacagcgccctacaacgcccggccgtgcaaactaaccttcggatcagatggagacgccggcggcggactcctccggcggcgaccgctacaggtcccacctggctggcgagggcgagaagcacaccgtgtggcggcacggcgcgccgccctcgtacgacgccgtgaacgcgctcttcgaggccgagcgcacgcaggagtggccggcggggtcgctggaggagatcgtgcagaacgcgatcaagacgtgggagatggagctgtcgcacaaggcgcggctgtcggacttcaagtccgtgagccccggcaggttcaggctgtccgtgaacggcggtcgggcccggagcggggaggagacgctggccgtgggcagctacaacgcgctgctggacagcccgctcctggcgcgcgcgggcgcgtacgacgcctccgccgagacgttccggtcctcgcacgacctgttccgcgccgcgttcccgcgcggcttcgcctgggaggtgctcaaggtctactccggcccgccgctgctcgccttcaagttccggcactggggccacaaggaggggccctacaagggccacgccgccaccggcgacaaggtcgagttcttcggcgtcgccgtgcttaaggtggacgatgagctgcgagcggaagacgtggaggtgtactacgacccgggcgagcttttgggaggccttctcaagggacccaaggtggcttcctccgaggaggaccgccgcgaggccgctgccgtgtcggcgtcaggtgctgtcccgccgccgctagcttgcccctttctcaaccccgggaagccacagtgatcaaccagcaccccccatttatgtagcggtttggtgaataagtgaaagcttaaaatgacggtgttcctggtcgtccatggacatcactgagggtacttgtaccccattgattaattgatgtttcatgaccagaagaaattgttcgcgtaataattgtgtgatattccttcacccaaaaataaataaaaataaagcaacgcgtaattgttccaaaaaaaaaaaaaaaa

SEQ ID NO: 2121 - DNA, 1025 bp, Zea mays
  Clone ID: ZEAMA-23APR03-CLUSTER224996_1
attccacctcacgcaacgcaccacgcgcgaaggaagctagctcccaccgtgagtgcagtgcaccgctagatccatggcggcagcggcggcaggaagctcccgccttctctccgcgctggccctcgccggcgtcgtttccttcctcctcgtcgctgaccctggcgtcgtcgccgcggaggcggcagccgcgccgccggggctggagttccgcgtgggcgggccgcgcgggtggcgcgtcccggacgccaacaccagctacggatggtgggccatgaacaaccgcttccacgtcggcgaccgcctctatttcaagtacgcgaacgacgactcggtgctggtggtgaaccgcctggccttcgacgcctgcaacgccagcgcgccgctcgccgcgttcgccggcggcgccaccgagttccgcctccaccgcccgggattcttctgcttcatcagcggcgagcccagggcactgcgaggaaggccagaggctcatcgtgcgcgtcatggtgcacccggcggccctggccgcggcgcccgcgcctggccctggagttccgacgatgacgcgccccgggatgccgtccgggtgctccgacggcgcctcctcctccgctgttgacgcagcgatcgctgccgccgccggcgtcgccatggctacgcttgttggtatgggcttgatgctccactgattggtttgctactttgcttttatgtgcgcagctagtactgcagtgcagacgtactcacacactagtacctagttgttgttagataatgttccgttgcctagttttcagtttccatgttattttgggttcatgcatgatgacttatgaagtattggtactatattaatgtcgtcgtgtcgaacaatttgtttaacgcaaaaaaaaaaaaaaaagtaatcgtacgtatgctgtttagtacctatatgtgatgtggttcagttcgttgtattctgctcttgtagttctcaacgatgctaaattgctggcctctttttttaattagtatcagacaattccatt

SEQ ID NO: 2122 - DNA, 885 bp, Zea mays
  Clone ID: ZEAMA-23APR03-CLUSTER224996_2
acttttatggattttaccctaatccccaatcctattctacagccgcgcgtctcctacccgttctaccgccgcgcgtatctcctaccttttctcctactctgcttgccatccgccgccgtctcctacccactccccctgtccggcggcgcagcatcacccagcggcgcgcgcagggctccgggcagccatcggactcgccaagccgcgcggcgggcggccttcctcgccgagccaggcgtcgggcggcctcgccgagccaagccggggctggagttccgcgtgggcgggccgcgcgagtggcgcgtcccggacgccaacaccagctacggatggtgggccatgaacaaccgcttccacgtcggcgaccgcctctgtgagcaccagtagcctaactcccacatttcgacaacaatccgaccatgacgcgcacggatccatttcgacatcctccgttcctctcgcaggtttcaagtacgcgaacgactctcggtgctggtggtggaccgcctggccttcgacgcctgcaacgccagcgcgccgctcggcgcgttcgccggcggcgccaccgagttctgcctccaccgcccgggcttcttctgcttcatcagcggcgagccagggcactgcgaggaagaaggccagaggctcatcgtacgcttgttggtctgggtttgatgctccactgattggtttgctactactttgcttttatgtgtgcagcactgcagtgcagactcacacactagtacctagttgttgttagataatgctcagctgcctagttttcggtttccatattattttgggttcatgcaagatgacttatgagttatgaagtattggtactaggaataatgttatctgtcgaacaatttgtttaactca

SEQ ID NO: 2123 - DNA, 1954 bp, Zea mays
  Clone ID: ZEAMA-23APR03-CLUSTER22501_1
aaaggttgatgcttttcaaagagttgtgcaaagacatggatgttttacaaagttactatctactttggtctagtataaagatatatagaccctgtattaactttacatgtccagctgacacagtgatgctacatggccatttgcctccaacatttgttttttctatgcgcagaagttctgttctgtctatttatccacctcctttttcatttagattgattgcgaaacagttacagggcgcggcggatgggcctccctgctccggtcgttcacccgccgcagctgcgcgggcccgagcgctttcgcttaccgccaccaccaacgacaacaaccttgtcccttctccaccaccgccgctgcgtcacgccaaagcggcgaagccctggatggccgacggcagggagaagtggtggtgttggggactgggggtctcgctaatgaaactcgatacgcaagacctgcgccccgcgcaaccacatgctgctcgcctcacctgcgctgcgtgcatatggtgagaaagattccttggagccatggaaattcaaggttgcttatgacaagttggtttttgcctgtggagctgaggcatcaacttttgggatacgtggtgttaccgaccatgcaatctttcttcgcgaagttcatcatgctcaagagattcggagacggctcctccttaatctgatgttgtctgatctccctggaatttcagaagaagaaaagtgcagattgttgcactgtgttgttgttggaggtggtccaacaggggtggaatttagtggtgaacttagtgattttattatacgagatgtcaaacagcgttattcacatgtgaaggattatattcatgtgaccctgattgaggcaaatgagatattgtcatcattcgatgttcggcttaggcaatatgctacaaagcaactaattaagtcaggtgttaggcttgtgcaaggaattgttaaggatgtgcagcccaacaaaataattcttgacaatggagaagaagttccttatggtttactggtatggtccaccggagttggtgcttcaccattcgttaagtcattgccatttcctaagtcacctggtggaaggatcggtgtcaatgagtggttacgcgtcccttctgttcatgatgtttatgccattggtgactgcagtggatttctcgagagcaccggcaaggaagttctccctgctttagctcaggttgctgaacgacaaggcaagtacctggcaagcctgctcaaccatgtcatgaaagctggaggagggcatgcaaactctgagactgaagcagatctgggtcgtccaccctttgtgtacaagcatctaggcagcatggcaactgttggaagatacaaagctctagtcgatctgaggcaaagcaaggagtcaagagggatatctcttgcaggatttgtgagctggttcatctggcgctcggcatatttaactcgtgttgttagctggaggaataggttctatgtggctatcaattggctgaccactctcttatttggccgggacataagcagaatctagagtgtctttgtatacgtacgaacaagcatataagtcgatgtagagttacacgccacggtcacttgcttgccacacacccctccgggggtccactcctaccactgtccctattagctgtgaatgtaattcacaggtgaattatgaataaatctgaggatactgcagttacttacatgtggtgtgaatgtataatactctgtcacttgtaccactgtccctaatagctgtgaatgtaattcacaggtaaatcatgaacaaatctgaggataacacagttgcttacaagtgctgtgaatgtataatactcttaaaaaagtctaaacaacttggaaccgaggtaaaaaaaaaaaaaaaaaagcggccttatgagtggtgcaaaagggaattacagtctataattacaaagcat

SEQ ID NO: 2124 - DNA, 2026 bp, Zea mays
  Clone ID: ZEAMA-23APR03-CLUSTER22522_1
ctctgtctggctgctacagctgctctctcttgcttgtgctgctagggcgagcgagctacccttagcttcgctttctttccgtagaaggtccttgatcattcaggcggccgacttcgaatgtttcttcgcgttgcagacgaagcagggcggtgatcacatagcaagtgctgccgccgatctcatggtcctccatcttcggggcaacgctgaaccaggtgctgttcgtcgtggggctcaagtccaccagcgcgaccgtggcgtgcgcgctcaccaacacggccggatcggatcggagctaggtgatcggtgcagctaactagctctagccatgggcaagagctgcgtgccccccgtcgccatggtgctcgtgcagctgggctttgccggcatgaatgtggtgtcaaagctggcgctggacgccggcatgagcccctacgtgctcatcgcctaccgcaacctcatcgccgccgccgtcatctcccccgtcgcctacttgcttgagagacgaagcggggcgacgatcacaaagaaggtgctcctccagatcttcgtctcctccatcttcggggcgacgctgaaccaggtgctgtacttcgtgggcctcaagtccaccagccccaccgtggcgtgcgcgctcaccaacacgctgccggcgctgacgttcgtgatggcggcggcgctgaagatggagtcggtgcggccgggcacgccggcggggcaggccaagctggtgggcacggcggtgtgcgtgggcggctccatggtcatacccttctacaagggccccgtgctggggctgtgggcgtccccgctccactggcgcttcgtcgcggaccacgcgccgtcgcccgccgccgccgccgcacactcgggagccgccgtgctcggggacgtcctcatcatcgccagctgcgtcgcctgggccgtctggttcatcctccacaccaagatgtccgagggcttctccgcgccctacaccagcaccgccatcatgtgcctcatggcgggcgtgcagtgcgcgggcgtcagcgccgccatggaccgcagcctcgacgtctggaagctcggctgcgacatcaggctctactccgtgctctacatcggcatcgttggctccggcatcgggttcacgctcatgtcgtggtgcatccaggtgcgcggcccgttgtacgtgtccatgttcagcccgctgctgctcgtcgtcgtcgccatcatcggctgggccatcctcggcgagaagatacgcgtgggaactgctgtcgggtccgtgctcatcgttgccgggctatacatggtgctctggggcaaagggagggagatggacaggccggacctcgacaacgacgacgacatagccgacgaggagaccgccgtgggccttgttggcttcagcggcaagggcggtggcgcggtcgccatcgcaagcagccgcgtcgaggccatcagcctgccggtgtcgttctccacaactagccccaagcggctgcaacacatccacgggtgaagggtgacgtggccgacgacgtgcgcgcgtgtcactttggacgcgccaagaaatctttcagggagccatggagagagtgagagtgtggtgaaaaaaaaataaggcaaaatagctagtggacggaggcaagacgacggcggcgacgatcggattggagtggcacacataaagacttattgtatacggttggttgcattgccgttgcagcagcgtcacagcgtggtttgttacaaacaggaaacaaacaaacaggagtgtgtgatgatgtgactgtacctagtggaagctaaggattgcttgctagcttggatggccttcttgttctgtctgcccttcccttgcattggattggatgacctgatttagttcctccaaagagtctcattcatcatacagttctcttctgccgctgcttcttccatcaagtgcagtttttctttgtcctcagtttttgcatgccaaacgattaataattggtcgaaaagaggaacagaggggaaatggctttttttgtaccttcac

SEQ ID NO: 2125 - DNA, 910 bp, Zea mays
  Clone ID: ZEAMA-23APR03-CLUSTER225374_1
tcgagtcagctacgtaggcccccttcccccgcttgcgtctggcactcccatggtgttatatagacggctttaggaaagcccatacagatccagagccaataaccattaaccagctgagtagcagaggcattgacatagcaatggcagcccgccatggcagcaggagaacaagggcagatcaatggctgtttggtgggaagtggaggggaaccgtaaaggagacaaggcatcctccgcctgtccctgaggccaagcctccaaatcccgttcccgttcagaaggacgaaggcgtctgccttgagaagcctcgggtgcagagagaggtcgccgacgtcgcgcccggaaggagatctatgccggagatggagatcaacatgaaagaagtcgttgcggtgctcggggtgaaggtcatggctgcagacatgccgccgttcatgcagctgcatgccttccggtgcgctaagcggtcccatgacaacttggacaagttcagctcaaggcaactggcccatgatgtgaagaaggagttcgataaagtgtatgggcctacctggcactgcatcgttggtacgagctacggttcctttgtgacacattccagaggctgcttcctctacttctccatggacaaaatcatagtgatgctgttcaagaccaagataaggaaagggttagcatcctgagcagcctgtccatcatgaagggcgtggtcagtccagcttttctatgatactgacaattgtaaaatattgaaccttatagcttggagctgaagagctaacttgaatcattcttgtctgtgagtggcaacttgctaacatggggccgtactgcggtgctgttgttgtagactaaaaaattaaccgttcaaagcaatgatgaattacccgtgaaaaaaaaaaaaaaaaaa

SEQ ID NO: 2126 - DNA, 880 bp, Zea mays
  Clone ID: ZEAMA-23APR03-CLUSTER22558_2
agtctttctgctggccacaatcttcctaacctaggcagcagctagctctttgatccctgttggattggatggaggtccgtggcagtgcacccagcatgaagccaaaggtggagccgccgttggaggcttcacacgactgggaggtgaccccgctgtccggcgacaaccccttcttcaccagcgtcatgcgcaagagccaagtccagaacccctttcagctggtacacattttcttttcttttctttttccccaatccggaacgcacgcacgtaggagcacaccgtactgtttgttccaggtcatcccggttcgcttccaccgccacctcccggaggcgcgcgcgcccgcggtgctcctctgccgcgaccggtcgtggacggtgagctacgcgggcgtcggcaagtggaagaggctccagggggcgtggagggacttcgcccgcgacaacgggctccgcctcgggggacgcctgcgtcttcgagctccttgtgcccagtactgatgcaacccaaggagacggagacggcagcaaggatcagggggaggtggtgttccgtgtgcaggtgctccgcggcggcctgccggctgagatcacctcccggggcgccacctccgacgatccactcgtcattgtggactagatccaactgcggggagagtagtacgtagtagactagtagtggtgcagtgcagtctgtagaggagacgagacgctcaggagctaggtagcatcgtcgttgtattttgttgttgcccctgctctagctagctcgctggtcctcgtggatcttgtagccagttctttttttcagctgcagacctcctcttcctgtggaaaaaaaaaaaaaaaaaaaaaagggcggccgccaccgcggtgga

SEQ ID NO: 2127 - DNA, 1469 bp, Zea mays
  unsure (1)..(1469): unsure at all n locations
  Clone ID: ZEAMA-23APR03-CLUSTER2255_1
gcacgagaccattacnnagaacatcctaatcgaaaaaccccactgctcggtgttcactccggtcgggccatggcgcgcgccggcgtctctaccgcgccgctctcccgcactcacctcctcccaccacgtccttccctcctccacaacacgcagcaccactccctcctcctccggccccagcgcaaggcgcccgccaccaccgcggcggcgctgccgccggccgcggacctcccggcgctgtccctcccggccgcggccgccgcggctgccgcgctggcggcggcggtgtcactttccgaccccgagcggcggcggcgctcgcaggccgaggcggccggcggaggtgacaaggaggccgtccgcgcctacttcaactccacggggttcgagcggtggcgcaagatctacgggtcggcgacggagggcgtgaaccgcgtgcagcttgacatccgcgagggccacgcgcagacggtggcggcggcgctggccatgctccgcgactccccgctggagctgtcgggcgccaccgtgtgcgacgccggctgcgggacggggtcgctggccatcccgctcgcggcggcgggcgccgacgtcctggcctccgacatctcggcggccatggtgtcggaggcgcagcggcaggcggcggcgcagtcgtcgtcgtcgtcgttccggatgccgcggttcgaggtccgcgacctggagagcctggaggggcggtacgacgtggtggtgtgcctggacgtgctcatccactacccgcgggaggaggcgcgcgccatgatccgccacctcgcgtcgctggcggacaagcggctgctcatcagcttcgcgcccaggacgctctacttcgacttcctcaagcgcgtgggcgagctgttcccgggcccgtcaaaggccacgcgcgcctacctgcacgccgaggccgacatcgaggacgcgctccgccaggccggctggcgcgtcgctaaccgcggcttcatctccacgcagttctacttcgccaagctcttcgacgccgtgcccgtcggctcctcgacgtagccgtgtaggccgcccgccgtgtgcttgtgtgtttgtttgcctcacgcgactgtttatagagctccagacggtcgccgcagcgcgcgcggcggcgtagcctgtttgtacttgcaagctcactcagttccattccgtagcttgatgccttgattgattcccacgtagacttccatcgacaaacacaattgcagggttttgagtttttgacccaaacgacacgacaaagagttcttatcatccaggggcctcgaccaccgtgctcgttttacaaaagctgtaattaaagactactttgcaagattatcgtgatatggctttcgatttttcattcaaaaaaaaaaagaaaaaaaaaaaaaaaagggaatatcacaaccatatcgctccaaaaagaaatcggccggtcaactgggggggccccttttaag

SEQ ID NO: 2128 - DNA, 1545 bp, Zea mays
  Clone ID: ZEAMA-23APR03-CLUSTER2259_3
tcccacgcgtccgcccacgcgtccgcccgtttcgagccaaggcatcctcgcgtctcgctctcacccctcctcggcgcctccccgaccacagtgtaaagcccctgtcccttcctcccccccgactcgcccctcatggcgaggaggcgctgctgatgcctcgcggcgtcggatcggacgcggcggccacgacacctagccgcttgcggtggcgctcgcctacgcgcccaatccgccgacgctgctcctcggaccccccgagagattcaggccccgtctcgcctcgtcctgcctagtgcctaggtgaggctctggcctccaaaggtgcgtgggtgggatctgctgcctcggtttgcgttattcccaagtgccctgcccatactccaacagcggtccagtcgacttccccaagtgctcgacccctacaaggcagcgcgcgtgcgtcacctcaaccccttgcatgcgctggcgctaaccctatctaggagacggagcggcgggccagcggctactcgggcaaagagaggacgagagcgtgcaagaagagaaggcccgtgtcaggcggcggctatagcctttcagttgaggattaaagtggaggtttaagaagcttgagaattggcatcatctcaagaatacattgaagtgcaagatgccaaaaataaagagtctatctaatgcatgccgagtatcattttctccagaaggtcccatatctgaagaggcgcttgagagagtccgtgcactgttagatatgataagacctctagatgtcggcctagataatgaagcccaaattgcacgcaattggagtagttctacgcgtccatcaaatgggagacgaggacgcaatggggctaaccagttcgcggctccaatcaaatatttgcacattcatgaatgtgaaagcttctctatgggtatattttgtatgccaccttcttcagttatcccacttcataatcatcctggaatgactgtacttagcaagcttctttatggacgtctgcatgctgaatcttatgactgggttgacatacctgatcatccaattgatcaattacaaacaaggccagccaagcttgttaaagattgtgaaatgactgctccagagacaactattctttaccctaatgcaggtggtaacatccacactttcagagccattacaccttgtgctctctttgacgttctttctccaccatactccgctgaggatgggcgacactgttcatacttccgaaagtctcagatgaatcagccacctgttgttttgcctgctgagatagatagctctcaggtagtttggttggaggagttggaggaccatcagcccccagaaggctttgttgttgcaagaggtctgtataaaggccctgtaattaggagataatttgctttggagcgcagaatcaaccaagctgcaaatcagctgaaagacgatgcaggcttgtagtgcctagtgcaagcatcgtcaggtcatgtgcagcctacggtttatttgtacatctcaaagtgatctttgataatttaacagcagttttacag

SEQ ID NO: 2129 - DNA, 706 bp, Zea mays
  unsure (1)..(706): unsure at all n locations
  Clone ID: ZEAMA-23APR03-CLUSTER22649_4
atcccaaagagcaagagcacgcagtagtgcagcagcactgaagcaccgtaccacttcctgcactcactgtgctagctgctcaaaccgtagtagtaacagtccatcaccaggcaccaccaatggctcccaaggttgcgctcttccttgccctgagcctcctgttcgctgccaccgcgcatggctgcgaaccctactgtcccggcccagtcgtcccaacgccaccagtcgtgccgactccgtcgtcgcatagccacgggcgctgcccgatcgacgcgctcaagctcaaggtgtgtgccaacgtactgggcctcgtcaaggtcggcctaccccagcacgagcaatgctgcccgctgctggaggggctggtggacctcgacgccgcattgtgcctctgcaccgccatcaaggccaacgtcctcggcatccacctcaacgtgccccttagcctcaacctcatcctcaacaactgcggcaagatttgcccagaggacttcacttgccccaactaagcttgggatcccttgtgtgctccatctcgcgattctatttacgagcatgtcggcctcttgcaatattagcgaataagtttgtcgtttcaaattctttcgctgtaccattgacgattgtatttgtgtggagttatatttgaaattttaatgatcaataagaaacctccctgttttnttttgagaagggaagatttatt

SEQ ID NO: 2130 - DNA, 1701 bp, Zea mays
  unsure (1)..(1701): unsure at all n locations
  Clone ID: ZEAMA-23APR03-CLUSTER22650_3
aggagcccactcttgggcatacctcagttccaaaaagctcgcaacagccagccctaggtctgaactctctcggacgggtgacaggctgacagccgccgcccgccagctttggagagccacggtgacaggccgccagcagccatcgacggccctccctccacctcgccgtcgtccctcttcccccatctcgccgagccatcgtccctccacagcaggaccacctcaccgagccgtcgtccctccacagcaggagtgcaggaccgcatcgccgagtcgtcgtctctccacaccaggttcgccgtcgcggcgcggctacctcgctccggctcccagctcgtccggtccagctcactcgcggtcgcgaccatctccgtccacctcatccctccggcaagcagttgctaaactcatccagggtcagtggtggaggatggcatcgaaatacgtggccagggtaccgtctccatggtgggcgccacaacgtcgtttggttggttcatgggtttccgtctgctcggtaaaatgcggtgcattgggaggacgggatgttgtgtgcgctgctgttagcttcagaccatgcatcgacattcacaaggggaaagttaagcagattgttggttctactcttcgggattcatccaatgatggcatggaacttgtgacaaactttgaatcagacaaatctcctgcagaatttgcaaaatcatataaagaagatgaacttcttggaggacatgttataatgcttggctcagatcctgcaagccaggctgctgcactcgaggcactacatgcatatcctggtggcttgcaagttggaggtggaataaatttgcagaatgcaatgtcttaccttaatgaaggggccagtcatgtgatagtgacctcttatgtgcttagcgatggcaagatgaacattgaaaggctgacaaaacttgtcgagctggttgggaaacagaggcttgtgctggaccttagctgtcgaaaaaaggatggcagatatactattgtaactgacaggtggcagaagttcagtgatgtgtttgtggatgaaccggcattagaatatctcgctgccttcgtagatgagtttttggttcatggtgttgatgtggagggcaaaaggttagggattgatgaggaacttgtggaactattggggcatcattcaccaatcccagtaacttatgctgggggtgtgtcaacaatggatgacctagagaggataaagaaggcaggcaaaagtcgagtagatgtaactgttgggagtgctctagatatatttggaggagatttaccctacaaagatgttgtcctttggcacaagaagcaaagtatggttggccaagtgtcaaggaacatgtggtagcgatcagtattgccagaatttattgtgtatcgctcgctaaaagcatatttattttcattacaaaacttcattgtgcgtttgaattactgagctttcttttgcttttgcttttggttgtttaaaggatgactttcaaggtgttatcagcgatcgtggcgctgtagtgtaaatggtcttccattcttatcgtagtcctctattttaaattttactcaacaaatattgtcaaaaaaaatttgtgtcattgccgtgtttcttattttacgcgatccatttaagacagtataagaaatgagattgtatttnaattttcaaaaaacagtccaatcgcc

SEQ ID NO: 2131 - DNA, 1460 bp, Zea mays
  Clone ID: ZEAMA-23APR03-CLUSTER22650_7
gtccaacgcagccaggatgcgacaatgcgaggcaggctgcttcatgcgtgaaaccaatcgtttcttcggcccggcacatgcaagcagccatgggcgagaaagaataggaccgccgccgccgctttgtccctccgttcacaaccttgtcgcacgagtctcttattcgtgacgaggatggcatcaacatgtgcggcaagggtaccgtctctgcggtgggcgccacaacgtggctgggtgggttcgtgggtttcagtacgcccagcgaaatgcaggacatcgggaggacatgccgttgtgtgcgctgctgttagcttcagaccatgcattgacattcacaagggaaaagttaaacagattgttggctctactcttcgggatttagcaaatgatagcatggaacttgtgacaaactttgaatcagacaaatctcctgcagaatttgctaaattttataaagcagatgaacttctaggaggacatgttataatgcttggcgcaaatccttcaagccaggctgctgcactggaggcactacgtgcatatcctggtggtttgcaagttggaggtgggataaatttggagaatgcaatgtcttaccttaatgaaggggccagtcatgtgatagtgacctcttatgtgtttagtgatggcaagatgaacactgaaaggttaagaaaacttgtcgagctggttgggaaacagaggctcgtgctggacctcagttgtcgaaaaaaggatggccgatataccattgtaactgacaggtggcaaaagttcagtgatgtgtttgtggatgaaccaacattagaatatctcgctgccctttgcagatgagtttttggttcatggtgttgatgtggagggcaaaaggttaggaattgatgaggaacttgtggaactattggggcactattcaccaatcccagtcacttatgctgggggtgtgtcaacaatggacgacctagagaggataaagaaagcaggcaaaagtcgggtagatgtaacaattgggagtgctctagatatatttggaggagatttgccttacaaagatgttgtcctttggcacaggaagcaaagtatggttggtcaagtgtgaagaaacacaaggtattgatcagtattaccagttcatttgattcaagcttctgcacaaagtatattttctgaacatttttgttcaaataattcagttaggctatctccaacagatcctctatctcatctcctatttcaaactattttgcgtcccctattttacactacactggagacagtcttcagtgatgtaattcaaatctgaggagcatgacttgtttgggtttggacaccagggttggcgctaactcaaaaggtggtcaatttgtgagtaatgtactgttcttgacagtttctgacctcgatttgtctattgtaactgaataggctgaattgatgctgatagatacattttgcctgcc

SEQ ID NO: 2132 - DNA, 1035 bp, Zea mays
  Clone ID: ZEAMA-23APR03-CLUSTER22735_2
aagtgacaaggcgtggccgcaagtcgcgcacgagtcgtggcgacggcatccaagcaaggaaaagaaataaagcggaaaactttaaacgggtacgcaggagatccagcgaaatggcggcgccgccgccgtcatatccagcggccttgaagccggagatcggccctgacggcctcgctcgagattctcccgtaatcgcctacaccgagaaggtcattttggaggagcagctgcagctgaagaaatacattcaggagaactattccaaaattcgtgatgtagaaaaggagttagagagtcttactttagaaatgaaactgacagctggaccaaagaaagcagcactagagcatctgaggaagaagattgaaatatcaacagagaaaatacgtttagctaaggtgaaagaggaacatgcaaaaaagacttgggaagttgctgcacaagttgttaaagacgaagaggatgctaagcagaaattatgtgatgacctaaaccatctagtccaggagagtgctgcttcccaatatgcaagattggaggagctgaagaaacgtttagaatctctaaatcccataagggattctgttaatgtgtcagtaagtgaataaccccaaggccatagatctgatgtttcatctttgaaattatttattcctcactgtcagtatttctgctttagtattaacaggaacgagtcttattgattatatgtttcctgtttgctagtagacattagttcttttgttgttttctgagcagataatgttggttttggtctcaactagtatgtgtatgttccgcattattgtctcaccttttcttgtatcagggtgtttatactgcacagcatgctactctgaattcagtacctcagcaaccaactgcacaaaatcctgcagatgtaactggccgtcagaatattgccacaaagcctgcttctatgcaacagcagcctatacctgcggaggcagaaaagaagagaagaccctcgaattcggcaagagggaggggtggtggtgtcatgatccttccgaa

SEQ ID NO: 2133 - DNA, 1485 bp, Zea mays
  Clone ID: ZEAMA-23APR03-CLUSTER22752_1
gactgctcgctcgctcaaacaactcgacagtgcagcggatttctcgaaagccaaggtggggaaagcagggaagcgaggccaagtggagcggagcggggcttcggctgggttccgcgcgcggccgctcgctacttccagtgttccatggtgtgggtgtgggcggctgtggcgatagccggagcctgaagcggcgggtggtgtgtggtgggcgcaaggagccacacggagcaggccgccacggcgaggaggaggaggaagaggaggagatggtcgtctgctccacgcgcaagtcgttcaaggactcgctcaaggtgctcgaggccgacatccagcacgccaacacccttgcagcggatttctcgagggactacgacggggcctgcctccagatgcgcatgtcctacagccccgccgcccacttcttcctcttcctcgtgcagtggactgactgcagcctagccggcgcgctcgggctgctcagaagtgctaccgccaatggcgatcaagatcgcaatcctgccccttctgtcgggacagcctgaaacgagtgaactccggggacctgtggatgctcaccgactgccgggacgtggtcgacatggcgacggtgacgagggagaacatcaggcgtctgttcatgtacgtcgagaagctgcccctcgtcgccccggacaacgagggtgaggcatcctacgcctacgaaaaatagctggagctagctgtagtgtagcagcacaccatctgtgctgtgctgtgctgtgctgtgttgtgttctgagagtgatgacgcatgatttatcgattattcatgcagaggggtagagggtgttcctcgtcctagctaggacgtggctaaacgcttggaccggggtgcggactctgacgacagacctttttcagtctatctaactgggtgtacagtctgctcaggtcctgtaaatataatgtctgtgcatatttatggcttcgaatgccccgttgtttttcagctgccatatatttgtgtctcccctcgctggcgcgggggagggaggccagggggagcgccgcggccccacgcgccggttgctcgcgggcccgctcaaggcgccccacgccgcaggccgccacggcgagccgctgtggggacagccggagccggtcgcctcccgcccgccccggtcgccccagggccccacccggcgcctgccgccccgccgccgccgcggccgcagcccgcgagggccccctcccccccgcccccccggcgcccaacgaatccccccccgccgccgcggccgcctgccgccgctccagcgccgcgtgagcccccccgcccccttctctcctgcccccccccgggcctgagccaccccgcggctcccgcgggcgggcgggcgcgctacgcgccctccgcccgcgccctctcctgcctggccgtgtccgggcccgccgcgcgcaggtgcgcccggggggcgccggcgtgcgggcgcgcccaccacctgcc

SEQ ID NO: 2134 - DNA, 643 bp, Zea mays
  unsure (1)..(643): unsure at all n locations
  Clone ID: ZEAMA-23APR03-CLUSTER22866_8
aaatatctctcaccacctctaccctcagcttctccccacctttggtnaggcnggctcaggcnaagggggcggccnacaaggacgagcgatggcgaccaaggtcatctgcttcctgttgctcgcatccctgctcctcgccgtcgcctttcccgtggtgaagaagggcggcggcggaggcggaggcggaggcagtgttagcggaagcggaggcggcaacctgaatccctgggagtgctcgcccaagtgcgggtcgcggtgctccaagacgcagtacaggaaggcctgcctcaccttatgtaacaagtgctgcgccaagtgcctctgcgtgccaccggggttctactgcaacaaggnngcgcctgccccctgtgtggggggggggggngaaaaccaagaaggagggcccaagtgcccctagaataagatccaccgcagctcccgtccgccattgtccccccttctccgaatctggaacgtgttgttcatcttcgaccaccccctaggcttggcattttattactagtataatgctagtgtccgcccgttgcttaatctggaatgctaccagccagaaaaaaaaaaaaaaaaaaaaaaaaaaaaaaaaaaaaaaaaaaaaaaaaaaaaaaaaaaaaaaaggggcggc

SEQ ID NO: 2135 - DNA, 2848 bp, Zea mays
  Clone ID: ZEAMA-23APR03-CLUSTER2287_21
gcacgagaccattacctagaacatcctaatcgaaaacttcgtcttctgtcactgtcccacactcctatcattctcgccttcgacttcccaggagcgcccagcgccgcggagcttctagaacacgcgactggggcgagctagacgaagctaaggaggcgcgaggggtgacgatgcggggcaggtgacggtgcggcgtggtggaggcgggacagaggccgggggatggtggcggcggagggtgggcccgtcgaggagggcgtcggggagagctcgtccccgccgcgcgtagacgcagccccagcgccctctggctccgttgggagcgggggcagaggaggcgccagcgacatctgcgccgaggtgctcgagcgcctcgtcgccgacggccacgcggaggcgtccgaccccgagttccgcgacaggctcgccgcacatttcgggcggctcccgcacagctatcagctggatatcaatgttgacaaagcaaccgatgtcttggtccaccagaatgtcttagcggaagcaaaggatcctgataggcgccctgcattctatgttcgtttcttgaggattgaagatattgatcctgcaaacgactccgatgcatctgaagaaggggatggtgatggtgatgatctctctgtaaggcaggacacaccatatactcacattcatgaggtagtattctccacaatcgacaagccaaagctccttagtcagctatctgcattgctatctgacattggattgaacatcagagaagcacatgttttctctactcatgatggctattctcttgatgttttcgttgttgatggctggcccattaaggatactgatggtttgcacaaagcactggaagcatccattttaagaaatgagggttcatggtctggttcatctcattcgtcagcagctgaaagaacactgcccttccaagttaaaggtggtgaatgggaaatcgataaacgacttctgaagatgggagggttgattgcttctggttcttgtggggacttgtatcacgggacttacctcggtgaggatgtagctgttaaagttctaagagctgagcatttgaataagaatgtttggaacgaatttactcaagaagtatatatactaagagaagttcaacatacaaatgttgtgcgattcattggtgcttgcacaaaaccaccacaattttgcataattacagaatacatgtctggaggaagcttatatgactttgtgcacaagcagcataacgttctaaacctcacgactctattgaagtttgcagttgatgtatgccgagggatgtgctacttgcatgaaaggggtatcatccatagagacttaaagactgccaaccttctaatggacaacgatcatgctgtgaaagtggctgattttggcgtagctcggttccaggatcaaggaggtatcatgacagctgaaactggaacatacagatggatggcgcctgaggttataaaccaccaaccctatgatagcaaagcagatgtgttcagctttgccattgttctctgggagctgataacgtccaagatcccatatgataccatgacccctctccaagcggctgtaggtgtgagacaggggttgcgcccaggacttccgaagaagacgcacccaaagctgttggacttgatgcagagatgttgggaagcagatccatccgaccggcctgctttctcggacattttagccgaactggaggatcttttggcacaagctcagggaacatcgggaaagacggtccaagatccatcaaactcgaacgcgaaagattaacccccatgccatgcacatacctgacattttttctcaatccagtgatttgccacatctaggattcgagttgccaattatgaggaaatttgttttgcttgtgtacattcgaacaatcttcttggggcctattttttatgggcacctcattattcttatacaaaagaaattgggctcgacgcttgcgataccacacagattcaggggaaaaaaaaacaaagacggttcagcaaaacgtatcaaaatgaggctccctgccacaggttcagcaaacaaattccagaggccaaggcatgggtttattggagctatttgacttcctgaaaggagccgcgccttcaaagttgcgttccgttatcatttcagtttgtcgaagagctttggtgcaacacacttgtcaacgcatgaccagtagtcgaagtattggccggtgcagtgcttctgcccacttccgtcgctctcgactctcttgacgcatttctcataatcatacaatgtttttacacattgcggcttgcaacgttcctcaaggtaattcttctgatcaacaggttcagcatccgccgctgagctcggcgctggtgatcagcctgagcacgggcgtgtcgctcttcctgggccgcttcgtcttcttcaacttccagcgggagaacgtggcgaagcaggtgcccgcgcagaacggcaagacgcacttcgacgccggcgacgagcgcgccaaggagttcgcggccctgctcaagtccaacgaccccgtgggcttcaacctcgtcgacgtcctcgcctggggctcgctcggccacatcgtcgcctactacatcctcgccacctccagcaacggatacgaccccaacttcttctgagcggtcgtcgaggatgtattctacagacagccgtgtgcgtgcgtgtgtgcttgtcatgtatccgatcaaagtttggttaatttggacaagtagtgcaactgcagaataattggtatttgtatagtgcaccatgccaacatgaatttgatctgtctctgtcttcagaaaaaaaaaaaaaaaaaaggccccta

SEQ ID NO: 2136 - DNA, 2014 bp, Zea mays
  Clone ID: ZEAMA-23APR03-CLUSTER2290_1
tgccgcccacctccgcccggagccgcccgcaggacccccgccgcccccgccgccgcgggggcggtagtctccgtcgccggaatttccagccgcgccgcgcaggtcgccgccgcagatcggcaccacccccttgaagaaggctacgaatccagtccccccgctccgggccgggaggggcaagcgcccgacgtccccgcacccggtgggggtggcgcataaggacctcgactgaaagacggctggcccgaatcggggtcgtcttgttttcccccgccgcccaccgcccggtctttccaccggtcccgctgtccggcgcctggctggcagcctacccccgcccccgccgcctcgccgtcatccgcgccgcgcgccctctctcccgccgcgggaggcggggactggcgccgggcgccggggggctccttccttcggccctccgcgcgtcggcggcggcccgtgctcgaggagggccgcggtgggttctgcacctccggacccgccgcgaacgagatcggggggggtacgtgcggtccttttgttttttggaattaatggttgtccgatgcttgtcattcatatgagttctaatatcatgcccccttaaagtactcatcatcaaaagtttccatgtgaatgttttaaatgtagatttaaagggttgaaagacatcaaacagttattcaaacatgtgtaatacatatgcagacattgaagcagcatataactgcctcaaggaaaaatatagtgtagcagatgaggatataatcttatacggtcagtctgttggaagtggtccaaccattgatcttgcttcacgattgccagacttgcgagctgtggttttgcatagtcctattttatctggagtaagagtactatatccagtcaaacggacgttttggttcgacatttacaagaacatcgataaaattggtttggtaaattgtccggtgcttgtcatccatggtacatcagatgatgtcgttgactgctcccacggtaaacagctatgggaacattgcaaagtaaaatattctccactgtggttaaatggtggtgggcactgcaacctcgagctatatccagattacattaagcacttgaagcagtttgtgtcaagcgttagcaaaaaaacatcaaagccggaccagaaagagataatggcaaaggatggcactaccagtaaagaaagagaggaagcatactcggagaaacctcagccggcagctaagtgctcacagtcacagatctcacgtaagagcctagatagccgagttgggaaatccaaaacagtggatgttcctgataaatcacggatgagctcagatgacatcgacaagttccggaggagaaggtgcttggtttggtgatgcctatgttgtgcacagattgtcgaacagtacctgagtgaggatactatagcatggaaatcaagcaactttattacatacatcatgctgcgaggaatggcatcagccgttcctgcagtggagaggaaagaactgttaaataagaaaaggaaccagaaagctaccatcatcatccatcagagacaaagccacttgactgaaagctggtagtttcccagttaatttaacactgacactgacaccgtcgacatgttttgcagcaccggttagggtttccccatcatctaaaagtgtacaattattgtatgtaatcacgagggacctatacaaacatttacagccgctctgtgcaaagtctgaaagcctaggagcaccatagtttatcctcggtgcatcagcatcgggcccacatgcgttgtggaaccatttggctatgtgagctctgcatactgatctactccagccttattatacggatcgtgctccacttatcaactgtgacacggcagcaagcggatcatgctccacatatcaattggaaactgttgggtgaaaggtcagggcaggcacaagtgacatctatttactagtactcatttatttatatgtgtattatatatatcattcaccactctttcacatat

SEQ ID NO: 2137 - DNA, 1555 bp, Zea mays
  Clone ID: ZEAMA-23APR03-CLUSTER22917_4
gttttatccgcagccacaagttttgctctgcgtctcccaagttcccgatctcggccgcgcgagtcagtgcaccccgtgcgtgatcaacaggtccttcctgctgccgcggccgcctcccacttcgactgctcccgcacctttcgttcacgcaagcgcaacctgcttctcccgctggctgtctcggacaccccctccctcctgccacgcatcctccccgcccacgagtctcccccgcaaccggataataaggaagaggaagagaaaccgtgcggtgcggcgaaaggaacagtgaaaaaggaagaatctctctgatcgaggttcctgtccggcttgcagaatcttggcggacagccatatatggatgtactgctaggttccgggaggttcttggcgcgacggcctcccctcgcgctcgtccctcgctgctctcgaggctccccggacaaaagcggcagcgacaaaggtgaaacctctgctgactgggacaaggcatggtctgccttcaagaagaaagggaagaggaccctcttttctgatttctcaccagacaagtatgtgacctggaacccacggcgcagcgagtatccgttgtcagaagaggttgatccaatcaagagaactgaaagatctaacttgatgctttgcacgagtccccagttcacgttggtgcgcgcgattatcatcgtcttgacattactaatctacacactagtcgttcctcccaagtcctgcacaagtgacagctaggagctatagtaccccggagctctcgcccgctccgccgggaccacccactctgacattagacacaacacagcccacacggctctccagtccccagattcccgcgccttcctgagcaagaagacacccgcggcgacgatggagcggctgccgccgcaccaggagaaggcggcgaggcggacccttcctcggcgcgggcagatcaaggcgggcatcttcgcgagcctgttccggtgcatcgtcgcccccgaggcacccgcgcgcaaggaaggcggcacgaacaaagatggcagcagcagccaccaccgcggctgcaagaacaaagatggcggcagccaccgccgcgtctcccccggtggctgatgcggttcgaaggagtcaaggtataaataacagggagagttgacgatgtgggggttgcgatgatccccgttgtgaaacgctgcagcctgcggcgccggtcgttgaactcgcggagcggaggagggtcttcggggggtggtatcgggttagctgaatctgtataatggtatggggttcagagttcagacagggtcagggcagtgaattgtctggactttctgtggtcggatggggtctctgaactccggcttcagctggagtgctatgtaaatatgtaatgcacgctcttgtctgtgttctttagcggcaacttcagtgccttagccctttggtgtttcctttccaggtcaccactgtcttgtggatattattgctcttgttggttaatgaatcttctcagtgttcttacttctgggaaaaaaaaaaaaaagaacggcccttgagctcc

SEQ ID NO: 2138 - DNA, 1366 bp, Zea mays
  Clone ID: ZEAMA-23APR03-CLUSTER2292_3
ggttcgtgcctctctatctcccacctttcattccttcgtaccgcctcgccgttctcggagatcggggtccggccactgcgaattcccggttgttgttgggttggggttcgggcgccgtgtttgacggttatctagtggagttgcctccttcaagctactctaatgtcctttctattcaagtctagcaatggcggcaccactgaaaaaatcccatccccagaagaacagcgagaaaaaataaatgaattacgcaaggagcttggtgaacactcatcagcagccattaaagacttcctttcagatgcctcgttagcgagatttcttcgagcaaggaactggaatgtgcagaaagctagtaaaatgatgaaagcagctgtgaagtggcggcttgcattcaaacctgaaaacatctgttgggatgatattgcagaggaagcagagactggaaagatatatagggcggattataaggacaaacatggcagaactgttcttgtattgaggcctggcttagagaacactacctcagcaataggacagatcaaatatctagtctactctctggagaaagcaattatgaacctgacggaagatcaagagaagatggtatggctgacagatttccagtgctggacattgggaagcacaccactgaaggtgacccgtgagactgtcaatgtcttgcaagactgctatcctgagaggttggggcttgcaatcctttacaaccctcctaggatatttgaatcattctggaagatagtgaagccgttcctagaccatgagacccgcaagaaggtgaagtttgtgtactccaacgacaaggagagccagaagataatggcagaagtctttgacatggaggagctcgactcggcattcgggggaaagaacccagcgacatttgagtacaacagctacgcagagcagatgcaggacgacgacaagaagatgggatcttcgcacggctcagccaatagcttgcttggatcagctgggaaggaggctaatggcgcagactcggacgcctcaagcgaggcctccttctacagtggaactgactctccgacacatgagaacggtgaacacagcatcgcgaagaagaatggttgagctgagctgaactgctttgattgctcaaactgagggagctgactaatggagttggtcaacataacagttatatctagcttgaacgattgtcaggaccgatggcgatgacagattccaggctggttagatcaccttgtcgggtctaggcggaatgtatatttgctgctcatgatattatagtatgtaagaccataaacggtgagtttgtgatgcgctatatatatcttggaataaagttcaacttctccgcggt

SEQ ID NO: 2139 - DNA, 884 bp, Zea mays
  Clone ID: ZEAMA-23APR03-CLUSTER22955_3
aagaacaactcgttcgtccgtcaccatagaacgctatcccattcccatcttctgacacaaatatccgcgtgagcgtgacacccgacgtccccctcccgctccgggcagcaacagcagcagtcatgcggatagcggtggtggctcccgtcgcggcggcctactcatgctcctcctccctcgctgcgccggcgagtgcgccgagccgcgcgcacgtcgcggcggccgggatgtcctccagggcgtcctctttcgtcggaggcgggctcgcggcggtggttgcgtcggtagccgcgcggccgaggagggcgggctccgggagagacggggcgctcgggtgcaagtgcctcttcgggctcggggtgccggagctcgccgtcatcgccggcgtcgccgcgctcgtgttcgggcccaagcagctccccgagatcggccgcagcctcggcaagaccgtcaagagcttccaggaggcggctaaggagttcgaaagtgaactgaagaaagagcctggtgaaggtggcgatcagcccccacctgcaacccccacggcgacggcggtaggtggcgcggagaaggggcttgaggcatcaagtagcaaggagagcacgtgaggatgtatcaagtgttgttagtgctgtttatgtaaaattctattctgggccacggccggccatgagggggtgcggcgggtgcggtcgcaccgggcccccaaaaacagagggcccctctggacactggacgttagtattttttccccgctaagcatatctaccctagatataaatacacaagagcgatgcactattgatcagtttcgtttagattgttaaactaatgtctcaattacttatctaatattcactttattaaaaaatagtatttgattt

SEQ ID NO: 2140 - DNA, 598 bp, Zea mays
  Clone ID: ZEAMA-23APR03-CLUSTER229679_1
gacaaacgacagcggcctagccccgcctccccgttatccgacctatccccagcgtcgttgggtcatctccggcagctcccccgctaacacctccatggcgtcgaagcaggcggcggctggcgaagcccttgcggcccaaatcaacggcatgtcccgccctgagatgtacgacatgatgtccaagatgaagaccatgatcgaccacgaccaggagacggtgcgccgcatgctcgtcgacaacccggacgtcacccgtgcgctctttcgggcacaagtggtccttggaatggtgaaaacaccaaaaactacacaagctttggacatggtccaacccacagcagtgtcaacagcaccttcctcagtcaaaactactgcaccagatcatgtcagcttgcccccgcccccattacctgctaaccagcagagtgttgctcaactttctgccccgttttcatctggcttgtctaatgtgggatcgaccatggaccctcctactatttcagcaaatccaccacaatcagcacaagcaaaaggataccttatccatcagatgccttcatcagctcctcagccatctcaacatccaaatatggcccta

SEQ ID NO: 2141 - DNA, 659 bp, Zea mays
  unsure (1)..(659): unsure at all n locations
  Clone ID: ZEAMA-23APR03-CLUSTER22967_5
cgcatgtcagtcgctaactctgacacctaattcgctcccctgatctggtctagtctgatctaatctggtgcttcgccgtcgcggctatcggcgctagtctcgcagcaggagatcgtatcgctgtaccaccgcttctgccagctcgaccgtaacggtggtggcttcgtctccgctgacgagttcatgtcggtccctgagttcgccgtaaatcccctctcccagaggctcctgaggatgctggatgggctcaacttcaaggagtttgtagcatttttgtcagcttttagcccccgcacaagcctgcagcaaaagattgaatttattttcagggtttatgatactgactgcaacgggaaggttgcttttgatgacatcttgagcatcttgcgagatctgacaggttcatttatgacagagcaacagagacaggttcgtactctggatttccggttccctcttgggttatcacacgacatagcaattcttgcatgggcatgaactgctagctagtttcagctgagaagttatctcagtaaaacataatgccttttgcaaggagtttatctgcaaattatctttntctcctcccccaaaaaggcactattggcaccatgcggcaggatatagnttcctggagttaaagattcttaatttgcgta

SEQ ID NO: 2142 - DNA, 1831 bp, Zea mays
  unsure (1)..(1831): unsure at all n locations
  Clone ID: ZEAMA-23APR03-CLUSTER23030_5
agttccccacccacccccacacccccgtctccctcgctcgcctcgcgcggcgtgttgcctttccgtgtggtctcttctcgccccaggcttctccacccgcccaccccaacatccacacctccttcgctcgcccgctccttctctcctcccctcccctccgctccccacccagacgagcgcgcgcggcgacccggacccagtcagccggactcccatcccctcctccccaagcgagccgagctgcgagcgctgctcgcgcggtcggcccatggcgagcggcggcggcgggggcctgggtgcggctggcgcgggaggccggatgcccacgtggagggagcgcgagaacaacaagcgccgggagcgccgccgccgcgcgatcgccgccaagatcttcgccggcctccgcgcgcacggcggctacaagctgcccaagcactgcgnacaacaacgaggtgctcaaggcgctctgcaacgaggccggctgggtcgtcgagcccgacggcaccacctaccgccagggaagcaagcccatggaacgcatggatcccatcggttgctccgtgtcaccaagcccatgttcctcgtaccaaccaagtccgcgggcgtcatacaatgcaagccctacctcgtcctcattccccagcggcgcatcctcccccttcctccctcccaacgaaatgcccaacggtatcgacggcaatccaatcctaccatggctcaagacattctccaacggcactccatcaaagaaacacccgctcctcccaccgctgctgatccacggcggctcaatcagcgctccggtaacccctcctctaagctcgccgtctgcccggacgccccggatgaagacggactgggacgaagcggccgtccagcctccatggcacggtgcaagcagccccacaatagtgaactccacgccgcccagccccggccggcccatcgcgcctgacccggcatggcttgccggcatccagatctcgtccaccagtccaaactccccgaccttcagcctcgtctccaccaacccgttcggcgtcttcaaggagtccatcccggtcggcggcggcgactcgtcgatgaggatgtgcacgccggggcagagcggcgcctgctcccccgcgatcccgggcatgccacggcactcggacgtccacatgatggatgtggtctcggacgagttcgcgttcgggagcagcaccaacggcgcgcagcaggccgccgggctggtgagggcctgggagggcgagcggatccacgaggactctgggtccgacgacctggagctgaccctgaagctctagggcaggcgtccgggtgctgatggttaacgtagctaacgtgaggagttgctggtggtgttgttttttttagtgtacctgttattgttctctagttgctgatggaagccggatcatggcctcggttcggttagattcacatctgtggtggtggtaattgtggtgttattttaactactcgaattgtagcccggcggagctgtggtcggctagctgttggactccacttggctggtgcattaagctccttgtttgctgttgttgtgacaagtgtaaattaatgtcagaaaaccattcggaaaaaaaaaaaaaaaaaaaaaaaaaaaaaaaaaaaaaaaaaaaaaaaaaaaaaaaaaaaaaaaaaaaaaaaaaaaaaaaaaaaaaaaaaaaaaaaagggggggcccccttttttttttttttttttatggaagaaaacttttaaattcttggggtaccttcccaaaaaaggtaatttttttgccaaatttttggctttcgaccaaatttttaataacctttttttagg

SEQ ID NO: 2143 - DNA, 1000 bp, Zea mays
  Clone ID: ZEAMA-23APR03-CLUSTER2308_2
gctcgatctgttttcgttttgtaagattcattcacgtctgcgctgtggctctattcagatttggtcgagatttctgggtttgaccagctgatggctgatgtcgacgagtaccgttgcttcattgggaacctgtcctggtcaacgactgatgaaagcctcaaggatgcgttcagcaaattcggcaacctcactgaggcaaaggtggttcttgacaaattttcaggacgttctcgtggtttcggctttgtaacttttgatgagaagcaagccatggaggatgctattgagggaatgaatggactggacttggacgggaggaacatcactgttgataaagctcagccacaaggacctggtagagaccgtaatggtgaccgtgattatgaccgcgagcgtggatctcgttatgaacgtggtcgtgactatggtggtgggcgtgcaccgcgaggtggtggtggtggtggtggtggtggtggtgactgcttcaagtgtgggaaacctggtcattttgctagagagtgcccatctggggatggtgggagaggggacagatatggtgggagagatgacaggtatggtggcggtggcggtggcggtcgttatggttctgaccgtggtggtgaccgatactctggccgtagccgagatggcggcagctatgggggtggcgatcgctacagccgtgaccgatcaggtccttactgatggccttagttcttgattgagaagtatgtgccatccaggtatgaaagtctatctactattataaggcttgttattgtgtctggaactttgttatcctgtagttggagtcgacatgtaccgtgagaaatcagctgctttgttatagaccgtattactgaccggtttattatcgtttcctgcttgccaggcatatgacttggtcatagtgcttggcgcttggatcctgcatgtttgcttgatgtgctatttggctattaaaagatggattttgtcaaaaaaaaaaaaaaaagcggcc

SEQ ID NO: 2144 - DNA, 1365 bp, Zea mays
  unsure (1)..(1365): unsure at all n locations
  Clone ID: ZEAMA-23APR03-CLUSTER2308_4
aattcggcacgaggccgccctctgtgcccaaaggagctcctctccatcccatctccaacgtcgccccaacccccatcaccgacagggaacccacctctcacgtcgacaccgccagaggaggagatggtggagatacgggcgttgcgatccgaggcagcacgctagagcgacgagagcgtggcgacgtggagatcatgggagtcctgcgcagcgtcgcggcgaggcgcccgtcggggaggcagcgggcacggagagagcggagagtgacggcgacaacgggtcccgcctgtcgcgcgaaccacggaaaattagggttctacttctagcccgggccgactccactccaatccaatcctggggcgagcgactgcctccttccctcgatctattccccatcttgtcctccctttgntaaaaataacgaggcagaggcatcttcgatttgacgtgcgcttcctcttcctcgctcgctctcggtcgcagatttggtcgagatttctgggtttgaccagctgatggctgatgtcgacgagtaccgttgcttcattgggaactgtcctggtcaacgactgatnaaagcctcaaggatgcgttcagaaattcggcaacctcactgaggcaaaggtggttcttgacaaattttcaggacgttctcgnggtttcggctttgtaacttttgatgagaagcaagccatggaggatgctattgagggaatgaatggactggacttggacgggaggagcatcactgttgataaagctcagccacaaggacctggtagagaccgttaatggtgaccgtgattatgaccgcgagcgtggatctcgttatgaacgtggtcgtgactatggtggtgggcgtgcaccgcgaggtggtggtggtggtggtgactgcttcaagtgtgggaaacctggtcattttgctagagagtgcccatctggggatggtgggagaggggacagatatggtgggagagatgacaggtatggcggcggtggcggtggcggtcgttatggttctgaccgtggtggtgaccgatactctggccgtagccgagatggcggcagctatgggggtggcgatcgctacagccgtgaccgatcaggtccttactgatggccttagttcttgattgagaagtatgtgccatccaggtatgaaagtctatctactattataaggcttgttattgtgtctggaactttgttatcctgtagttggagtcgacatgtaccgtgagaaatcagctgctttgttatagaccttattactgaccggtttattatcgtttcctgcttgccaggcatatgacttggtcatagtgcttggcgcttggatataaaaaaaaaaaaaaaaaagcggcc

SEQ ID NO: 2145 - DNA, 1875 bp, Zea mays
  unsure (1)..(1875): unsure at all n locations
  Clone ID: ZEAMA-23APR03-CLUSTER23137_1
attttctctggctctgccctctccttcctctcctcaaaagtctctgtaaaaaaagtaggtagtgtctcttttcgaccgctgcagaggagcgagaggcagctcccactcgtgccgctgttcctcgcgccatggactccttcagcttcctcaagtacctgcgcggcggcgtggtcgccggcgcccatcgcgcgcccgcggccgccacgaccatcgccgcgtcggcgtgcgagtacggcgacgacgcctcctccttcttcgacctggagttcgcggtgcccggcgacgagagcgccgcgtccgacgccgaggaggagcgggtcgagctcagcttcgctgcggaggacgaaggcgtcgtggcgcccgtggccgccgtcgcgccggcggcagagncggagcctgaggccgcgccgccgccgccgccgtcgctgccccgtccggccaccaggtttcgcgtgctgctgctcaagctacggaagcccaagggcggccccgncggcggcggacgcggccggcaccagcgccgcgccggtggcgagccggttcctggtaaagctccgggtggacgacgcgacgccgctggcgtcgctgttcacgcgcgacaacagctcgcgcgcctcggacgccggcgcggaccggccggctacggcagcggcggcggcggcggagccccagcagcaggagcaggaggtggcggcgtcgatcaccgcggaggagcggcggttcgccaaggaggtggtcctgcggtacctgagcaagatcaggccgctgtacgtgaaggtgtcccggcggtacggcgagcggctccgcttcggcggcgcggcgagcgagggagaggaggagacggacgcggaggcggacccgtccccgtcgcaggctcctccaccgtccgtgccggcgggggtggtggcgtgcggcgtgcgcgcgccacgcgccagcgtgcccgcggggctgaagcaggcgtgcaagcggctggggaagagccggtcggcgtcgtccgcggttgcggtggcgccgtctcccgcggcggcggctctgagtggcccgcagcgcagcggcgggacgactcgctgctgcaggtgcaggacggcatccagagcgccatcgcgcactgcaagcgctcgttcaacgcctgcaatggtacgggcacgggcccacctcagcgatgcaacagcagcccctagtaaacaaagcacggcatgcatgcatgcaatccggctgcatgaccttgccgtctagttccttcgatgatgatcttttgtcttcctgtgtgatggtggttgcggttgcattgcattgcactgcactgcaccgcaccgtgtgttgtgcagttgtccagtggggtatgcgacggagagaggctagtagtaccaactccacttgtaaaaatcctggtacgagcactcgtggaaggtatgtgcacgacctgctctttcatggctaaaaaaaaaaaaaaaaacctcggtccatgacggcgacgacgggcggcgaggcgagggcgggcggcgccggggaaggcgcgtgaggcggtcccgtacgtggcggcaagactggaaaggcgtgacgcggactgtggtggtgttgtcagcgtacgtagatggtggtagtcggctatccgttaataaagataaaatattagtactagtaagggtttggaccggacgaaaggtttgtctttagcgccgcgctgtgggctgtctacttggatcatcatagtttttgtctgtctgtctgtccgttccggtgccggttctgtggtggttgtgtgctgtgctgtgtagcagtggccactgagtgactgactgactggccagtggtaaacgtgctcctcctatatattatattattattatatatgtaaaaaaaaaaaggcggccg

SEQ ID NO: 2146 - DNA, 1453 bp, Zea mays
  Clone ID: ZEAMA-23APR03-CLUSTER2319_3
attcgattcgtcgcaatcctcgccctcactcgcgtgttcaggcaagcgattccgtcggttattgtgatctgcgcttttgtttcttctcgattgcggggtgtgacgaatctgatttgccgaatgcgaggcgtccaggtttgtcgggctgccccgggataggaatgcttctgtcgacatgctaagccgcggagccgtgcggttgctgttgtatcgtctccggcctccgcctctgcgtttgagttggaatccgagcggtgctatgccatccgccgccgccaaccgctcctgcctctgcaggttcgcctactcgaccgcgcgcgtcgagaggggcaggaccctgccgggcaaggcggtatttcttgatctgggagccgggaggaggttcacgccgagcggcgcgcttagcttgaggggttgcttgggttggcgggatggtggcggcgacggcgagttcaggaggagggtggacggagaggcggcggggatgaaggcgcaggtgctcaccacgcagcggcagctgatgcgcgatccggaggtgctgccgctcgaggaggccgccacaggcaagagcatgaacgtgaatggtgcctgtcggcgagggaagcggctagggtttccggagcaggcagcggctaagatggtggttgctgttgatgtagatgaagttcttggtagcttccttgcggctctgaacaaatttattgctgatcgttattcttggaatcactcagtatcagaatatcatgtatacgagttctttaagatatggaactgttctcgagaaagagctaattttcttgtccacgagttcttcacaacccattacttccaagatggcattcatcctattccgggggctcgagatgctctccaaactctttcttctttctgtagcttgtctgtagtaacatctcggcaggatgtaattaagaatcacacattggaatggattgagaagtattatccaggcttatttgagcagatccatttcgggaatcatttcgctttggaaggtcaatcaaggccaaaatcagagatttgcaggtctttcggcgctcaggttctaattgatgacaaccccagatatgctctagagtgtgctaatgatggcatgagggtccttctgttcgattacgaaagctcgtatccttggtgcaaaactggagccgatgaactgcatccgctggtgacaaaggttcacaactgggaagaagtcgaggagaaacttctctcttgggtagtacctgatagctgacactcttctgtcttgtgagaagcactgcttgagaccagcaaatgattccttttgcctggtttctaaaggaacctgatagggtgaaagactgcaatgttcctagagcttgattttcaatacagatgtcgatagcctctccaaaaaaaaaaaaaaaaaaaaaaaaaaaaaaagaaaaaaaaaaaaaaaaaaggaccctaa

SEQ ID NO: 2147 - DNA, 711 bp, Zea mays
  Clone ID: ZEAMA-23APR03-CLUSTER232179_1
aaatagaaagagagaggccgggatcgatatcgcgataggtacgatggcggggatggccgcggccgcagtagggtcggcgtcgtcgtcgtccggcccggcggttatgctgctgtgcggcaaggcggagaaggtgctgggcgtgcagaaggcgcccgggagctgcccctactgcggcggcgtggtggcggccacggacgtggaggccgagtgggcgctctgctgcctgccgctctgccgcaggaccaagcggaggttcgcctgcaccgcctgcgccaggcgcctcgtcacctacccggctatcctgcatgactagaatagaagaagaaggtcgacgacgtacaccatcgacggccggccggttttaatttccttctactatcttcattcgcgtcttcacctccggcactactccgatctccagatcgaccaagtcatcgagaagagaggtgcatttggtggtcgcccgttttggtaagaagttgaattcgaacctgaacctctgttgccaaagtgccaactttagcctactccaccgatttccagcgcggacatgctcttggcgtatttgctattatatgctagtatatgagatcgaaggcccgtggttaagccaaaaaaaaaaaaaaaattattttcaaaaaaaaaagaaaaaaaaaagaagaagaagagaaaaaataaaagaaccataaagagaaagaggaagagtaagaa

SEQ ID NO: 2148 - DNA, 1572 bp, Zea mays
  Clone ID: ZEAMA-23APR03-CLUSTER2324_3
gcacaaccaagaggcaacagagcaacgccagccacacacgacacgaaccaggtaaccagctgccgaggaaccctagcggaacactgtgcaggtgacggcggcgcgctaccggtgacggggtataccgtatacggcggcatcgtccccctcggcccctcctccatcccggcgcggcggcgcaggcagccagccttcaggggttaaacctgatgccaatccgcaggggttaaacctaatgccaatccgaagggccttgctgagctcgcctccatcgcccaggacctcgccgcctcctctgtgtcgttgcccagaacctcacagccaacacacgcatcctcttatcgtgcctcatcctccaagacgatgggctgctccccctacgtgcctcctcctccacgccgacaagcatctccccccgacacgcatcctcctccacgccgtgcttggtggtggcggcggacggtggttacctggggctgcggtgggccgtgcctggcatgcaaggtgagcagtccagcatcgagtggtcagtgtagggtgtgccgcggtctgccattgcgctgattgaagcagagtcagtgagttactgccgtgcgctgattggagccttcgtagccggctggagcgccgccgagaggtgaaggccacacgcgattgctgattagagattagagcagatccattgagccaccactccacctctgttcaccggcacgagtgaattgaattgggttttctgactcagattacttgttcactgtggggtgcaagcttaatcggccaccatggatgttgataagcaagaaacaatggaggagaccatccttgttggtgatgatctcatgcgtgggccgccatcccctgtcataccgaaagagatcgcatcacatgtccttgaagatgttgagctttgtgatggtatactcaagaaccttttcttatgcctacagatcaatgatattgagccattctgccaagatgaaattgtgctatatcgacagtgtgctgagaaaagggacaaggaaataagagagcggatgcaaaatagtgaatataaattgggtttttcaatgcccctggaagaagcgaaagagagagctactcaactccaatcagaagtaacactgctagaaaggcgcatgattcttgctagtggacttgagggtatggaaggatttcgccagagatggagcttgcatggacagcttgaagacacaaggaaaaggctagaagcactgaaccatggcatggcaaaacgagagaaccaaagttctacggcggagaggacaaaatctccagctaggaagaagtggttcttttggtaggttagtatcattgtcagacttgagaaatattgtagcttgagttgtattagcggcaatgctacacactttttaacttccacagcactctgcctccaactagccacttaatttgctaacaagtaacaagcgatttgcttatatatagctgcagttttaaatgtttaaatcatgtattaaaccttgtaactgcaggtgatggtacggttgcattccattttgtgatttatgacagccacttgccctcctc

SEQ ID NO: 2149 - DNA, 1731 bp, Zea mays
  Clone ID: ZEAMA-23APR03-CLUSTER2326_2
acacactactttccctcgtgcggccgccgccctacaacaggtgccccaggtcttcgctgcgccattcgccagcgacgagcacccaacaggctcagaaacatcgctgacatccacatgcaccacagtagttcagtagagtagctgttggaacccacacaccggcgatggcaactgctcctgtgacatcctccatggctacgaactccacctgtgtgcggctgcctagcatgcccctgaggcgtgcacccgccatcgtctcctttgcctctcgtccatggtcaaccgcaatgacctcatgtactggattgtcgcggcactctgatgtggttgccgccgcggggcaccagaagttgatggggtctttgaacaacaacgagggactcatgtttggggtggttgtggcacggttcaacgaggtcgtgacaaatttgttactacagggtgccctggaaactttcgagcgatactctgttaaagcagaaaatataacagttgttagtgttcctggaagctttgaagttcctataacggcacaaaagcttgggaaatctggaaaatttgatgcaattctgtgcattggagctgtgattagaggtgacacaacccactatgatgccgttgcaaactcagctgcatcaggtgtactcaatgctggattatctgctggtgttccttgtgtatttggtgttctaacctgtgaagacatggatcaggcactgaaccgtgctggtggcaaggctggaaacaaaggagctgaagctgctcttactgccattgagatggcctcgctgttccggcatcacttaggctgacaccttgtgtattctgattttctatacacgaggcggcagcatttcctcctatcaagagttttggctaatagagagcttttctgccgcggctagtataatttatttccaagtttgttggtccggtgcggattggttgctttccttctgagacctgaaaagctcacaagacatgtctgtaaacctgacatcgtgaataattgtctccacgaacgaaatatggtcatgaataaagctgcacaagtgttttgttaaaaaaaaaaaaaaaaaagcggcccctttgaagttcctataacggcacaaaagcttgggaaatctggaaaatttgatgcaattctgtgcattggagctgtgattagaggtgacacaacccactatgatgccgttgcaaactcagctgcatcaggtgtactcaatgctggattatctgctggtgttccttgtgtatttggtgttctaacctgtgaagacatggatcaggcactgaaccgtgctggtggcaaggctggaaacaaaggagctgaagctgctcttactgccattgagatggcctcgctgttccggcatcacttaggctgacaccttgtgtattctgattttctatacacgaggcggcagcatttcctcctatcaagagttttggctaatagagagcttttccgccgcggctagtataatttatttccaagtctgttggtccggtgcggattggttgctttccttctatgagacctgaaaagctcacaagacatatctgtaatgtaaacctgacaccatgaataattgtcgccacgaacgaaatatggtcatgaataaagatgcactagtgttttgttagaaaaaaaaaaaaaaaaggacggccgctgtatagggtgcccgcttttgcggacgcgcgcatgccgcgtcagagctcttatatagt

SEQ ID NO: 2150 - DNA, 1069 bp, Zea mays
  Clone ID: ZEAMA-23APR03-CLUSTER2327_35
atccatccgcgcgctcttaatttagcttcctcctccgatcctcacctactagcaggcacagacagcagcatcgatcggatcggagcagcacagcgcgcgtcaccgcaagctcaagtgtcttcttccttgcttgcttgcctgcttacctctcagttccccactcacgtctcttgccgtacgtacgtgcgtccaacacaccaggtgaaaatgggctcggagacggagacggtcaacgtggaaggcatcccgttcccggcggagatcaccgtcggcaaccctctctccctcctaggcacaggcatcacggacatcgagatccacttcctgcagatcaagtacaacgccatcggagtctatctccacaacgccggcggcggcgacagcaccacgctgctgggccacctcggggcctggaagggcaagacggcggaggagctcctagcggacgccgccttctgggccgcgctggtggcggcccccgtcgagaagctgttccgcgtcgtggtcatcaaggagatcaagggctcgcagtacggcgtgcagcttgagagctccgtccgcgaccgcctcgccgccgccgacctctacgaggacgacgaagaggaggcgctcgagaaggtcgccgacttcttccagtccaagtacttcaagccgggctccgtcgtcaccttccacttcccggcaccggcctccgcctccccgggacccgcggcggagatcaccttcgcgacggagggcaagggcgacgccaggatcgcggtggagaacgggaacgtcgccgggatgatccagacctggtacctcggcggcgactccgcggtgtcccccagcaccgtccgcagcctggccgaccgtttcgccgcgctgctcgccgtcgcagcgtgatttatatgatgctcagtctgctttaatctaatttccggccggttggtcgagttgcgttggatttgagttcgtgaatgtccgttctgtacgcgtcttgtctcgtgtgtgttgtcgtttgcagcgaatttgcaagtaataataataaaaagtatgtcctgtaggttgtgcaaaaaaaaaaaaaaaa

SEQ ID NO: 2151 - DNA, 1942 bp, Zea mays
  Clone ID: ZEAMA-23APR03-CLUSTER2336_3
ctctcacttcgcgggtacgcagagtcgctagacgcacctcgctcgcaacttgttggactcgaaggggcaatagacagcaggcagggccccgaactgcgggaggagattcccaaggatctcgtcggccgggtagaggaagggacggggacgggcgatggcggcggacggcggcggcggggtggactgggagagcctggcggaggccacctccggggcaatcggctcgctcgtcagcaccaccgtgctctacccgctcgacacctgcaagaccaagttccaggccgagctccagacgcaccagggcgctcagaagtataggaacctttcagatgtcttttgggaagcgattcgtaaaaagcaatttttgtccctatatcagggcctgaacacgaagaacattcagtcttttgtctcctcgtttttttatttttatgggtatagctattttaaaagactctacttggagaagagtggagcaaagtctattggaacaacagccaacttgttagttgctgctgctgctggtgcttgtactgttatcgtgacacagccattagatacagcagcttctaggatgcagacaagtgtctttggaaagtctaaagggctgagagaaactcttgcagaaggtacttggatggaagcattcgatggcttaggcatttccattatattgacttgcaatccttctattcagtacaccgcgtttgatcagttcaagcaaaggatacttcataggcagcggcgcaaaaatgcaggatcagcggaggataattccggagttgctctttctgctttctcagcttttctgcttggcgccgtctctaaaagtattgctacagtattgacttatccattaatcagatgcaaggtgatgattcaggctgcagaccctgatgaggatgatgacgatgaacctggaaggccaagcaaatcaagaacaccaaaaacaatgctaggtgccttgcatgctatctggagcaaggaaggcattccaggcttcttcaaaggcttgaatgctcagatccttaaaacagttctgagctccgccttgctgctgatgattaaggagaagatctcgaagttcacttgggtctcactgcttgccctgcggcggtatcttttcgtttctcagaagaggatcaagagtgcaactgtataaatacgttagctccaaaacacaaactagcacacatagcgacatggtgcttctggagatgttatgccaaggaataaatctgaggaataatcagcagaaatacttaaccaagagagagagaataaggtgtgtatctggggtcgatagcatcagagggctcttcaataagtttgtccatttcttttttttctctctctctctgaatctcttgtagctagtgacgtagatgttgcgcggatctgaaactggactgtacttttagcgtttgttgcctgtaattaggggtgataatgggctctgaattttacagtataatatttaaggttcggattaagattgggtcctgtttctattcatttttaattaaattttatttaggactctcagttgggtctcgctgcttgccctgcggcggtatcttttcgtttctcagaagaggatcaagagtgtaactgtataaatactagttccaaacatagcgacatcgtgcttctggagatgttatgccaaggaattaatctgaggaataatgagcagaaatactgaagcaaaagagtgtgtgtaaagtgtgtatgtgtgatcgatagcatcagagggctcttcaataagtttgttcattctttttttcccctctctgaatctctgatagctagtgacacagtgttgcacggatctgaaactggactgtacttttggctttggttgtctgtaatgtgtaaaatagcagccgtgttaatattccctttctcttaaaagaaaatgaatcgattggcagtttgatgt

SEQ ID NO: 2152 - DNA, 1574 bp, Zea mays
  Clone ID: ZEAMA-23APR03-CLUSTER23432_2
cccagtcccgaaccgcacgcgctcgatttcccgcaccccctctagcctctagcggccatgtcgcccgccgccgccaccacaaccttcgtcgcaatctccatcgccgtccccaaccctaccgctccatcccgcggtcgcgtgcgccttccgctaggcggggtccccgctgctccacgccgcgccgtcacctctatggcagtgtccgcccccaggtccggcgccgccacctcgtttctcgagcgccgcgagtcggagcgcgctctccactttgtcaaataccagggcctcggcaacgacttcataatggtggacaacagggattcgtcggtgccgaaggtgacgcccgaggaggctgcgaagctgtgcgaccgaaacttcggcattggcgccgacggtgttatcttcgtcatgccgggggtcaatggtgccgactacaccatgagaatcttcaactctgatggcagcgaaccagagatgtgtggtaatggagtccgttgcttcgctcggtttatagccgagattgaaaatctgcaggggacaaatagattcactattcatactggtgctggaaagatcgttcctgaaatacaaagtgatgggcaggtaaaggttgatatgggcgagcctatcctttctggactagacatccccacaaaactgctagctaccaagaacaaagctgtgttcaagctgaattggcagttgagggcttaacatgccatgtcacatgtgttagcatgggaaaccctcactgtgtcacatttggtgcaaatgagttaaaggtattgcaggtcgacgatttaaaacttagcgaaattgggcctaaatttgagcatcatgaaatgtttcctgctcgcacaaacacagaattcgtacaggttttgtctcgctcacacctcaaaatgcgggtctgggaacgtggtgctggagcaactcttgcctgtggtactggtgcttgtgcagtggttgttgcagctgttcttgagggtcgagctgagcggaaatgtgtagttgatttgcctggcgggccattggaaattgagtggagggaggatgacaatcatgtttacatgactggtcctgcagaggtcgtcttttatggatctgttgttcactaggttagttttatgaggtctaagattcctacttgcatctcaacaattttagtcaacattagacactgatatgaatgaatactgcttggtcattataagcagacatgtttctatctaaaaagaaacgctgaaatctagtgctaaagtaggtagaatagcagacatgttgaaatctaacatgttggtattgggtacccttgttcagatattcttaattatgattgcttgatttgggtaccagtaaaggcttcctttttaagcattctagtgttccccttttgcacccctttagtttgtcaccccccccccctacatgggtaacatgtctttccccccattttctgtttcttttctttgtaagtgaacgccaatccagttttagtattgttttctaaaaatttgtcttgaaaaaaaaaaaaaaaaaaaaaaaaaaaaaaaaaaaaaaaaaaacccaaaccc

SEQ ID NO: 2153 - DNA, 2578 bp, Zea mays
  Clone ID: ZEAMA-23APR03-CLUSTER2346_22
gctccactctctagagtctagacccctagcttacattaatctcagttctcaccatggagcagcaaaaccaagtaatcgaggcgccgctcctgcaacaacaacgagaagatggcacgtccgtgcaaggcggcggcgaggcggacagccacggtcaccgccgcgggagcaacaagctcacgttccttccgctcgttttcctcatctacttcgaggtcgccggcggggcgtacggggcggagctcgcggtgaaggcggccggcccgctcttcacgctcctgggcttcctcgtcttcccgttcgcgtggggcgtcccggagtcgctggtgaccgcggagctcgcggccgcgctcccgggcaacggtggcttcgtcctgtgggccgaccgcgccttcggcccgctagccggctcgctcctcggcacgtggaagtacttgagctgcgtcgtcaacgtcgcggcgtacccggcgctcatcgccgactacctcggccatgccgtgcccaccggcggcgcggcgcgcacgggcgcggtggccggcctgacggtgctgctgtcgctggtgaacttcaccgggctgagcgtcgtcgggtggggcgccgtggcgctggggctcgtgtccctcgcgccgtccgtgcttatgacggggatggcggtgccccaggtgcgcccgcggcggtggacggtgacggtggagggcgggagcagggactggcggctcttcatgaacacggtattctggaacctcaactactgggacagcgccagcacgatggccggcgaggtggagcggccggagcggacgttcccgcgggcgttggccgtggcggtggtcctgatcgccgccagctacctgctgccgctcatggccgcgaccggcgccacggacgcgacgccggacgcctggacgaacggctacttggccgatgctgcaggcgtcatcggaggcccatggctcaagttctggacccaggccggcgcggtgctgtcgtccgtcggcatgttcgaggcccagctgagcagcggcgcgttccagctgctgggcatggcggacctgggcctcctcccggccgtcttcgcgcgcctccgcaccccgtgggtcgccgtcgccgtctcctccgccgtgaccctggccgtgtccttcctggcgttcgacgaggtcgtggccaccgccaacttcctctacagcctgggcacgctgctggagttcgccgccttcctctggctccgcgccaggcagccggacctgaagcggccgtaccgcgtgccgctgtcgtcgctgcccgcgctggccgccatgtgcgccgtgccgtccgcgttcctggcgtacgtgtgcgccgtggccgggtggagggtgttcgcgctcgccggcgcgctcacggcgctcggcgtcggtttgcacggctccatgaggctgtgcagggccaagaggtggctcaagttcgaaggccagcagcgaggacaggggggtcatgctgctgcacctgcacacacggtttgagtcctaagtttgaagattgaactatcacgacgcaggcagaccaatcgatacgaaaaaaacaggatgttgcgtcctacatttctgattccaaacatgtaaaagtgtaattcatcatgtaatacatgcatacgctcatcagaactgtcccagatcacgtgcagatacatattcgcttcgtagttacgactcctatacgtatatgatacagatccgacctgagatctatctacatgaccagtaggcagtagctcaataaagaacatgatgtgggctcgagaagggatgtctagtactagaggtaatccacatatatatatctatatatgatatctgcattcgataattcacatggcatccatggacacgagaagaacggcgaccgcagcggcggacagagccgtgaacaagcccgcgcgcggcaacccacgggacacgccgttgtaagggttgagcgtgccgctgggcccgaacgacccggtgccattgaaggaacccggcggggtgccgaagccgcctccatccgacggggtgaagccggacggaggggcggtgccgaacgccagggagctgaactccgacgacgacgggggctgaagccgactggaggtgcgaagcccgtcggaggagagaggctggtcggcgggcttgcgcccaccggcacgctcgagttggaggagtcgcgcgacgttggcgacgacccagaggtcggcctcctcctggaactcggccacgtgctccagctgctcgttggggatggtgaccatgacctccgcgtcgctgcccgccagggagctcagtagctcagggtccgctccgcacagccgagcttgcctcgtctgcttagactgaacgatcttagcaaactctgacggagagttttctgaagccatcagtacgcctgcgggtttgtgaagactgtactgtaagtaaatccgaataaacattcacagcagcagactgtcactgcggtgactacggatcatcagatggctgaagagtaacactgaaggttcaatgtctggcttgctgtgttgggccgtggtgccttgcaatctggtgtgcgtgctagcccattatagaga

SEQ ID NO: 2154 - DNA, 1969 bp, Zea mays
  Clone ID: ZEAMA-23APR03-CLUSTER2346_26
ccaaaccggtaaaaatataatccatcactgtactgaaggtttgtgtcgtgtcatacatacatatagcgtatattcacatgcgctcatcagaactacggcacccaactcacacgcatacagagacattcgtttcacattcacggcacctaaataatacgtacaaatctgacctgacatctacatgacatgaccagtagatcaacaactaagaacatgttgcggcgcgagaaaaggggtgtctagtctctgcatcgatttgatttgattcacatcgcatcaatggacgcgagaagcacggcgaccgcagcggcggacagggccgtcaagctcaagccggcgcgagacagcccacgggtcccgccgttgtaagggctgagcgtgccgctcggcccgaacgtcccggtgccgttgaaggaacccggcggggtgctgaagccgcctccgtccggcgggggtgaagccagacaaaggggcggtgccgaccgccggggggctgaactccgacgacgacgacgacggggggctggagccgactggaggtgtgaagcccgtcggaggggagaggctggtcggcgggcttgcgcccaccggcacgctcgagttggaggagcctcccgccgtggagcttcccgcgaaaacgcaagaccctgaacttgggtcattggtggtggtggtggcggtgccgttgaaggagcaggtggcgccggtgctggccatctcctggtagtagtcgttgtaggcgtaggacgcgatcgccggcaggttgttctgctggtagcaggcgccgccaggctggatggccgagcagtcggcgtggcccggcccgcacgcccagttgagcccggcctgcagcgccgcggggtccgcgttctgcagcgccacgcagaacgtccccgtcgtcgccagcgaccgccgccgaccgtgaccgcccgggtagtagtagtacggcacgacggcgtcgcctccggccgcgaggtccgcggcgatcacggggacgcccgagacgcccagcgcgcgcatcgcggcgtacgcgcggccgaccctggcgtcgctggcttcttccgacgggcgcgacgacgacttgaggagcagcggcgagccggccgactcgaggaagcgcaggacgtggcccacgacgccggaccacgccggcgcggacagcgcctcgccggacatcgcgctggacaccttgacgcggccgccgaggcccgcggcgacgagcgccgaccggaggttgagcatcgccgggaccaggaagtgggcgctgccgggggagttcgccggcacgtcgtcgcccgccacgacgtgcgtgatcctggtcgacgggaggaaccgcgcgacgttggcggcgacccagaggtcggcctcctcctggaactcggccacgtgctccagctgctcgttggggacggtgaccatgacctccgcgccgctgcctgccagcgagctcagcagctgagggtccgccccgcacacgccggcgtgcctcgtctgcttagactggacgatcttggcgaactctgacggagagttttctgaagccagcgacggtacgcctcctgacgcgctgcagagaagcaaggcgagggagaagaagatgcatcccttccgtcgtttctgcgacgacatcatccaaagatggtgcgatccaaggcactcctccggcaactacgcgtacctcggatgacaaggaaatggctggagctagctcccgttcccgatggcctcggacctcggatgatccgatctcgcctgcttcctgcagctatagctatagctagtttgcttcttccggacgaaacagtacgaaggcctagctaagcctgcctcgatcgggggtgggggatgcttatttggtgaactccccgaaatctgatggagcgagcaggtgccagcagcagcgtggactggagctggaggaccagtgcgtgacgagggccggggcaggggcagggagagagccagagag

SEQ ID NO: 2155 - DNA, 1565 bp, Zea mays
  Clone ID: ZEAMA-23APR03-CLUSTER235953_2
gcacgagaccattacctagaacatcctaatcgaaaaatttgtcggcgtcggcgtcggcgagaaaggggtagtctgtgtatccaatgacggggtcggaggtgtagaaggtggtgcggtcgtacttgttgagcggcgcgtcggggaggcggaacctccggggcagatccgggttggccaggaacagcctgccgtaggcgacgaggtccgtgtagccttcctccaccaccttgtccccctccgccctgtcgtaccctccggcggcgatgaaggtgccccggaatgcctccctgaacgggcgcaggcggtgcgggatctggcgtcggccgtcaacgatggccatccgtggctcgatcatgtggcagtagagcacaccgacgtcgctgaggctgcggacgaggtaccccgccagggcctccgggtcggagtcgtggcagtccatgtagtcggtgaagggggagaggcggacgccgacgcggcccggcccgacctcgccggcgacggcgcgcacgacctcgagcgcgaagcggcagcggttctcgagggagccgccgtactcgtcgtcccggtcgttggcgctgtccttgaggaactgctcgatgaggtagccgttggcgccgtggacctcgacgccgtcgaagcccgcgaggagcgcgttgcgcgccgcgcggcggaagtcgtcgacgatggcggggatctcgcgcgcctccaggcggcgcggcggggagaacttctcgaggtggccgtcgaagctgagctgcggcgcgacggcccggtcggtgctggagatgggcgcggccccgcccggctggagcgccgtggtggagacgcggccgacgtgccagagctggcagaagaagacggcgcccttggcgtggacggctctacgatgggccgccacgccgccacctggtcgggcgtccacactcccggcgtgtcggtgtagcccctgcgccgtgtcggagacgcccgtggcctcagtgatgaggaggccgccccgggtggcgcgctgcgcgtagtagacggcgccgtgcggctgcgggacgttgccgtaggagcgctgccgcgtcagcggcgccagcaccaccctgtgttccagctcaaatgcgcccatcttgtagggggtcagaagaggagggatggtggtcggagggacgatggtctcgggcgtctgcgtctccatggccatggtcggtgtgatctgatgattcagtactactatgtacgtatagaatggagcaaggaaggtaagcaatgggaggagagatggacagtcattacattaatttatagagtcgacgatgatgatgctgcagccaaaagaaagatgaagtgaggaagacgaagaaggcaggaagctgcacgccgccgacagccggcggctattcgcagtcaacagatgagacgaacatgcgtcacctcatcgtcatattttcagtcacctaattaattacgtattcagtataatataataccaacggtacggtgaccccgccgctgacgatgccaaggtctttccgttcaaaatatcatttccttccgaatttattaatcaagctcttttcatc

SEQ ID NO: 2156 - DNA, 1000 bp, Zea mays
  Clone ID: ZEAMA-23APR03-CLUSTER2366_3
aggctgtccactcccccgtgatgtgagcgcgtttctctcccgtcctctcctctcctcccccgcaacaaacacctgcaagctgctctcgatctctctctccgtcgccatctctctcgcgcgcgcattacttgcacgtacgagctcagaaggaaggcagaggcaaaagcagccatggcgaactcgtcgtccggccttgcggtgaacgacgagtgcaaggtgaagttccgggagctgaagtcgcggcggagcttccggttcatcgtgttcaggatcgacgacacggacatggagatcaaggtggaccgcctcggcggaccgaaccagggctacggcgacttcaccgacagcctccccgccaacgagtgccgctacgcgatctacgacctcgacttcaccaccatcgagaactgccagaagagcaagatcttcttcttctcctggtcccctgatactgcacgcaccaggagcaagatgctgtacgccagctccaaggacaggttcaggagggagctggacggcatccagtgcgagatacaggccaccgaccccagcgagatgagcctcgacatcgtcaagagccggaccaactgatcgtcatcgtcctactatcatcacatcaagcaacacgtcgattatatatgcatcattatagtatcgtttattaatttcagacccacccactgctaaccacatcgtgcacgagagattatattcatccgtggactacgctctcgatcttacaatttgaaacctttctattttcctaattactatgtattccaggttcattttgattgtgaccattcttcagttctttctgtaaggatcggagcatattatatactctatgtggctatgccaattatattgttgggtataagaatgcattttgtttctgtaatacggaaaaatatattttctttaagcaacaacaaggtaaaaactaacctcgttgcatattttatttatgtcaagaaaacaaaaaaaacaaaaaagaaaa

SEQ ID NO: 2157 - DNA, 2831 bp, Zea mays
  Clone ID: ZEAMA-23APR03-CLUSTER23673_2
aaagatctttcccaaaattccagtggaatccgcacggcggagcgctgcgtgagtcccgtccccgttgcttgccgtgccactcccgctcctctgctgtccccccatccctgccccaagcccccgcccaccaccctgcccccgaccagaacccacaccaccacgctgaccgctgttagcccgtgacccccccgtccccccaggtcgcggcacgtcggcaccagcttcagttccggtccgcggcgacccctcaccatcgcgcgcgcacacacgcgagcgggcgccgctccctgttggctcgcgacccccctccccgcctcccctctctctctctcacacacacacacaagtcggtgctgcagcagcagcagtcgcagtccagccgtgagctcttgccgtgcgagcgattcaccgcagggcgcacgggaatccaatcaaatcccccaggaaggtagccccgcggccgcccgttcctcgctccgccccgcgccgacgcctctccccggatcccgatctgtgcgcccgcaccctgcgtgggatggaggcggcgccgcggcggcagcagcaggaggaggaggggtgcccgtgcggcgggcccgaggccgcggaccacttcgagcggctccacgacgcggtgctgctcgacgtcctcaaccgcatcggcgacgtcaaggcgctcggccgctgcgccctcgtctcgcgccgcttccacgcgctcgtgccgctcgtcgactccgtcttcgtccgcgtcgactgcgtcatccccgacgacccaccctcttcctcctccgcgggcgccgcaccgggctccccgccgcaccaggcgccggcgccaaccgcgtgcgggcgcggcgcgctcgcgcgcgtcgcgcgcgccctgctcggcggcgtcgctaggcccatccacgcgctcggccagatcctctcctccgccgcggcgaccgtctcccggcgctccgagccactgcccgcttccccgccgcccgcgcccgtcgcggacgtctcccaccactcgccctccgaggtgctccgctccttcagggagctgcggcgccttcacatcgagctgcccacgggcgagctcggcattgacgacggcgtgctccttaagtggaaggccgacttcggctccaccctcggcagctgcgtcatcctcggcgcctcgtcggtctcgtccaagccgccggcagggtccgctcaggcggaaactgctgcggccgacagcacgcccgccgctcccgataccggtagggagactgaagagccgggaagccctgcctgattctctctacacaaatggagggctcaagctccgcgttgtctggaccatcagctccctgattgccgcgtcggcgaggcattacttgctgcacccgattatctgtaatcacggaacgcttgagagcttggacctgacagatgccgacgggcaaggggtgctcaccatggacaagaggcagctgcaggaactgcgggtgcggcccgtctctccatcagggagctcgcaccgcacactcatgccggcactcagtatgcgtctgcactacgcaccactcattgaactgcctgggggaacgctgctgaaaggtgcaacactagtggcgatcagaccaagcgaggatgccttgagggagggccaaggggttgcaggtcctgctggtacatgctggatttcagaggcctttgaggagccatatcggactgcggcaaaggtgctcctcaagagaagggcatattgccttgaaatgaactcgttctgagcaccagggattcacttccacagagttctacccatctgacaggatgggggaagtgagatgcccttcggttaatatatgggaattcatcattcagtgcaaaaattggaccaactctccccatcattaatttatctgatctcggtgaagagatgacttcgtgtacctgtacctttagggttgtaattacagatacgtatttgtgctggactactacacgcggaacggaatgctatttggccgattcccacagagtgtcccatgaagagaagccatatcacttgagcgtttgagcgtggtgctcctgggccaagctggcattatacttctttcctcaaaggaagcaccagagatttcgtttttagcagggcctttttgcttaaatcttgccgagtcatgcatcaatttatactcattgttataaaaaaaattatagactcgaatatactgtcccttttaagaaaataaaaaaaaaaaaaaaaaagcggccaaacaagttatagcgtgtacgaagcttccaatggcggtcaagccaataactgcaaccccagactgttcatgtgcccaagtctttataccatgtctttatatggaagaacgactgtgattttcttagttgtgtcctttggatgcaggttgtgatgcctacagtgggatctgatgtagcatttggtctcggtaagctcaaacttccgttagatgaggtcaggttaagggtatcaaaatctttggatgccgttgggatgttgagctactctcagaggccaatccaaactctgagtggtgggcagaaacagagagttgcaattgctggtgcgttagctgaagcatccaaagtattactgctggacgaactgaccacattcttagatgaacatgaccagataggcgtgataaatgcagtgagggactctgtggctgccgatggggaggtcgccgcattatgggtgactcatcggttggaagagctgaaatatgcagatggtgccatctatatggaagatggccagataatcattcaaggcgacgtctctaccatatcaaaatttataaagaaaaaacaggcacgctactttg

SEQ ID NO: 2158 - DNA, 1836 bp, Zea mays
  Clone ID: ZEAMA-23APR03-CLUSTER237618_1
aaaaaaagaaaaggactcttgcggtcctgcccctttcgtctcttcgcctccgcccccgcgcggcctccgcccccgcgcggcgggtgaatgccgatggttgcggcctcgccagagaagctccactgcggcgaggcggggtcaggtgacaaagaaaaggaggtggcggggagggatgatgccgaggttatgtcgccgcagctctcggatgagccgctgcgggagaaggcgcaacgcatccaggtcatgctcaccggaggcatgtccgaacgcctccctgaccgcggcaagaagctgctcgccacactcgatgccatccaccgggagcaagaccgccgccaggcccgaggcgacggggcacgagcgccgggtaatgaagcatgtgaaaggatagtccgatcaaggtgtattgaatcatctggtttgcatagtgacctcagtagagttaaagtatcagtggctgatttcatgtcttcatttggagcggataaagaggcaggcatcaaaatatctagtttggaaataaaaggtaggagcccaaacaagcctagcacttcgatagaaaacaaggggaagttatgtgaagagaaagactcttgtgaagcctcttcacaacaaatgaattcagttcatgaagagttgcatctggacacctcagagaacatgcggaagacatcttctgatgttggcgctagcaacaatggcaacaatataatgtgggaagaggttcccacaccctctcgtaaaaggaaaggagccgatccagttagcttttcaatgcgactgagaccaagaaaggaagacgttgttcttttggatggagatacaccccatccagaatctgctaaggaaacatccaataactgggatgcagggaagctatactatccttcaagggaacacctttgttctgttgagatttcttctgatgacatcagatgtttccagcctgaatcattgctgtcctcacctataatgaacttttacatcatgtatctacagggaccaatgtcatcaattattagatcaagaggcgagtaccatatttttaacacgtacttctttagcaaactagaagccatagcaacaaagaaggacaagatcacttattttttgaaattgagaagatggtggaagggtgtagatatatttcgaacggcatatatattgatgcctgtgcatgcagaatttctcaaagaagaatggaactacctgaatgagaacatttcatcgaaagaatgtcccttacgagaaacagtgtggaagaatcttcctcgtaaagtagaaaagaaaatagttgaggtgccacagcagcaaaatgattacgattgtggcctgtttgtgctgtactatatgcagcggtttattcaggaggcgcctgaaaggtttcggaagaaagactattctatgtttggcaaacggtggttcagacctgaagagccatctcagcttagagaccaaattcgccacttaatccactcgtgcagagaaactgagctgacgaaggatgcaacagcgtcgtctggggagggccaacccaagattggtaatgatgggacggatccgagcgatgcctctgagccaaaaacgccgaagcatctgagcgacagaactgggtaattgctgattctggatgttgctgtagagaggacgggacagcattgtagtttctaggtcgtgctacatatgcagaaagttgagggtgcatgtatatctgtgtagccctagtggttcggaagatgtgtaaagtggcgaaactggtagtcagagacttccacaacggctactgggcgacttgtcaatgccatcattttcttatgtacaaaaaaaaaaaaaaaa

SEQ ID NO: 2159 - DNA, 1116 bp, Zea mays
  Clone ID: ZEAMA-23APR03-CLUSTER23776_2
aggcgaggttgagtccacaacggcgacccagggcgcggtctagcgagcagagagctcggagcagcgccgcggctggcgagtcccggcagggtcaacggcgcgatagcgcccacggtcggagcaagcaccagagaagctgagcagcggcgaccaaccaccatggctggtcctcgccatcgtcgcgctggggggcggcgcctggctcagccaccgcgcgttccaccaccgactgcgagcggttcctcgagcggcccgtcatcgcgctgggcgtgctcctcctcgcgctcttcctcctcatcctgctcctcttcgcattcaccgtcttcgcgttcgtcgtcaccaaccgcggcgccgggtgggtcgtctccggcagggggtacaaggagtaccgcctcggggactactccacctggctgcaaaggagggtggagaactcgcagaactgggccaagatccgcagctgcctccaggacggcaaggtctgccagaagcttgcgtccagaaaggagacggccgcccagttcgtcaacagcaacctctccccgatccagtctggatgctgcaagccaccaacgggttgcaacttcacctaccagagcgaaactgtctggaccaagcccgctggtttcaacaccacaactgacgaccctgactgcaccacatggtcgaacgaccagaccgtgctctgctacgactgcatggcctgcaaggcaggcgtgctggccaacctgaagaacgactggaagaagatcgccaccgtcaacatcgtcttcctgatcttcctcgtcgtcgtctactccgtcgggtgctgcgcgttcaggaacaaccggcaggacaactcgtacccggcctggaaatgaggtgcgcgtggcaatgtataggttgtttatgctatcatgctatgtgagtgactgcgtttcggtgaggaggggttcgctccttggtgtctagcaacctaccgtatgtattaactattaatgtgtccggttcatgtcactggtcgatgctgttttgccctcgaacgcatgatgatagtgtcccaaggctattatccagatatatgccgaaaaaaaatatgcgttttctgtgggcgtgcccgaaaaaaaatatgcgttt

SEQ ID NO: 2160 - DNA, 1042 bp, Zea mays
  Clone ID: ZEAMA-23APR03-CLUSTER2381_2
cccgctacccaaatctctccgtccacggcgacgccagacggcatccgtcagccagcaacatctccaccacaccctccccgtccccgacgaagaagcacagcggagaggcggccgaagccgacgcctcaccaagtcaccagtagcttctccgcgctcgtgcgcgccttcccgcacttggatgctccctgcgccggcgcctagagcggcggccgtctagcgggcgcccggagggtgaacccaccgatggccgacgctctccttccacgccgcttcctcgcgccgttgtcagtcgtatccggagcctcttcatcagcctcttcgtccccgccgtgtctttgggtgctctcgtcgcccggctccccgcgccggccgcgcctggcggccggtcacccgcaaccccggcctcgccggttcactcggcacaagctctgccggacagctttggagaaccctgatatattgtttctaaaagtgaattttgatgaaaacaaacctatgtgcaaacgactgaatgtcaaagtccttcctttcttccatttttatcgtggagctgacgggctacttgaggctttctcctgttccttagctaagtttcagaagctgaaggatgccattgcaatgcacaacactgctcgttgcagcattggtccacctgttggagttggcgatgttgacttgctggataacgcgagccctcaagagaaacctgcagaagctagcccacggtagattcatgagaatgagctccacctcatccacttctacgtcctgctcattgttttcttcactatagatctcaatgtaatcagttgtggagaacataagtagcctcggttcatgaatcagatgtatggattattgtaacgcattcttgaaagggaaaaacatgtattatagcgtgataactgtaccttttgtgtttgttgtacagaaccatagaattgtacttcattttaggtgaagacgcctttgaacatttaagctcccttgtgggccgttttatagagtcagtcagtccaaaatattaaaaattaattaaaaa

SEQ ID NO: 2161 - DNA, 1590 bp, Zea mays
  Clone ID: ZEAMA-23APR03-CLUSTER238698_1
gcacgagaccattacctagaacatcctaatcgaaaaaaaagtaaaagggaggaaaagggtccggtgcggcgacgatggagaggggcggcggcggcggcggcggggacgagatgatgatgacctcgggcgcgacgggccggatcgtgccggtgttccgctccgtgctgtcgcggcgcgctctgctccgcgtcgccgtggcgctgcactcgctcttcatctggctgctgctcctcgcccgcggcctccgccggcaccgggcggggaccggcgccgacgcgtcggcgtcggaggctggggccgggacctggagcgcgtggcggtggcggctgcgtctgcaggccgcggaggaggaggacgtgcgccgccgcagggcgctcgcggaggaggtgcccatggaggaggaccggggcactaggtgggccaccttcctcgtcaccggggccaggaggaacgcgcttttctgcccgcctctgggcgccggccgtcgacgagatgaggggcattttggtcatcatacatggcttgaatgagcacagtggaaggtacgtgcactttgctgagcagctgacagcatgtggtttcggagtatacgcaatggattggatagggcatggtggaagcgatggcctgcacggctatgtgccttcactagattacgtcatcgaagacatcgaagtgcttgttgacagaattctgatggagaatccaggggtcccttgtttcctcctcggccactccaccggtggggctgtcgtcctgaaggcatctctgtaccctcacatcagggagaaactggaaggcatcgttctgacatcgcccgcgctgcgtgtgaagcctgcgcatcctattgttggggctgtggcgccgatcttctctctggtggcgcccaggttccagttcaagggcgccaacaagaggggcatcccggtgtcccgcgaccccgcggcgctgctggccaagtactcggacccgctggtgtacacggggccgatcagggtgcggacggggcacgagatcctgcgcatctcctcccacctgctgcaccgcctggagaaggtcaccgtcccgttcctggtgctgcacggcaccgccgaccgggtcacggacccgctggcgtcgcgcgagctctacggcgcggcggcgtccgcgcacaaggacctgcgcctgtacgacgggttcctgcacgacctgctcttcgagcccgagcgcgacgaggtcggcgccgagatcgtcgcctggatggacgggatgctccggctccggcggcaggctggatgaagggatggccgtgctgcttctctccttgatctaggtggtgttcctctccaaagtataaataatagatttgtgtgccaagataagatggatgcatctgtgctatgtaactacgttacgtattttatctataacagcggggtaaaaaggtcgttttgttttggtgccgggttttttgtcagtattattctgctagggtttatgggggctgttctagcaaaactgtcagtgtcattgcgttgagctggtgaccgttgtcaaattgggtctagcattatagaatgtccctcccaaactgacttgttgcaggtgtaa

SEQ ID NO: 2162 - DNA, 558 bp, Zea mays
  Clone ID: ZEAMA-23APR03-CLUSTER238_34
tttttgctgcaaacaaaaggcgacgccgctgggatctagcacgcgagcgagcgagagagccgcgcacctatctggcaagcgacgccgcggcctcgatcggagtcggaggcgaacacccccatggcggcggctggcggcggcgcaggagggaaggttcagcgtgcccgaggcggcgcccttcaccgcggtgctcaagtacgccgcggaggagttcaaggtcccgccccagaccagtgccatcatcaccaacgatggaattggcatcaacccccagcaaagtgcaggcaacgtgtttctgaaacatggttcggagctgcgtctcatccctcgcgatagagttggagctgtagtcatgtcttccagttagaggatatatacagtccaatgcataatgagcaaaacttgagagaaataaagctttgatgttggccttgcttggctgtaggatgtgttacaaggataataagcgaaccttaccgtacatgtctcaagttggtatgctctctgtttgtatgtggagagatttctgaaagtgaatccagtatctgaatcgactca

SEQ ID NO: 2163 - DNA, 652 bp, Zea mays
  Clone ID: ZEAMA-23APR03-CLUSTER238_62
cgagtcgattccatcgataagcttttttttttttttttttagaatctggaaatgtaacttcttatttctggttggccacatacatcatccaaaaaactttattattgaattacaactaataagcaatctaaaagagggcaccaccaatgatgtgttgttggtaggaggctgctgggtttgtcaaagcaagttggacaaagggcaacaattgttgtagttgtaagagggttgcggggttagccgcaaactgctggtagaaaggcagcaactgttgctgtgtcaagaaggaagcacggcttgctgtgccctgatggtttgtaccaatgactgcaccaaagatagggctggcgattgttgaaacaagggtgataaaggtatgttgcttgctgcgattgcttgttggagcctatagggttgaagagctgggttttcacatactgaagctatcattgatggaaggtatgggggaagaagggaagctataggagcttgtgagcattgagggaaaattgtcgcgttagcaacacatgcagaaagagcaaggagcataaggagggaaaatatcttggtcgccattgttgctctattgttgctactggattccactttctatgttgcttgttggtctcaataatatggttgatccccgcgt

SEQ ID NO: 2164 - DNA, 1587 bp, Zea mays
  Clone ID: ZEAMA-23APR03-CLUSTER2390_5
aacatcctaatcaaaaaactcgggttggttagaagaacccaatgcaagtgtgagtgagctgacggcacggcggacgcgctcgcctctcctctcctctcctctcctctcctcttcttccggctctccctctccgcatgccattccaacgcattaccggtatttttagccgccggaggagacgggtagctgcgtagccactagcgagagagagagggaggggagaaaccatagctcctggccgttctgcctgcccatccaccgcggcgccggccgtccgtctcccgtccacatccctcctcctctcctgcaaggttcctgtgcggtatgtagcgcagaggggtcggagtcggagtcggagtcggagaagatgatgggcgggttcctctccagggtcctcctgttggcttttggctatgcctatcctgcctacgaatgctacaagactgttgaactgaacaaaccagagattgcgcagctcatattttggtgtcagtattggattttagttgccctgttgacagttttggagagattcggagatttcacaatatcatggctaccgttctactcggaagcaaagctgatgttctttgtatacttgtggtaccctaagacaaagggaactacgtatgtttatggaactttctttaaaccatatatttctcagcatgagaatgaaatcgaccggaatctccttgagctgagagctcgagccaccgacacggttgtactttattttcagaaggctgcttcggcaggacaaagtactttctttgacgttttaaaatatgttgctgcccagtcaccttctcagaaatcaaggcaacgctttcatcaggattcacagcagccgccacaacaacaacaaccacaagtgcaggtgcagcaggcgcaaccacaaaaacaagcagcacctgttatgcgcagagcatcatctattgctgctcggcaagcagcaatggcacagccaatctcaggagactaaacccgtttcatcttcgcccaagatcaagcgtcaaacatcagcgagatctggttcagtggcatccacaaagcctccggtagctgcatccgcgctaaaacctggtggtagcccaaagaaaggcgaggtcaaacctgctgccgacccagttcaaactccaaccacaggtgccgattcaccgaaacccgagcctagcgccccatcactccctggagccgaaggggtggacaagatggccatcgacgaggccagtggtgacgccccagagggcgcagaagagcttgaccctgcgctcgaagaggagacgccgatggaggagacgatccgtgtgacgcgcgccaagctaaggaggcgcacggccaccgaagatcctgctgggaattagctgtaggccattgtttttcctttccctgcacattgtgttgatctttttttgggttttaggctgtcatgttgtttggtggaatggagatgtgttgttgaattggttctttgtgacacagttgattatcttgtttctgtgcttttttggtgcccttttcttgttatttaagttgtaagtaacactttctctccgcatgtgaatacaggttagcggcacgagc

SEQ ID NO: 2165 - DNA, 1656 bp, Zea mays
  unsure (1)..(1656): unsure at all n locations
  Clone ID: ZEAMA-23APR03-CLUSTER2390_8
aagtcgggttggttagaagaacccaatgcaagtgtgagtgagctgacggcacggcggacgcgctctcctctcctctcctcttcttccggctctccctctccgcatgccattccaacgcattacaggttggcttttggctatgcctatcctgcctacgaatgctacaagactgttgaactaaacaaaccagagattgcgcactcatattttggtgtcagtattggattttagttgccctgttgacagttttggagagatttggagatttcacaatatcatggctaccattttactcggaagcaaagctgatgttctttgtatacttgtggtaccctaagacaaagggaactacgtatgtttatggaactttctttaaaccatatatttctcagcatgagaatgaaatagaccggaatctccttgagctgagagctcgagccaccgacacggttgtcctttattttcagaaggctgcttcggcaggacaaagtactttctttgacgttttaaaatatgttgctgcccagtcaccttctcagaaatcaaggcaacgccttcatcaggaatcacagcagccgccacaacaacagcaaccacaagtgcaggtgcagcaagcgcaaccacaaaaacaagcagcacctgttatgcgcagagcatcatccattgctgctcggcaagcagcaatggcacagcaatctcaggagactaaacccgtttcatcttctcccaagatcaagcgtcaaacatcagcaagatctggttcagtggcatccacaaagcctccggtagctgcatccgcaccaaaacctggcggtagcccaaagaaaggcgaggtcaaacctgctgccggcccagttcaaactccaaccacaggtgccgattcaccaaaacccgagcctagcgccccatcactccctggagccgaaggggtggacaatatagccatcgatgaggccagtggtgacgccccagagggcgcagaagagcttgaccctgcgctcgaagaggagacgccgatggaggagacgatccgtgtgacgcgcgccaagctaaggaggcgcatgaccaccgaagatcctgctgggaattagctgcaggccattgtttttccttcccctgcacattgtgttggtgttttttttgggggggggggggggntaggctgtcatgttgtttggtgggatggagatgtactgttgaattggttctttgtgacacagctgattactgtaccttgtttccgtgctttcttagtgcccttgtgatttaagttgtaagtaacacttttcctccgcatgtgaatacatgttagtggcacgggcaacgaacgcaacattataacgtcagggagacctggttcggtggcatccacaaagcatgcagcagctgcatccacaccaaaacctggcggtagcccaaagaaagagggcgcggaagagcttgaccctgcgctcgaggagacgttgatggaggagacgatccgtgtgacgcgcgccaagctaaggaggcgcaccgccaccgaggattctgctgggaattagatgcatgccgttgttttccctgcacattgtattgatctttttccgagttttaggctcaggtgttgtttgctggaatgaaaataagctgtcctcacttggttcttgtgncncagag

SEQ ID NO: 2166 - DNA, 647 bp, Zea mays
  Clone ID: ZEAMA-23APR03-CLUSTER23_34
gatctggctgcctcggtcgatttctaattctcctcgcgagcccaaaccctaaacctaaacctttcacccgchgcygcygcykccgccgtckccgccaccacatccgtagcgcccagccgccggagaagaggagggagccagcaccagccaccatgggtcgcgtccgcaccaagaccgtgaagaagacctccaggcaggtgatcgagaagtactactcccgcatgaccctcgacttccacaccaacaagaaggtgctggaagaggtctcgatcctcccctcgaagcgcctccgcaacaaggttgccggcttcaccacccacctgatgcgccgcatccagcgggggccccgtcctcttctccggcggctgggcgctacggaggtggtggcggctacggcggcggcggcggcggctggagggactgatgtgtgggcccatcctggcttcggccgagttatcttatctatctatagtatcgtgttaccgttcgcttctgtcaccgtgttagtgtccgttctacctttggattaggtgttggtacccctgttgttccctttggttgctcccgctatgaaacgagacgagagaagaatgagcaaggtttttgttcgcagctatttttgtccaatgatattgatatgttgttcc

SEQ ID NO: 2167 - DNA, 1338 bp, Zea mays
  Clone ID: ZEAMA-23APR03-CLUSTER23_37
atataccgttcctccgttcgtcccctccggccctctctccatccctgcccacgaccctccgccaccaggcaccagccatcgcctgcatcagatctcccgcccgtccgttacatcccagggcgacgcggccgcggccatgacgccatcctcagctctcgccctcgcgcaccacgccgcggtatccccgctcccgtcctccacgccgcggccctcccccaggtccagctctctgagcctgggcccgggctccgccgggctcgggccgcgccggctcgtcgcggcggcgcccccacgggcgttcttctcctcgtccccctaccagccgccccagccggaggggttctcgcagcaccgcgagtacggcctggtccccatggtcatcgagaccacctcccggggggagcgcgcctacgacatcttctcgcgcctgcttaaggagcgcatcgtctgcatccacgggcccatcgccgacgacacggcctcgctcgtcgtcgcgcagctgctcttcctcgagtccgagaacccgctcaagcccgtccacctctacatcaacagccccgggggcgtcgtcaccgcggggctcgccatctacgacaccatgcagtacatccgctgccccgtcaccacgctctgcatcggccaggccgcctccatgggctcgctcctcctcgcggccggggcgcccggtgagaggcgcgcgctgcccaacgccagggtcatgatccaccagccctcgggcggcgcgcagggccaggccaccgacatcgccatccaggccaaggagatcctcaagatgcgcgaccgcctcaacaagatctaccagaagcacacgcgccagcccatcgataagatcgagcagtgcatggagagggacctcttcatggaccccgaggaggcgcgcgactggggcctcatcgacgaggtcatcgagaaccggcctgcctcgctcatgcccgacggaatcggtggaggcctcgatgtgcccagcctcggtgtcggtcccggcggacggggaagggacgccgtggagccctcggcggtgtgaggattggcctcaaaggtgaaatccctttcgcatccggtggctctgttgtttgttgttagatctaaaaaagcttcaattcttactgtacaaggttaaccttgttattatggttatggaggtgtccggctccccattctccttgttgcttaaattgcctgaattgagctattggcgatataattattgcaactccaaggaaattctgttctgttgatactgataaattaacacagtattgtgtatgttgtactatattagtatcaattccatgccaggacattgaaatttctctc

SEQ ID NO: 2168 - DNA, 1291 bp, Zea mays
  Clone ID: ZEAMA-23APR03-CLUSTER23_39
accgctgccagcttctgcagctcgcaccgctcccgagtccgagtccaacaaggcttgagcagccgacgccaccccggtcggtcgacctccctctccccaccgacaccgcgggcccgcacgcagagaccccgcatgtcaccgtctacactcggtgacggcgcgagcaggtttccagccgcgagccccgcgactgatctgagctcgtgcctggctagctagtagatgtctccgaccgttgcctttaagctcgcacgcgaaccgtcccacactctgcgcaagccactgccgctgccgctgccgccgccgccgccgccttcagtctccgtctccaccggtgccctcgtctcccagccgctgccgccgccgccgccgccccgtgagagccggcgcagcaatccggttgcttggggacgcagcgaggatgggcagcaccagcgcgttcgtcatcaggtggatcaacttcttcaccatgatactggcgctactggtggtgggcttcgggttctggatgagcacccacgacgacgagtgcaggcggaccttgaccgtccccgtcatcgccctcggtggagtgatcttcctcatatcgctcgtcggattccttggtgcctggaagaacatctcctgcttgctctggacatatctgatcatgctgttcgtggtcttggtggcaatcatggtgttcacggtgctcgcgtttatcataacaaactccggaagtggccatactgttcctggggctaggtataaagagtaccgtctccaggactacagctcctggtttgtcaaacagctcgatgacacggagaaatgggctcgcctgaaaagctgcctggtgaagatagatgactgcaatagcctgtcgagaagatacaagaccgcgagagaatacaagctcgcggacctcactcccatggagtcgggttgctgccgcccgccagcagagtgcgggttcccagctctgaacgcgtcctatttcgatctgagctatcacccggcgagcgccaacgccgactgcaaactgtacaggaacgcgcgctctgtccggtgctacgactgcggcggcggcggctggagggactgatgtgtgggcccatcctggcttcggccgagttatcttatctatctatagtatcgtgttaccgttcgcttctgtcaccgtgttagtgtccgttctacctttggattaggtgttggtacccctgttgttccctttggttgctcccgctatgaaacgagacgagagaagaatgagcaaggtttttgttcgcagcaaaaaaaaaaaaaaaaa

SEQ ID NO: 2169 - DNA, 1228 bp, Zea mays
  Clone ID: ZEAMA-23APR03-CLUSTER23_41
accacaccaaatgccgcctttttttcatttatttcggaaattgtacaatacgttacatgaggttagccagcccaaggtcttaaggagcagcaacattatgtccactcctgggaaatatacagggtctacagcacacaagcgcgaacagcaattcagaaacaaacaaccccgtgctgctccagacaaaaaaggtccacctccagttccagagcaatcttctgacgagaggaagttcgccctcgagctttagtgatgcaacatatatctctggaatgcctgcaccgcgaccaaactctgctctttgctccaggattatcctcaccgcagttgttggttccagaccttgggtgatacccctcatcttcagtctaataacctgagattccgatgagtagccggacagaagagagacgctctggagaaaagtctcgatgaagtgcatgtgtacgcttttgaacttgagcatgcatggttgacttgaagttgagatcactttgccatcggcggagagaaactctgcccttacctaagcaaaaaagaaaatgtaaggaggcacattagattgaaacaaatcatcgatgtaaccaggggtaaaattcataagcccagtttaaaccccccatcataacgtgtccagttcagagtgcagtccaaacaagtgcagaagaaagcacaaatccctcccctcctgttatgtttaatcagtcatttatatatagaacctcacaatccagaacagaggtcacggtcgttgtcataagacgctatacaaatatcagatgaaatgcagaagagtaactttgttaacatcaacacatatacaatactttgattggataccatttaattatccttcaatatgtatagtgaaaatgcagtgtaatggatcggaaatgcaggtcacagaaacacagaacaaaacagaagacaaacactcactcactccattccaaattataagacgttttggcttctttagaaacactgattttactatatacctaaacattgtgtatatttaagtgcatagcccaaaaaatactgtctagaaaagccaaaatgtctaatgatttggtgtggagggagtataatccaggtatctttccggtaaaaaaataagaaccccctcaatgcaaaatgtatttaacaatggttatcttatccttcataaaaaaaaatgttctcttttcatgggttaggatgcagctatgagatgaaaagcagaaac

SEQ ID NO: 2170 - DNA, 1137 bp, Zea mays
  Clone ID: ZEAMA-23APR03-CLUSTER23_46
aaccatgccaccccctggtccccactcgtctgacacgaccccctacctccccttcggcccttccaagctcgtgtaattgctgcggcgacagtgcccaaataaaatcccctaaacctagcgccgccgccgccatgcttcgccgtctcgccgccgtcgcccagcggaccttctcctcctcctcttccccgcacgccccgccgctggctgcgtcgggctacaccccgcgccgcgagtacggcctggtgcccatggtgatcgagcatacctcccgcggggagcgcgcctacgacatcttctcgcgcttgctcaaggagcgcatcgtatgcatccatggccccatcactgacgatacggcgtccctcgtcgtcgcccagctgctcttcctcgaatccgagaaccccgccaagcccgtccacctctacatcaactccccggggggcgtcgtcactgcgggcctcgccatctacgataccatgcagtacatccgctcccccgtcaccacgctctgcatcggtcaggccgcctccatggcgtcgctactcctcgccgctggggcgagcgggcagaggcgggcgctgccgaacgcgcgggtcatgatccaccagccctcgggtggcgcgtcggggcaggcgtcggacatcgccatccacgccaaggagatccttaaggtgcgggaccggctcaacaaaatctacgccaagcacacgggccaggccatcgaccgcatcgagcagtgtatggagagggacatgttcatggacccggaggaggcacatgattgggggctcatcgacgaggtcatcgagcaccgccctgtctctcttgtgtctgatgctgttggcagtgattcgcaaaacctcggtggaggcggagctggggtgaataaaggagcggatgagccatcctcagcgtgatggcattggacagtcgcaaggtgcaatcgttgtcgtgctcctgtagctgtcttatttggatttaaggtttaattcgtacatgaggtgaataccttaattttctggttgctgggctaatccaatagcaacgctgttgttttgatactttaattgatctgttgctgataacgaatgctatctggtatgagccctcaacagcgttgttgaaaaaaaaaaaaaaaaa

SEQ ID NO: 2171 - DNA, 842 bp, Zea mays
  Clone ID: ZEAMA-23APR03-CLUSTER23_49
gtgctctctcagaggtgggctggcttctcctccccctcttaccaagtcctcttcgggttagggttacttagggttttgtggaggggcgatggcggcggctgatgtggagtaccgttgcttcgtcggcgggcttgcctgggccaccagcaacgagtcgctggagaatgccttcgcctcctacggcgagatcctcgactccaaggtttgcttcgtcctcgctaggtttcattccgcggtctgtttgtgccgttggggctagatccgggtcgtggttcaacagatctgcttcgttttggtacagatctgcgttcgctcgaatcgagcatgacgttttcatgtgattatgcaggtcatcaccgaccgggagacggggaggtctcgcggcttcggcttcgttaccttctcctccgagaactccatgctcgacgctatcgagaacatgaacggcaaggagctcgacggccgtaacatcaccgttaaccaggcccagtcccgtggcggtggcggtggcggcggtggcggctacggcggtcggcgcgagggtggtggtggcggctacggcggcggcggcggcggctggagggactgatgtgtgggcccatcctggcttcggccgagttatcttatctatctatagtatcgtgttaccgttcgcttctgtcaccgtgttagtgtccgttctacctttggattaggtgttggtacccctgttgttccctttgtttgctcccgctatgaaacgagacgagagaagaatgagcaaggtttttgttcgcagctatttttgtccaatgatattgatatgttgttcccctaaaaaaaaaaaaaaaaaaaaccccaag

SEQ ID NO: 2172 - DNA, 678 bp, Zea mays
  Clone ID: ZEAMA-23APR03-CLUSTER24073_3
agattagtcgctggagatagagacgagagcaagggcaactgacgcggtcaccctcgcccccaacacagagagaaggtctgctctccaccggatggactcccacggcaagcccaagcccgccggttcgccgccgccgacgccgccgactccgccgacaccgccgactccgccgacgccgccgacaccgccgacgccgccgacgccgccgacgccgccgacgctgccgacgccgccgacgccgctgacgccgccgacgccgccgacgcccgaggcgaggaaggggttcatgcgccgcatcttccctttcctcctagccgccaacctctttgttggagcttatgtcctcgtgcgggccaaccaaaaggactcagcaaagaaggacccaacgactgatcctgctactgcaactgctgggaagcctgctgagccagtctctatccccagaaaggagctcccaccaatccctgaagatgaccagcgcaagctctacaaatggatgctggaagagaagcggaagatcaagccacgcaatgctgccgagaagaagaaactcgatgaggagaaggcccttctaaaagagttcatccgagcaggatccctcccaagcttatgagctcacccatttgggtctcttgtgcctgatgttcagccaagaagatgattgggcctgattggatt

SEQ ID NO: 2173 - DNA, 1171 bp, Zea mays
  Clone ID: ZEAMA-23APR03-CLUSTER242372_1
acacagtccacacaatccagagcagagcaagaaaagaaccgctactatggcgagccttctcaagaagtttgtagacgctgtgcagtggaacgctgaggacgtcgccggccggctgggcatagtgctgcatgccgccttcctcttcgccggcttccagccctacggcaggcagccacgatcggggcacctccgcaaggagcaatcgcgcaagacgggaggctcggcgtgcctctgccgaatgtacacagcgccggatcttgcgcagcgcgagggcgcagacgctgccgtgctgctgttgtgtgtgcagggaaatgacgtggctctcctcgtgttcgccaccagcgacggcgacggcaacgacacgccggagaacgcctacctggaacgtctggatctcaagatcgtgaggccgctcctctcccgcagcctcggtggcgtggagccatgggcgtcgcggatctgtaagtcgctcgccgacggcctgtgctggtgcttcctcgacaagctgtgccgcaggaacggtctggcgctgagcggcttctcgtccctgcacgacgacctcagggctgtggtcttggaaaagctcaccgacggcaaggacctcgcgagggtggagtgcgttagctcccagctgaggctgctcgtggcggagcgcggccaggagctgtggaggaccctgtacaaggccctgccttcgtggcagtgcctgccgtcgaggtacaggtacctcccaaaatccgagagccccgacgcggaggcggagactctcaatattgcatcgatctggaagcacaagtacgcgcaggccaggcggcgtcccgatcctaccttcaggaatctcttgtggcacttcgattttgatgatgattacatccaattattttgtcatgtccgtccgtccattggttactgtttcgtccaagatccgtcggaggagaagaggattcctcctagggtcgacagaagcggcggcggccaccgccggaggctgccacgggacgaccgcaaggagtggcatggtggcggcgcgatccactcgccgtcgtcacgctatcggtggaaacatcgctagcttgatctcatcatgcgctgctgatataaatactatgcttcatgatgtgctgcgttataaattttatcttataaattttagcgaaaaaaaaaaaaaaaa

SEQ ID NO: 2174 - DNA, 1220 bp, Zea mays
  Clone ID: ZEAMA-23APR03-CLUSTER242486_1
aacgacgcgtcttgtaaagttgtaacgaaccgaaccggaacgtaacctctgtctcgtcaacgacctcgtccgtcgcgcccgaggcgaggaagcaacccgccccagtttcgcgctatggcgacggcgacgtcatcgaggcgcgtgtcggtgccggccctggcggccgccgccgtgctcctgctcgcgtccgtagccgcggccgacgaccacaacggcgtctacgacccctgcgcggacgcgtcggtgcagcgcggcgacgggttcaccttcggggtggtcttctccgggcgcgactccttctcctccggcggcgtgcagctctccccctgcgacagccgcctcgggctcgccaaccgcgcgcaggtcgcgctgttccgcccccaggtcgacgagatttcgctcctcaccgtcaactcctcctccttcgacccgtcttcttctggtgtgtacatggtggctttcgccgggaagaaatacgcagcgaggtcaccccctgtgttcgtcggcaacatctcgtacacggggaccggcttcacccggaggtcgcactgttaccgccccccgctcgagaacctgttctggaaggccggcgggtgctcgtcgtgctccgggcgctccgacttcgcgtgcgtggacggcagctgcgcggtcaggacggcgagctgcaggggcaagggcgggcaggtggagtgcagccccgggatccagctcgcgttctccggcacggacaggcacgaggccgtgctcaactcgtggtacgaggtgtccaagctccggcagtactccctgttcgggctcttctccaacctcaaggactcgctgaccaaccagttcagcagcttcttctagagctgcagtgctagctgccacgtctctctgtcctcctctgtcccgttgtatggttatcatgtagagtatgcttagcgaagagcacttctcctgtagttctgtttctggtgacagaagaaatatgtatgtgctcaacggctatcagattagtcctatatatatgtgcagtttataattcatatgagacggtgtaagttaccgtgattccactcgcaaagctgatcagggtcgttctggcgaaaagagtatgctcagcgaagagcacttctcctgtagttctgtttctggtgacagaagaaatatgtatgtgctcaacggctatcagtttataattcatatgagacggtgtaagtcaaaaaaaaaaaaaaaaa

SEQ ID NO: 2175 - DNA, 1030 bp, Zea mays
  Clone ID: ZEAMA-23APR03-CLUSTER242486_2
acgacgcgtcttgtaaagttgtaattgtaaaacgaaccgaaccggaacgtaacctctgtctcgtgagagacctcgtccgtcgcgcccgaggcgaggaagcaacccgccccagtttcacgctatggcgacggcgacgtcatcgaggcgcgtgtcggtgccggccctggcggccgccgccgtgctcctgctcgcgtccgtagccgcggccgacgaccacaacggcgtctacgacccctgcgcggacgcgtcggtgcagcgcggcgacgggttcaccttcggggtggtcttctccgggcgcgactccttctcctccggcggcgtgcagctctccccctgcgacagccgcctcgggctcgccaaccgcgcgcaggtcgcgctgttccgcccccaggtcgacgagatttcgctcctcaccgtcaactcctcctccttcgacccgtcttcttctggtgggtacatggtggctttcgccgggaagaaatacgcagcgaggtcaccccctgtgttcgtcggcaacatctcgtacacggtgaccggcttcaccctggtcctggagttccagaagggcacgctccagaacctgttctggaaggccggcgggtgctcgtcgtgctccgggcgctccgacttcgcgtgcgtggacggcagctgcgcggtcaggacggcgagctgcaggggcaagggcgggcaggtggagtgcagccccgggatccagctcgcgttctccggcacggacaggcacgaggccgtgctcaactcgtggtacgaggtgtccaagctccggcagtactccctgttcgggctcttctccaacctcaaggactcgctgaccagccagttcagcagcttcttctagagctgcagtgctagctgccacgtctctctgtcctcctctgtcccgttgtatggttatcatgtagagtatgcttagcgaagagcacttctcctgtagttctgtttctggtgacagaagaaatatgtatgtgctcaacggctatcagtttataattcatatgagacggtgtaagtc

SEQ ID NO: 2176 - DNA, 1234 bp, Zea mays
  Clone ID: ZEAMA-23APR03-CLUSTER2431_13
ccaatccaacgaactgaccacaactacctaagctaaaagctaaccaccgtacccccggccatggcgctcgcgcccacctccgctgccgtgctcaagaccccgttcctcggggccaggcgcgcgctcgccaagcccgcgcctcgccgcgcgctcgtcatcgccgccgcggccgccgccaagaagtcgtggatcccggccatcaagagcgacgccgagatcgtcagacccgccctggctcgacggctcgtgagtctttcgctgtctgtctatgttcacttataactgtgatacgtacgaggagaaaaattaaatggaggctcgaagctgaccacgacgaagcggccgcgacgacttgcaggctccccggcgacttcgggttcgacccgctggggctgggcaaggacccggcgttcctcaagtggtaccgggaggcggagctgatccacgggcggtgggcgatggcggccgtgctgggcatcttcgtggggcaggcgtggagcggcatcccgtggttcgaggccggcgcggacccgagcgccatcgcgcccttctccttcgggtcgctgctgggcacgcagctgctgctgatggggtgggtggagtcgaagcggtgggtggacttcttcaacccggactcccaggccgtggagtgggccacgccgtggtcgcgcaccgccgagaacttcgccaacttcaccggcgagcagggctacccgggcggcaagttcttcgacccgctcggcctcgccggcaccgtcaaggacggcgtctacatccccgacgtcgacaagctcgagcggctcaagctggcagagatcaagcacgcccgcatcgccatgcttgccatgctcgccttctacttcgaggccgggcagggcaagacgccgctcggcgcgctcggcctatgatttgcatgctgccggcgaccgagtcagttctcgattgcgcgcggggtgggtgagctcctagggacgtacggctgcagcggatcagacgccttgcctcgcagattggaggcggaagaagagcgtagcagcaatctactgtctgtgttggtggtttagcgtgcgtgaaccagatggggtgttcctctctgttttttctttctttcttttctgtgtatgtatgtaccatgtaatgtatagtatggatcgatttcattgcattaaaaaaaaaaaaaaaaaaaaaaaaaaaaaaaaataaaaaaaaaaaaaaaaaagggccctaaggcccg

SEQ ID NO: 2177 - DNA, 1155 bp, Zea mays
  Clone ID: ZEAMA-23APR03-CLUSTER2431_7
aaatccaacgaactgaccacaaccacctaagctaaaagctaaccaccagacccccggccatggcgctcgcgcccacttccgctgccgtgctcaagaccccgttcctcggggccaggcgcgcgctcgccaatgccgccgccaagcccgcgcctcgccgcgcgctggtcgtcgccgccgcggccgccgccaagaagtcgtggatcccggccatcaagagcgacgccgagatcgtgaacccgccctggctcgacggctcgctccccggcgacttcgggttcgacccgctggggctgggcaaggacccggcgttcctcaagtggtaccgggaggcggagctgatccacgggcggtgggcgatggcggccgtgctgggcatcttcgtggggcaggcgtggagcggcatcccgtggttcgaggccggcgcggacccgagcgccatcgcgcccttctccttcgggtcgctgctgggcacgcagctgctgctgatggggtgggtggagtcgaagcggtgggtggacttcttcaacccggactcccaggccgtggagtgggccacgccatggtcccgcaccgccgagaacttcgctaacttcaccggcgagcagggctacccgggcggcaagttcttcgacccgctcggcctcgccggcaccgtcaaggacggcgtctacatccccgacgtcgacaagctcgagcggctcaagctggccgagatcaagcacgcccgcatcgccatgcttgccatgctcgccttctacttcgaggctgggcagggcaagacgccgctcggcgcgctcggcctatgatttgcatgctgccggcgaccgagtcagttatcgattgcgcggggtgggtgagctcctagggacgtacggctgcaggggatcagacgccttgcctcgcagattggaggcgaaagaagagcgtagcagcaatctactgtctgtgttggtggtttagcgtgcgtgaaccagatggggtgttcctctctgttttttctttctttcttttctgtgtatgtatcaaatgtatgtaccatgtaatgtatagtatggatcgatttcattgcattaattccgccctggactggcagataaaaagaaaaaaaaaagacgggccgctcgcgactagaactaagtctcgagccgaattccg

SEQ ID NO: 2178 - DNA, 1785 bp, Zea mays
  Clone ID: ZEAMA-23APR03-CLUSTER24433_1
ttttttttttttttttggaattccacgagcatggcgtgttcggcactaaaaaacattgaacttctctttaagagcttttgctaaaactttgtgaaggacacatactcagaagtgacaaaatacacgccacgtataaacaatattatctctcgcaccagatcgatgtcgacgaccatttagaaacaatcaagcagccatcatctaggctctatccacatagtgacaaaagttccaaatcgagaactactcctacgctccgtcaagtactcgcccggcccagtcgtctcgtctgccagtgccatgtcggcgggaagtgcggccgccgtgtctggcacggactcggcgcctcacttcgtgctggtcccgatgatggccgcgggccacgccggcccgatgctcgacatggcccgcaccctctccgggcgaggcgcgctcgtcacgttcgtcacgacgcccctcaacctgccccgcctcggccgcgcccctagcgacggcgcgctccccatccgcttcctgccgctccgcttcccctgcgccgaggcaggcctccccgagggctgcgagagcctcgacgcgctcccgggcctcggcctcctccgcaacttcaacgacgcctgcgccatgctccgcgggccgctcgtcgcgctcctcagggacagggagggcgacgccccgccggcgagctgcgtcgtctccgacgcctgccacccgtggaccggcggggtggcgagggagctcggcgtgccgcgcttctcgttcgacgggttctgcgccttctcctccttgtgtatgcgccagatgaatctccacaggatcttcgagggcgtcgacgacgacgacacgcgccccgtgcgcgtccctgctttccccatccacgtcgagatatcgagggcgcggtcgcccggaaacttcacgggtcccggcatgaaggagttcggcgaggagatcatgagcgagagcgagagggccgacggcctggtggtgaacagcttcgcggagatggagcccatgtttgttgacgcctacgaggcggccatgagcaagaaggtatggaccatcgggcctctcttcctggcccccaccgtgccgttggcggcgacagcagaaaacgccaacgccgtccggtgcgtgagttggctcgagtccaacaagctccggaccgtggtgttcgtgagcttcggcagcctggtgcgctcgtcgctgccgcagctcgtcgaaatcgggcacggcctcgaggcgaccaagcgcccgttcatctgggtggtcaagcccggcaacctcgccgagttcgagcggtggctgtccgaggacggcttcgagtcccgcgtcggggagacgggcctggtgatcagggactgggcaccgcagaaggcgatcctgtcgcacccggcaacgggagcctttgtcacgcactgcggctggaactccgtgctcgagtgcgtcgcggcgggcctgccgatggtgtcgtgcccgcacttcgccgagcagttcatgaacgagaagctcgtggtggatgtgctgcgggtcggcgtgcctgtcggcgtcaagggtgccgcgcagtggggcgtggaggcggagggtgtgctggcgacgaggcaggacgtggagggggcggtggctgcggtgatggactgcggggaggagggctccgcgcgccgggcaagggccgccgagctcggcaggaaggctcgggaagccgtggtacacggtggctcgtcgttccgcaacgtggcgctgctcatacaacacgtccagcagcgaaccagcactagaaatccatggatt

SEQ ID NO: 2179 - DNA, 1735 bp, Zea mays
  Clone ID: ZEAMA-23APR03-CLUSTER24491_2
aaccgttaagcattatatggatttaaatagctttactttggttgatgcactgctgggctacggtataacctagaacccacgtcttcaaatagactgtcatatggtgcatttaccaccctcgaaccatagatgatttggcagagatgtcttctgccggcatcagcggatgcgtgcctacaactgtaaacataagaacaccatatacaaacgaatcatggacctgtatctgttgcagtgtatggtgaccatgacaagcctgcccttgttacttaccccgatattgctttaaactatatgtcctgcttccaaggactattgttctgtcccgaagccgcttcgctgctgcttcataatttttgcatttaccatattagccccccaggacatgagttaggagctgctccaatttcaccaaatgctcctataccgtctgttgacgatttggcagatcaggttgcggatgtcctcgatttctttggattaggctctgttatgtgcttcggtgtcactgcaggtgcctacattctaactctgttcgcggcaaagtatagggagcgggtactaggtcttatccttgtttcacctctgtgtaaaggccccacttggactgagtggttatacagtaaggtaacatccaatctgctgtattactatggcatgtgtgggttagtgaaggagtgcctacttcagcggtacttcagcaaggaagtgcgaggattctctgaagtacccgaatcagacatagtgcaggcttgtaaaagcctgctagaccagcggcagagcatgaacgtgtggcgcttcgtacagacaatgaacgagagatacgacttgtctgagcatataaagcggctgcagtgcagaaccctgatttttgtgggcgacaattctcagttccacacggaggccgttcacttgacgtcgaagctcgacaggagatactgcgctctagttgaggtgcaagcgtgcggttcactggtaaccgaggagcagccgcacgcgatgcttataccaatggagtacttcctgatgggatacggcctgtacaggccgcctagccaggtggtggagtgcagcccgcgcagccccctgagcccgttctgcatttcgccggacctcctgtcacctgagagcatgggggtgaagctgaagccgatcagaacgcgagtcaggcttgaggtgtagcagagggctaggctaacttttgcaggtctgtgtttagtttttggaggtatagttatactgccatgtatatataaatatataggaaacgctgttctttgatttgtagcctgaaagaaaataatagcagaagtttgggtgtacagtctctctattatgccattatacccgctggtttggttgggtggcaggattagatgtggttcccaaagaagcatatgtcttaagaagataagagatggaccagctgtagtaaaaaaaaaaaaaaaagggcggccgcccttttttttttttttaacacgtcaataacaatatttagctttaacaagcaatccaatcttggacagttttttcttaaaaaaaacctgagttcagttcaggcagggcagctatagttgtggctataacaatagaacatatatagtacccaacatgggtaactaatctagcacttgatctccttaagaccatgagagaaatagaggaatgtcggattagtggcaccatccttgtaataggcgaataccacggacgcttcgtccttcatgctctcacc

SEQ ID NO: 2180 - DNA, 1531 bp, Zea mays
  unsure (1)..(1531): unsure at all n locations
  Clone ID: ZEAMA-23APR03-CLUSTER24597_3
gagagaaggtgagtgctttgacaaggggaaaaaacccaggtctgtgtgtgtgtgtgcgagagagagagagagagagagagagagagagagagagaggcgaaggcnnctcaggcgacgcgatggcgatggcggcgctgcgacgcnaggggaggcgcctcatcctntnctccnccgtcccnaacccgtctctggcggccgctttctctgnggngacgcnatcctccgccgtctcgcaaccggagatggctccacttggtgcacggtctatttcaactcaaatcgtgaggaaccggatgaagagtgtcaggaatatccagaagatcacaaaggctatgaagatggttgcagcatcaaagctccgggcagttcagacaaggactgaaaattcacgtggcttgtggcaaccgttcaccgcccttcttggggatgctcctagtgttgacgtcaagaagaatgtgattgtggccattacctctgataagggactctgtggtggtattaattcaacatcagtgaaagttagcagggcccttcacaaattgacatctggtccagaaaaagaaaccaagtatgttatattaggagaaaagggcaaagttcagctgttgcgtgactcaaaggacagcattgaaatgactgcaactgaactgcagaagaaccctatcaactacacacaggttgccgtgctcgcggatgacatattgaaaaatgtggaatatgatgctctgagggttattttcaacaagttccaatctgtcatatcgtttaagcccacaatggtaacaatactttcccccgaggttgcagaaaaagaatcagaagctggtgggaagatgggtgacctagattcttatgagattgaaggcggcgagacaaaatcagagattttgcagaatctagctgagttccagttttcttgtgtcctgtacaatggtgccctagagaatgcatgcagtgagcttggagcccgtatgtctgccatggacagctctagcagaaatgctggcgatatgcttgatcgtctcactctcacttacaacaggacacgccaagcatccatcaccacagagcttactgagattatatctggtgcatcggcccttgaggggtagtgaagagactgcggacttcttccttttgccgtttgtgttcctctcccatgaaggcttttttcctcgggagtctcagtttcagctcctttcatttcacttttccttgagaaacttgctctcatgctttgttgcaataatcaggccaacgacaatgatagtgccgtgcacccttggcacattgcagaaagagtgtaaacagctatggttaatgggtggttttcatgaatggtgatgccccccccccgtattgttgcacatgatcagcaatgttgtattggtggggtgactaatgcctgccgccaaactgagcgatataacgcatcattaatgacatttgttcaatctggactttaaaaaaacccacgcgtccgcccacgcgtccgcccccgcgcccgcccacgcgtccgcccacgcggccg

SEQ ID NO: 2181 - DNA, 1139 bp, Zea mays
  unsure (1)..(1139): unsure at all n locations
  Clone ID: ZEAMA-23APR03-CLUSTER24639_2
ttacctagaacatcctaatcgaaaaactctcaatatgtttcttctcaaataaactatcttgtaatatatgcttgcatgcatgttgtgagataatggagtaaaacaatttagattggtgttattatatatattataaaaagaaaacattatcgaatttggtggtgaagtcacaattacatttttgttttgtatcagtaccgaagttttggctttgtattttcaaaacaaacacatacctattatacctactaacattagttgctacctattagtgtttctctattaaataagttcgatcactaagtttggtcaatcggttgtataaatttctttattaatataacaccagacaatgaaaggagcctatctaggagtgattctcctgataggtcaccaaaacacacaagtcgtagacgtgattttactccgggatactcatttgcaagataatatcattcaccttttattgatcgcttgcattatggtggaagaaatcaccgtgacaggtacatggtttaccagggttcccgatatcgatcaccgtcggagccccgccagagacagtatcaacaccaatgaaaataaattattattattatttaaatgctatagttaaatattttttgtatggttatcaacatttattatttctgataacacgccatcgagccaattctgaataggcagtcatttttgtttgttacttactccctccgttccaaattataagttcttttgactttttggtacatcaatttactatgtatctaaatataatgtatgtctagatacatagcaaaatctatgtaaaaaaagtgaaagcgacttattatttggtatggacggaatagtatctcctaatgattgaaacaattaagtttggagtttcttttccaagggaggaaagaaaaaaaaaaaaaaaacaaaaaaaaaaaaaaaaaaaaaaaaaaaaaaaagaaaaaaaaaaaaaaaaagaagataacagaaaagaggaagagagagaacaagaaggggcggcggcgcaagcatagggagcacggaccgcgacggcgggggggggggggcggcgacggccccggggtttttgtctgttctgcccgccggcctggggggggggcgccgtttgctgcccgtcgtgn

SEQ ID NO: 2182 - DNA, 689 bp, Zea mays
  Clone ID: ZEAMA-23APR03-CLUSTER246548_1
gcgatttatttccgagacagctcaaggccaaaggcaaaggcagcgcacgtacgtgttgaggtggcacttgggcacttggcagcagcttgagttcttgagatcgaccgttttgcgttgtgatggcggtcgcgggcagcaggatcaagagtaaggtgcgggagtggatgcggaagcggatggcgccgaggaggaagacggccgcggccgctacagggagcggtgacaacagcggcggcagtaagtcggcgtcggcgccggcgccggcgccggcgcagtcgtcgccgcggcggaagctcctggcggccgcgctcccgtcggcgctgcggtgtaggaagccgcgcgggaacgtgctggcggcgctgttccagcgcgcggcgtaccacctgctgtggctcgtggagtccgtggtggtggtcgcgcagctctgcttcttcttcgtgcgcttcggcttcaggctgtgagaaaaaaaagaagaagaaaaaagaaaacctcagcctgagggaacgatgcctctgattctgtcgattgtttgcattctttttctgctggccatatctccagtggctctttcgatttccaacaccacaagctgtaagtaacgtgttcttcttgtgttctggagaaaatgtgtatagtgctaaattgaaaaaaaaaagttttttattcccgatcccggtagacatgggaga

SEQ ID NO: 2183 - DNA, 1122 bp, Zea mays
  Clone ID: ZEAMA-23APR03-CLUSTER24697_1
agaagaacatcaaatacatactggctcactcgtgattccttcacccagctccagctaaatcatcaaaaagatgcccccctgcaaagtagcagcagtcttactcgtgttgatcacaacaatttctgtcaacaccgtaactgggtcgcgatgcaacgctcaggagaagaaccagattgtgagcttgtgccaaatgtacatccagagaggaaccctcgttcagctcccatcccaaactgggccatgctgtgcggcagtgagagagcgagagagggtacacaggggtatgcagatgaagtgcatcgccgagcttctaaacgctgcagaccggcagaaatacgatccaacaaagacatcctatatataggtgcaagcacacacacaagttttcggtcgaagaacatcaaatacatactggctcactcgtgattccttcacccagcagttcgtaaccacctgctaaatcatcaaaaagatgcccccctgcaaagtagcagcagccttactcctgttgatcatcacaacaatttctgtcaacaccgtaactgggtcgcgatgtaacgctcaggagaagaaccagattgtgagcttgtgccaaatgtacatccagagaggaaccctcgttcagctcccatcccaaactgggccatgctgtgcggcagtgagagagctggagagggtacacaggggtatgcagatgaagtgcatcgccgatctactgaacgctggagatctacagaaatacgatccaactaagatcaagcatcttgacatttcctgctacacttagcatcgttagtttcattcctctcctccccatgcatcgttgtcatgctgtgaagggcgcgatggcgtggaatggatgctggtagcaaagatgctcagaagatgacatttcgttagttatttaattaagtcttccaaggcgtcaatcttcctgacatgtatctttattcgaaaaaaataaactggattatttctggtatcaaaaaaaaaaaaaaaaaaaaaaaaaaaaaaaaaaaaaccaaaaaaaaaaaaaaaaaagcttatcgataccgtcgacctcaagggggggcccggtctccacacctctttaaacccctgagcgcccccccccccgcccct

SEQ ID NO: 2184 - DNA, 1737 bp, Zea mays
  Clone ID: ZEAMA-23APR03-CLUSTER24731_3
gaggggtcttccctgcctcgccgttcactcgcccagcgacctcgatcggatcctcatcgggactcgggaatgggaaaaatgcgaggctcctgcggggagctcagagtgcagcgggcacggctcccgagtcaggcggtttccttggtgcccgtgcagggttgatccagaggttcgagcgcctcgggttgctggaggatttgcggggggtgcgtgtttatgggcggctagatcggtgattcttcagctgctctcggtgtgatggcagctgactctagcatggggtttcaccaggggatcaccgcctcgctgtacaaccatcacatgctctcgttccagtccaacagcgacgtcggcatcagcggcgacgccaccggtgccatggtcatggccccggggagtgtgggtggcggcagtagcaacgccgggctgttcctctccgcaaacacaggggtcatgggcaacgcgccgggggtcgccccgtcaaggacctcgtcgggggatgcactccttggtaccgggacgcccaagtataagtacgtaactggtcctccttcggattggagtgaccgcgaggtggccatactgaaggaaggacttgtgagatatgctcgtgaaccgagtatcatgaggtacattaagatagcagctatgcttcctaacaggaccatcagggatgttgcgttgcgatgctggtggtctacaggtaaagagagaaggaagaaacctgatggattctatacagggaaaaaaatgagagacatgaagccaatccaggacaaaatggttgcatctgtcccaatagctaattttcacatgacacctacaaccaatgtaacccctttttcgatatcaatgcaacatccaaatcaacaaagtcaggttcccaaagaagtgcaacccagcgtctcctggaggaaaataatcagttgcttaaccagatttctgcaaatattaaaacattcaagacagtggagaacacagatctttttctccgcacgagtaacaacatcaaaacaattttaagcagaatgagcgaaacgcccggtatcatgggtcaaatgcctccattgcctttatccataaatgaagaccatataaattcgcttattcaactgaacagactggttgcatcatatggtacgacaagcatttctcatcatacgaagcaagagccatgaagctagtttaccatacccagggggaaaaacgagacgaccagatggccggacctcctgcaatcctgtaaacgtgctgttgaggaaggcttacatgttgttatactgaccaagcaccagggaaaaatcactgttttccagataatgtttttgcagtgatcaccagagtatcagacactttatcctggactccgcaagtgactgtaaatatcggatgactggaggcgttccatgttttgtttactgatcgttcgtgaatgcatttcttcttttcttgttttttattgttatcccagacagggttgcattgctcccaatatgtaactatgtacaatagccactgccctaggctgctaggcgtagaacgactccattttctgactatttggacactggaacccaaacatgttgtccaggtgttctgaattcttttttatcttcacttcagaagctttggaaaaaaaaaaaaaaaaaaggcccctatagctgtgccccaacatggacaacaacagtttattccttttgtttcgtttcaaattgtaagccattttagcattgtctc

SEQ ID NO: 2185 - DNA, 1371 bp, Zea mays
  Clone ID: ZEAMA-23APR03-CLUSTER24778_1
cggcctcccaaggcataagatggctccgtcccgtgcgctccaccgcccatctctcctcgctacggcggcggcgctgctgctgctcattctccctccatcagcagcagcagcagtgccggcgcctgctctcttcatcttcggagactccctcgtggatgcgggcaacaacgactacctcgtgaccctttccaaggccaacggaccaccgtacggcatcgacttcgaatcctccggcggcaacggcaagccgacgggaaggttcacgaacgggatgaccatcgcagatatcatgggtgagtccctggggcagaaatctctcgctccacccttcctggctccgaactcgagtgctgcgatcaccagcagcgggatcaactatggctctggttcttctggcatatttgacgataccggttccttctatatcggaaggattccgctagggcagcaagtcagctacttcgcaaacaccaggtcacagatgctggagaccatggacgaggaagccgtagccgatttcttcagcaaggctctctttgttatagtagcagggtccaacgacatcttggagtttctttcgccgtcagtaccgttcctcggacgagagaagcctgatgacccatcgcacttccaggacgcactggtttccaacctgacattctatctcaaggagctgagtgagctgggggctaggaagttcgtcgtgtccgacgtcgggctctcggctgtataccctacgtccgtgctctggagttcatgcccgcggggcagtgctcggcgtcggcgaatcgagtcaccgaaggctacaacaggaagctgaggaggatggtggagaagatgaaccgggagatgggtccggagagcaaattcgtgtacacggacacgtacaggatcgttatggcgatcattcagaaccaccgccaatatggtttcgacgacgcgctggacccgtgctgcggcggcagcttccctttgcctccgttcctctgcattggagccgtcgccaatcgctccagctcgacgctgtgcagcgaccgctccaagtacgtgttctgggatgcgttccacccgaccgaagccgccaacctcatcgtcgccggcaaactcctcgacggcgacgcggctgccgcctggcctatcaatgtccgcgaactgtcccagtacgagcacaaatgattgatgtcgacgacgcgcgcgatgtgaaggccggctcaacgattcattggttttgtgtccttgctgtagtttcgtctgccttgttggggttttctaggctaggcttttatttgcttcaatttcgtatggttgactaggactgcgtgcaaattggtcaatttattccatgttgacgggacaaaaaaaaaaaaaaaa

SEQ ID NO: 2186 - DNA, 1275 bp, Zea mays
  Clone ID: ZEAMA-23APR03-CLUSTER247850_1
actagtcagcccacgcctcgtggatcttactcttgcgtcgaccgaccccgagaaccttgccgccagtgagatcccagctggccaaacacagccaacctcctaaccgacctctggcagccataaaaggttgcgccgaagccctgccttcccttttccttcgccgcacaccaatagccattgcccaaatctgcgagggagagattgaagacgccgccgtgtgagagcaaggcgtctaagcgagtctcccgggttcaccgacaaattcatttcgttgaagcatcgcagtgtgccctgtggatccgtaaaagccagctcggggaccttctgaggccggtgtcaccccgctcgcggcatattgctcatcagagcaaatctacgctgtgaacctgccgcaccgagattcagctcggccttatcacaacctcaactctgacgagcaagtgaccgaggagcccggagcacagcaggttgaagatactaaacaggagctcgctgaaggtgaagagcaggtgccaccggaggaggactactacgacaagttcgatgaggtctaggtgtcgtctcccagtcagcatgatggcgccaagggatgataatattattagtttgctttatttattatcagttattttttaagacatttttgttatgtaataaagttggtgacatttttctctatacactgagtcattatatgtgttgatcttaaatctgggtttgccccttaaatctgggtgtgacagtgcgcgatggcggtggaccccgggatgcgtgcgacggcggcaccatgcgtggcggccgacgacaattccttgatccagaggcacgacggtggtagctctccgatccgaaggcatggcgataccggctctccgatctggtggtgcagcgactgtggctcgcagatccggtggcgcgatgtcggttcctcgacctggaggcacaacgacagcggctccctaatccgaaggcacgacaccggtggcttcccggaggtggctccccagaggcgtgtgtggggttcaccatccgcaccacgggccccgtgacatcctccaatcctgcgcatttcgagtatcctccggcgacagtctcctccaacccgacgactttggggtatcctccagcgatggagctcatcagatccatgtttatgcctccatggttgctttttatgccaaccactgcagtactttagatattccattagatgattttatgatgatgaatatggcgtctctaacttgtatttttatgtcaaaaaaaaaaaaaaaa

SEQ ID NO: 2187 - DNA, 857 bp, Zea mays
  unsure (1)..(857): unsure at all n locations
  Clone ID: ZEAMA-23APR03-CLUSTER2478_9
agatcaggatccattaacacccctacgtacgcctttcctctggaaacccttctctcgcctgcctctcccccgccgcgccgccacttcccctctcccgtcaactccggcttccgcgcgaggtcgagctagcgtttggagttctcgagacctgctgtgatggcgacagagcaagcggcggagaactacacggtggaggacctcgtggccctgaacccctacaaccccgacatcctcnacgacctcgagaagttcgtcaatgagcaggtctcatctcagacatataacttggatgcaaatctcagccttcttcgcttgtaccagtttgagccagaaaggatgagcatacagattgtggcccacatactgattaagcaaatggaggagcaattcaaggtattgatagttctttctcactacctagagactgctaggttcaggcaattttgggatgaagcagcaaagaaccgccacatatcggaagcagtgccaggtttcgaacaagcaatccaatcctatgcgggtaaatatacttcttgagccattgagtctgagatatgcagtctgttacatattgtaatgtgaacttgtctcatcaatatgagacttaatgcccagagtaattcttatgaatgttaaaagttttaatgttttcactggatttctagtagaaattgaaatgatgttccagttgtcagacttaggtgcaagtgtttttttgtcattggtgttggctgaagtgttacattgcttattcatgcccaataggcatgaaagtgggtatccgaattgttaggacaaatttaatattttaaaatagatatgtatgaaattcggtgctaatcttttcttatgatatc

SEQ ID NO: 2188 - DNA, 1610 bp, Zea mays
  Clone ID: ZEAMA-23APR03-CLUSTER2487_3
cctagaacatcctaatcaaaaacttggatttatttatttttgaaaaaaataagttatatatgctgattttggttctaatcaatatgttgtgccagcctttaaaaggaggatatatggtcagttttagaatatttatagtactctagttaagaaatctgactacagtaattaggaaactatctggaattaattttaaagtatcatattctgctaacagatatatggagaaatctacacattaattaggtaaccaaaggcttgtacttaaggttaaatgcaaatctttcaaataagtgaatctaggaaagaagcaaatcatggatcaagttctttggccactgatttgagcacaacaaaaactagattctggacttgtatactgatggaaactcaaaatacaagcatgagacattagacaactactgtattttcattttcttcatttgtttgaagccccattaaaagcctgttacatactttatctgatgctttggcttttacagctctgtgcaagaacagcctagatgaagtagattaatcatgtatgttttgccagttcagcaccaaagtataggaatgggattatctattgagtgttgatatgtctccatgcaaacatatccatccattaaacagcacaactgcacaagcttgtaggggctgaccattggtgggtgtaggggacggctgtgtgtggctacaatagccagcagggtcagggtggccagggttggggccaggcggctgatcatgcaggccgttgttggctgtgctggctggaggccgggcgggtggctggggcatggtctctcggagaggaaaggtggctggtggagtccctgcagagggaggcgctgttttgggctgctggttgtactcacttgtgatgcttgactgttgtcagctagttgggcacttgttaccatttgaacatgtattatcaagcagtagttgatttgtatgactgtattgtgtttattttctgccttatgttttttcctgtttgttaagaatgcaaaggaagaatctgatatgcaaacgcattgacaggctggatgtccatgtatcttcatccatattgttgtgaagcttgaactgggtggtatttgagttagagcttgtatatttaagttacttggtgacccctcttgtgatgtgcatgtaattaaatttgcatctgtttctgtatttgcaggattgttccttccgaagggggtgcacaatgtttaggaatttttattatggtttactgtaatgcaactctaaatcactgtcgtaatctgatctactaaccatttgggaaatgttctgttttcaggatagtccgtgttgaagctgctgaagagttccactggattgaggaccgatttcgaggctgcagaggaccctttaattaatccatcatgatcctatgttttgaaggagaaatgacgatcctagcgtgttgtcttaatattagacgttggcaccttctgtgttcttgaactttttgtgatagccgtggatgttgttgttatatataggtgtggacagtggaacattgcaaacccctctgcgaccttgattcctcgctgtattcctgagatggctgttattagcgtgccttgatc

SEQ ID NO: 2189 - DNA, 1722 bp, Zea mays
  Clone ID: ZEAMA-23APR03-CLUSTER24902_4
caccaaagaaagggctcccatacttctcatagttatatgtatccatctgttaagtcacaccatgtaaacaagctccgaccacctacatgtgtcctgaagattttacatactatactggtagcaaggcctcggacagcacatgctcggctcctgctagtaagctacaggacttacaacctacagcaaaacaagatattctgcatacaatcagaaagtcgctgagccggttctcctcagttggtacttgggttccggaagaggctcagagaaaagtatattttccaactcctttaacgtggttagcttcttattctcctcttctaatcgagaaaccttgttttccagttcattagtgtatgcctgcttcctagcccttgaacgagcagctgactccctattcttgatcatcctcttctgccttctctccaccaacttatcagccacatctcctggggaaccacgctttctaccaggcatcggagaatcagaaagtgcacccatcatcggtgaagaaatgtggccatcagagtatgactccaaaatagcacttggtccaacattcagggactgaaggcttaactgacccggtatgtaagcacctggcaaactatgttgcctgtgctgatggggctcgatagctgtaatccgctgctgatagtggtctaaccattgtgcccctgctgtcaaacccgcagccccagtgctaccaacctgttccacactgcctatgccattcaagtccttcagatatccttcggcgacaaccccagctttcaccaagaaatcctcaagcgtcatctctccaagcgttggctgccgctcccgcttccgccgaccactctccccaacatttctgtttggtgcatcctggatgtccttccacacctcgtccacagttctcctgctgagctcaggcggcattgtgatacttccctgtcgcaagaggcccgaactctgctcatattggctggtagtgccaccatcagggtccaggtcatcaggaaagacactcttcagcagctcctcaaggttcatgctgtgtaggggttctcccaaatggctctgcacctcatcaagggtaaggttatacagagacccttgtcttgccagactctgcatctgcccgcgttgcgctgcaccggcaccaccactactacccatgcctcttccacctcccccagcctgtgatgcgattgtctggctccccataaatcaacaggtttcaggaacaacactagccggtctccgttttactgtcactcagatcaagcgaagacaaatcgcacatctctgggcagaaagatcacaacctacacgtgagacgcgcagcccttgccagcaccggagacggtgacgacatcgcctatcagctcaccacaggcgtcgaccactggcctgggcgcctggcgtcggtctggggctgcttcagtgcttcgaacgaaacaggaatgggtcaggcaacgaggcggaaggcgctaccttgtgtggcccgaccgaggcggagcgcctgagcagggcgcgggcggcaaaacaaatctttccctttcacttctcaagaggggcgccgccgcctagcatctgccattaggggaggaggtggaaggggaggaggcggccatttgatgggtgtgcgaggaaaccatcggggtcgggggcctgagagagatcttgtttagtgttaggcagtgtcacctaacccggccggcctcgagggtcccaatg

SEQ ID NO: 2190 - DNA, 736 bp, Zea mays
  Clone ID: ZEAMA-23APR03-CLUSTER24936_3
ccacgccaccaccaaacgcctctctctctctctcggccgccggcctccgtcgcattcaacacgtacgccatggcgcgcctgctccgcgccgccgcgtcctggcgctcctggccgtctccaccgccgcgctgtcggcgccggcgtgggcgggcggcgtgtccgcggcgacctggcccatctgggcgccgccgtcgtgacgcggcgcggcggcgggcgggcgtgccgcggcggtacgacggtgggcgagtgcatggagtacctggacgtggacgcggagggcgaggccgacgtggcgggcatggcacgggcggcagcaagcgccgggtgctgcagggcggctccggctacatcggctacgacgcgctgcgcagggacaacgtgccgtgctcgcagcgcggcgcgtctactacaactgccagcccggcgccgaggccaacccctactcgcgcggctgcagcgccatcacccagtgcaggggctgatgcctgcctgatgatttccgttccattccgtttcgtccccaggtattactagtcgcacccagcagcagcgttaaggacaatcggttgctgattttcttttttgggggtattatttaatttaaaaaagaagacatgcatggaagctagcgaggtcgtcggctttgctgagggatgaactcgcccatcgattattgtgctgcagtggacatgtggctgggctccctgttctagaatatccccttgctttccggaag

SEQ ID NO: 2191 - DNA, 939 bp, Zea mays
  unsure (1)..(939): unsure at all n locations
  Clone ID: ZEAMA-23APR03-CLUSTER24938_2
acacccacctctttttattcacactccggccgcctctcgctcttccggtcttcccccatctccgtgaaaccaacgccccccagcccagcggccgcgcgaatggaggttgctgcggcgaaccaactcctccccatggcgctgggccccaactccccgtcgtcctccacctcctcctcctctccctcgtccgccgccgccgccgcctcctccccgtcgccgcgccagcagcacccccacgcgcccgcgccgccgtcgcccacgcccaggcccgtgacgcgcatcatcgacaccacggccttccccaccaccttcgtgcaggccgacaccgccagcttcaagcaggtcatccagaggctcaccggctccgacacgccgccgccgccccaaaagaccgtcaagagctacccccaccaccacggcagcgggcccataaagccggccttcactgtgtacgagcgccggatcggtcagagcaacctcaagatgatcgcgccgctggccatggcggtgaacncggaaggcggccccgaaggtgctgtcgcccagcgtgctcgacttcccttccctggcgctcggtagccccgtcacgccgctgctggccgaccccttcaaccggtcggcgtcggcgtccccgggcgagcaggacgaggccgaggccgcggccatcgcgcagaggggcttcttcctgcacccctcgccgaggggcgccgtcgagcccccgcggctgctgccgctgttccccgtcacgtcccccaagatggcccagtgatcggggcgggccccccctgccggagaattcctagtactgccgcttgagatcccccttgttcaattaactacttggtgcgtcatgtattttttttttgtttttttttgcccatggtattcaactcttgagcgatcgcgaaggaacggaaagaatgatcccactcttgagct

SEQ ID NO: 2192 - DNA, 1406 bp, Zea mays
  unsure (1)..(1406): unsure at all n locations
  Clone ID: ZEAMA-23APR03-CLUSTER24987_4
cacccgggtcttcctacgattttccccgcgagccctctttcccttagacccttcttaattggcaacccttttcgcccagtccgccctagagcctcctctgttgccccccggccgcttggcccctgtttccgcctccgttgctgancccttggattggacctgcccggacgtcttctatgcccgagtccgtaggtggagctcccccttcgcctccgtggaagatgaaggcccttcccccgcagggtttctccgagagcccctttcccccccgcgccgcccgagtaggctcctcctcgcccgccgtcgctggcgtcgactcccacggtttccctgacatcgagaaggaggtcttcgcccgtctcatggagaagagaatctcggaggtcgtcgcggccccggtgcccttcctcgaagagctcctcccccacttcgagcgcctgccgctgagctgcgccactcgatgtgaacatcgacaaggcggaggacatgctcctgcaccagcgcattctcaacgaatgcgctgaccctgaaaatcgccccatcttccatgtggttttcaacaaaatggtgaaacgccctcgtttgggtgcccctttaaacccccctatagtcacttgtagtttcgaatcacctttttgaaaaaatctcccagcccttcttgagtattctttaggagttatgtcctgcttgctaaaaacatatgcccataaatatgctgcacagaaaatttgaaccatgctcagggatcgaggacctctgtttctctggacaaaaggttgtggttttctccgtggccggttccccgaggggagatctaaattattgtctagttttctcaattttgttcaggttaagactttattctgtttaacacatgcgaagggatcgaggacctcagtttaactggacaaaaggttgtgggtgactatgtggccggttcttcgaggggagatgtagaaatcctccatgttcatgaaattattttttctaccattgacaaaccaaagctcctcgctcagctatctgctttgttatctgaagttggactgaacatccgtgaagctcatgtcttctcaacgactgatggcttttgtttggatgtatttgttgttgatgactgggatacaaaggaaacagatactttgctacagattctcaaggagacagcggcacgaaatcatgcctcattatcaaacccaaccaattctgcagcctcagaaagagtactggaactacaagagaagattggtgattcaaatattgacaggaatttcattgatattatatatggattagctggttcatatttttattgctacaatgttattgctactacttatccacttcatcatacgaaaaataaaataattaactaccnnnnnaaaaaaaaaaaaaaaaaaaaaaaa

SEQ ID NO: 2193 - DNA, 1662 bp, Zea mays
  unsure (1)..(1662): unsure at all n locations
  Clone ID: ZEAMA-23APR03-CLUSTER24992_1
agcacaagaccagtacctagaacatcctaatcgaaaagcatacttgcagctcgcacatctcatggtgtcgcaggaacgacaagagccagctgtgcctagcagcagcagcagcagcgccaagcgcgcagccacgtccatggacgccagcccggccccgccgctcctcctccgcgcccccactcccagccccagcattgacctccccgctggcaaggacaaggccgacgcggcggccagcaaggccggcgcggccgtgttcgacctgcgccgggagcccaagatccccgcgccattcctgtggccgcaggaagaggcgcggccgtcctcggccgcggagctggaggtgccgatggtggacgtgggcgtgctgcgcaatggcgaccgcgcggggctgcggcgcgccgcggcgcaggtggccgcggcgtgcgcgacgcacgggttcttccaggtgtgcgggcacggcgtggacgcggcgctggggcgcgccgcgctggacggcgccagcgacttcttccggctgccgctcgccgagaagcagcgcgcccggcgcgtccccggcaccgtgtccgggtacacgagcgcgcacgccgaccggttcgcggccaagctcccctggaaggagaccctgtcgttcggctaccacgacggcgccgcnncgcctgtcgtcgtggactacttngtcggcaccctcggccaggatttcgagccaatggggtgggtgtaccagaggtactgcgaggagatgaaggagctgtcgctgacgatcatggagctgctggagctgagcctgggcgtggagctgcgcggctactaccgggagttcttcgaggacagccggtccatcatgcggtgcaactactacccgccgtgcccggagccggagcgcacgctgggcacgggcccgcactgcgaccccacggcgctgaccatcctcctgcaggacngacgtgggcgggctggaggtgctggtggacggtgagtggcgccccgtccggcccgtcccgggcgccatggtcatcaacatcggcgacaccttcatggcgctgtcgaacgggaggtacaagagctgcctgcaccgcgcggtggtgaaccagcggcgggcgcggcggtcgctggccttcttcctgtgcccgcgcgaggaccgggtggtgcgcccgccggccagtgctgcgccgcggcgctacccggacttcacctgggccgacctcatgcgcttcacgcagcgccactaccgcgccgacacccgcacgctggacgccttcacccgctggctctcccacggcccggcccaggcggcggcgcctccctgcacctagcgagccgggccaaggccgtctctttcgccccacgtgcgcgcccagctgggcaggtgggcagacacgcggcccgcgggccccgcgccgccttgccattttttgacgctggccctactgctgtgctactagtgtacatatgcaagagtacatatatatatatatatacgtattttctatatattatatataaaagcaaggcggcccggtgcccttctcttgttttgtccacaactgtttgatcccattattctatggaccatggatacttcaatgtttgtactaagaccgtgaacgtgggattcttttccaaaaaaaaaaaaaaaagatcaataaaaaaatctaaaaa

SEQ ID NO: 2194 - DNA, 1963 bp, Zea mays
  Clone ID: ZEAMA-23APR03-CLUSTER2503_1
aaccagcacaacgaagtcccgcgcacgcaaagaagtcacgtccaaactgaaggtgacaacatggagtccgcgccgtcaacggcggcggtcatggagcgcgagcgcctcacggccgagctggccttcgcggaggccgacgcagagcctagcagcttcgtcgtcaagatccggtgtcggctgccggacttcgcgcgcagcgtcaacctcaagtacgtccgcctcggcctgcgctctggcgccatccctgcgccctcctcatgggtcccgctcgcgctcgcgccgtcgctcctcgtcgcggcggcatactcgctcgttggcgcggacaagttctactcactcgacctgctcacctgcatcgcgtggctcgccgcggcggtgctgctgctcaccgtgtatttcctcatgcgcccaaggccggtgtacctcgtggacttcgcgtgctacaggccgggcaacgagcacgccatctccaaggagggcttcctggacatgacagagagcacgggctgcttcaacgcggaggcactcgagttccagaccaagatcaccaagcgctccggactcggcgatcggacgtacctcccgccgggcatccaggcacggccgccgcggctgtctatggaggaggcgcgcgcggaggccgaggccgtcatgttcggctgcctcgactcgctattctcggccacgggcatcgacccacgccgcgatgtgcgcgtgctcatcgtcaactgcagcctcttcaacccgacgccgtcgctggcgtccatggtagtgcaccgctacaagatgcgggaggacgtcaagtcgttcaaccttggaggcatggggtgcagcgcagggctcatcgccgtggacctcgccagggacatgctgcaggcgaaccccgggtgctacgccgtggtggtgagcaccgagaacatcaccctgaactggtacttcggcaacgaccgctccatgctgctgtccaactgcatcttccgcatgggcggcgctgccgcgctgctgtccaacaggcgcgcggacgccgggcgcgccaagtaccggctgctccacacggtgcgcacccacaagggcgccacggacgagtgctacagctgcgtgtaccagcgcgaggacgaggccggcaaggtcggcgtgtcgctggcgcgcgagctcatggccgtcgccggcgacgcgctcaagacgaacatcacgaccctgggcccgctggtgctcccgatgtgcgagcagctcaagttcctcaagtccctcgtgctgcgccgcgccctccgctcccggggtgtccgtccgtacatcccggacttccggcgcgcgtttgaacacttctgcgtgcacgccggcgggcgcgccgtgctggaggaggtgcagcgcagcctggggctcagggacgcggacatggagcccagcaggtgcaccctgcaccgcttcggcaacaccagcagcagctcgctctggtacgagctcgcctacgccgaggccaagggccgcgtccgccgcggccaccgcgtgtggcagatcggattcggatccggattcaagtgcaacagtgctgtctggcgcgcgctccgcgacgtgccgcccgtgcacgccgacggcgccggcggtggcagcaactgcaacccgtgggtggacagcattcagagctacccgccaaaagagtacatctgatcgccatcttctttgtggtgaattaatcacgtcctgttggatcagttgtactagccgcgacgcagtagtgcacgagaactgtatgtatggtgattttttttttgtttcttcatcaggtaggagctgaatcttctttcttctacctttacatacagtagtgcatgcgagaacaaggcgttgccacgcattggattaccgagtgctgtggcttcttaatgattgcggaccggtagacgtatttaaattgagattatggtaagtatggtagatgaacaacaaaaaggagcagttgtag

SEQ ID NO: 2195 - DNA, 1757 bp, Zea mays
  Clone ID: ZEAMA-23APR03-CLUSTER25044_2
atcgcaccgcgagtttcgaaaacccaacccaatcgcgcctcagatcacgcgagggtatccgtcccagcctccgctcacccgtggatcgatcgtctggcccaggggctctccggcggcaccggggccatggaggaggacccgctcatcccgctggtgcacgtctggaacaacgccgccttcgaccatgcctccgcctccgcgtggcacgcccattcccctgcgcccgcgagcgcccgcgagggggacaaggagaaccaccgccccgagcccgacgttgaggcggaggtcgacgacgttgaggccgagatttaccacatcgaggcggagatcctgcgcctgtcttcccgcctccaccacctccgcacctccaagcagacggagccgcccaagcgtggacaggtcgcgcggacgcggatgcgggggctcagtctgggccagctcgacgtcgccgctgccgtcgactccgacccgctcaccgacaagcagcagccgcgcgccgcgcagggcttgaaaaagcctatcaagcaggccccggcggcgccgcgaggacggagctccagcctcgggtccctcgagatcgtcgccacgaaccctagggtcctccgctcctcctccgccgccgctgccgcaccgcagaggaagattcagggcgagggtgagggcggcgccgcgcggccgatcctcaggccgatcaaggagcctcccgtgcagcggcgccggggcgtcagcctcgggcccttggagatccaccacggggtcggcagcaagcccggggccgcggcgcgggtcaagcacttctccaacaacaggctcggtgccgttcgagaggaaggccagcgttccaaggagcacgccgtccccgccagaccgtggccatccagcaatgccaggcacccactggatgccaggcaaggcaccgcagcaagcagagccaaggcgaggagcgggagcatgagccccagcaggttcaggaggcagtccacttccaaggctgccgagacaagagcgggaaatgccaagcctacagctacagaggcgacgaggggagggagcgaagcggtcaatcacaccagcaatagccacgacgaagaggccggcggggagctccaaggtcagggttgtcccgagccgctacagcatcccacctggctcctccctagcagctgtgacacaaggcaaccgatgcaagcagtctctcccgggatcggctactgagaccagagtaaatctcactgagccgccgaacgacgagttgtctcctgaagaacttgccaaggttgcagagctgctcccaaggattaggaccatgccgccttctgatgagagcccgcgtgactcgggatgtgccaagcgtgttgctgatttggtcgggaagcgatccttcttcactgctgcaggggacgatggcaatctcgttacgccctaccaggcacgggtggttgaacttgaatcacccgaggcagcagcagaagaagcagaagcttgagaagtttgtctttgatcaattccgaagtggcttgcatctgggcgtggcctctttttgcagtgtgtgctactacatagtctactgttacattcatatcatatcacatttcctattttttcccccttgagacattgcttagtacttttgtgttgccttgtgaaaagagagtggaaaggtttgcatctgctgatgctcttgtttcggattgtgtgttcctggttcgatgaagtacaggataatgctgtggtttataacatgccgcctcatttgg

SEQ ID NO: 2196 - DNA, 1449 bp, Zea mays
  Clone ID: ZEAMA-23APR03-CLUSTER25048_1
ttttttttttttttttggataaataatgtataaaataaagtataattatttatcttaaatttaccgttattctgattatgagaccattacctacaaaatcccgtgctaaaaagcactgcttatcgcacgtccatccacaaatctctccagggaccaggggaacggtcgtcccgaatcgccggccatgaagtgccgctctgatgcaccaggcggtggtgacggccaccgggaccgggtcccagcccccgctgccacaggcgtcggcggctcgcccccgggcgagcggagtaagaagcagcggacgcaggagccgtcctcaagctccagcgtggatggcgagtgctcgtcttcgacttcgtcctcgcaggctctgccgccgccgctgccggagcagttgccgcaggacgcaggagtgggcgagcagccgcctccaggacccgaggccgcagggggcgagcaggcgagggtgccggatctcggggaggacctggtgttcgaggtgctgatgcgagcggaggcccggacactggcggccgcggcgtgcgtgagccgcgggtggcggctgctggcgagggacgagctgtggtgggaggcggcgttcgtccgggagtgtccgtgcactagatttctcagagcagttgcttcgcttggcggcttccggcgcctacacgagatgtacatccgtccggtccagcggcgtgctgctggagcgccgcgcgggcagcagaggcggcagttgccggtgaggatgggccgggatcaggtccaagtctcactgtcacgtccaagtctcactgtctttgctatcgacctcattcttcctgaagatgcctaatgctcctccacctcctcctaaggacaaggataaagatggagataagaatggaggtggccagtgtgggtgatcactgatcaagtttgtgaaaaataggagcttacctcgcatgctacatcaccacaagctgcttatgttatgtaggtgattatgttgtggttcttcactgtatttgtggcagtaaagaggtgatcaagtcatttggattggtgggcagagaagactattcagataggtgcggatgtactgatcgggaggcaaataaggtgagcgagattggatggaattcattgcaatagcgtattggatgactaccaagtctgtgtgttgtacctaaattacacacgaaatgggctcatctgtaaagtttccatgccatatatgtgaatatgcgaggtgccaagagagatgcagcatgctctttgtgctgttgtgccatgggaataagggtgagcctcttagggcttcatcatgctctttgtgctgttgtgccatgagagtaagtgtgagtctcttagggcttgtttagttgtatggggattaaaggggattgaggaacatacaattccttgctagttaattttggagggggattgagaggcatacaattcctt

SEQ ID NO: 2197 - DNA, 1388 bp, Zea mays
  Clone ID: ZEAMA-23APR03-CLUSTER25103_1
gatccacctgcaatcggatgggtatgcatctgatttaataaatttctctcaacgtctgcgtcctctctcgtctccacactccggcgcacgcggcacgccgcacccacgaatccttcctcctcctcctcttcgtcccgatccacctgcaatcggatggtctcgctccgctgcgccgttggtctgtgcagcagcgctcaggttggttcgagctggccgctcttccaatccccccaccgcatcgcagttccgtccgtggccgcgcgtgacgtgacgtctcctcgagcgcctagcgcgtggtctagatcggcaagcgcggcatccatggagacagccaggctcacgccgagggagcaggccacgaccaggatatgtcaggtgtcgagctttgcgacggaactgctcgagataaggtccaaagagccgtccctccacgtgctgcttattgctgggaacccagggcatcgctgcgttttataaggactgtgtcgaggcgctctatgaaaacctcggtggccaagcatctattacagcaatagggcacatttcacacagccagaaggattgcgagcatgggcgattgttttcgttgtatgaacaaattgaccacaaggttgatttcattgagcaagagcttcagcattctgaacaaccaatagttttggttggtcattcaattggtgcatacataggcttggaagtcttcaagagacttcagaataagataaaatttattgtaggactgtatccatttttaaagatgaacaagagttctgtaacacaatcagcaatcggatatatagcaaggtcatccctcctaagtaaatgggctagtttatttgcatctttcattgggtcactccgaccttcaataacaaggggcattgtgagaaggttccttggaccttcatggtctgtaacagctgttgatgctgcatgcagccatctcttaaggtacaacacaatgcgcaatgtccttttcatggcaatgacagagttccaaaagcttactgaagaaccagactggactttcatcagagcacaagaggacaaaatggcctttttgttcggtgtggatgatcactggggcccactatctcacttagaagagatatcaaagcacgcaccaagggtcaccctgtcggttgaaacagaaggtcacacacatggttactgctgtacagaggctggatctgtctgggttgcagactacatcgcaaatttgattaaaaaccaaatgctcctttggaacaactgaggttcatttggcagatgtatcataagactcttttctccgaaagaagtgaatagctggagtgtggtggaacttattgaggttccggttttgataatctagtccacatttttttggctcaaaaaaaaaaaaaaaa

SEQ ID NO: 2198 - DNA, 1296 bp, Zea mays
  Clone ID: ZEAMA-23APR03-CLUSTER25155_1
acacaccattattagggcatttgagcagaagcagaacagagcagggcaaaagcttccaaaagaaccagtaaaagccaagaaaagcaccgagggccggagaagcgtgcgtacgtacgtacaggagcagcagaaacaatgaggcaaggagccgggttcaacgcggcggcggcagcggcgacggccgccgcaggcgcaccggcggtggccgggcggcgccgcggcgcgctccgcgtggcactcggcggtgccgtacctttgcggccggctgcccgcgtatgctgggcctcgtagccctggcactgctcaccctggcgtgcccctgctggaagctctcgcggtggcgggagcggcgcgccgcccggcgggggcaggccaggacggctcgaacgccggcgcccgcggcggaacgaagccggcggcgggcctgccgccgccggcatggtggaagctcaccgggtagctcgagggcggcgccgccggggcggggaggcgaggacggctccaacgccggcgccggcggcggaacgaagccggcggcgggcctgccgccgccggtatgggaggagaagatactggtgatcatggccggggacgcgaagccgacgtacctcgccacgcctatgtcgaggagggcgtcctccttcgggggcgaacgtagcagcagcaaggacgtcgacgtcggcgaggacgcgagcatcaagtaggtgcagtgagacggtgccgccctggccatcgccagggacagcggcggacagaatggtggcgagcacagtgtgcgccggaaggaggggagagatcaggagcgccgcattcctgaggtgtgatttttgtttcggtttgcaactttgctttgctcggagaagctgagctcgcttttgacgctggaaaaccatctccggccaggagaagagaaccccgacccgagcaagattttggtggggttgtaattttttttgcaaatgatgaagtggagaacgggactggtggtgtggctgtaattttgctgagttgcacttgcatgtaacttcttctacgatgggaatggattaacagcacagcatgcatgcataaccatattgatgaacagatctttcgcttggctgttgtttcttattggacaaagtttgtgcttcttcttatttttgctcaacttatcgatggaaacgggaacaacagccaagcgaaagatttgcttttccttttcttttcgttctcatcttccatggtcaactggcatgctgttttgtgtatttttcgattaggatgttctaggtaatggtctcgtgcgaattcctg

SEQ ID NO: 2199 - DNA, 905 bp, Zea mays
  Clone ID: ZEAMA-23APR03-CLUSTER25155_3
acacaccattacattacagcaaagcagagcagggcgaaagccgccgagaagctccgaggaccggcagcgacgacaggtcaggggaagcaagagcagcaccagcagcagcagaaacaatgaggccaggaggagcagggttcaacgcgacggcggcggcgaaggtcgcggccgcaccagcggtcgccgccggcagcgccgccgcgcattccgcgtggcactcgccggtgccgtaccttttcggcgggctggccgcgatgctgggcctcatagccttcgcgctcctcatcctcgcgtgctcctactggaagctctcagggtacctggagggtggcgccggcgagggcggttccggcgccggcgccggcggcgacaagccagcggcctcggacctgccgccgccggtctgggaggagaagatactggtgatcatggccggggacgtgaagccgacgtacctggccacgcccatgtccagcagggcctcctccttcggggaccgcagcagccagggtggcgagcaggaggagaaggagaagagcaaggtgcaacaacaagtcgccatggccagcgtcgtcaaggacgccgaactgaacggtgagcgcagcgagagccggcggagagaaggagaggagcgccatatccctgaggtgtgatccccacttctgaaagaagttagattaggtcttgtctcgggttttccatcggtggagtggaatcgtgatggccagaacgtaacagggcagagcatttttttcttcttcttggtttgctcagagaagctgagcgcttgcgcttttgtgacgctgtaaacccgtctccgagacaaaccccgacccaagcaaaattttgtgggggctgtaaatttttgcattgatgaatcttcagaacgggactgacgcggccgt

SEQ ID NO: 2200 - DNA, 1414 bp, Zea mays
  Clone ID: ZEAMA-23APR03-CLUSTER251595_1
aaaaagcatcctttcacctcaaagataaggaggccgtaacctgtcggggccctcccccaatctccagcgacgccgtccccccaactcgccacccatggccatgtcgttccacttccacccgctggccgcctcgcgcgtccacttctccccactcccgttcgccgccgctgccgcgggggtgccctccccctcctcctccgtcgccatcgcggcgcaccaccaccaccaccagcactgtcgccgccgcttctccgccatcgtggccacggcggccgccgcgtcggcggcgaccacggagttcgacttcaaggcgtacatgggggagcgcgcggtcgcggtgaaccgggccctggacgcggccgtccccgccggggagccccccgcggcgctgcacgacgcgatgcggtacgccgctgctggcgggcgggaagcgcgtgcgccccgcgctgtgcctggccgcgtgcgccgtggtgggcgggccggagccctgggccatgccggccgcggcggccgtcgagatggtgcacaccatgtcgctcgtccacgacgacctcccctgcatggacgacgacgacctccgccgcggcaagcccacctgccacgtcgtctacggcgagcccatcgccgtcctcgccggggacgcgctgctctcgctctccttccaccacatggccagcgtcgggtcctaccctccggacgtggacccggagaagcaccccgcccgcgtcgtccgagccattggggagctcgcgcgctgcatcggatccgagggactcgtcgccggccaggttgtcgatctcgagatgacgggcacatcagagacggtgcccctcgaacgcctcgagtacatccacctccacaagaccgccgcattgctcgaggcctcggtggtgattggggcgatcatcggaggcggcacggacgagcagatcgagaggctgcggaagtacgcgaggtcgatcgggctgctgttccaggtggtcgacgacatactcgatgtcaccaagtcgtcagaggagctcggcaagacggcggggaaggacctggcaagcgacaaaacgacgtacccgaagctgctggggctagaaaagtcgcgggagttcgcggaggagttgctctctgatgccgtagagcagcttgcttgcttcgacaaggagaaggcagcgcctctgttgcatctggccaactatatcgcccataggcagaactgagaatttgaggtgattgcgtactctattgtcggacctgttgtaactttgtcaggccgtcgcccgtcgaactggggttcgaggaatatatccaaatcgtcatgtgatgtatactagctgtagctctgtaccttgatggaatggggctgtttagttcgaattccaaaagtatgaaataccgtatccaattatgaacctaattatta

SEQ ID NO: 2201 - DNA, 998 bp, Zea mays
  Clone ID: ZEAMA-23APR03-CLUSTER2516_14
aaaaaacgccacttgttctccctccctctctgcctgaccagctaggatcagcggaasagcaatggtgatggcgtcgtcgagcgggctgaggagctgcagcgccgtgggctgcccagcctgctggcgccgtcgtcccggtccggccgcctggcgccgttctgcgcaacgccaccacctctggccgcgtcaccatgtccgcggagtggatgcccggccagccacgccctgcccacctcgacggctcctctcccggggacttcggcttcgatccgctgggcctcgcgaccgtgccggagaacttcgagcggttcaaggagtcagaggtgtaccactgccgctgggccatgcttgccgtccccgggatcctggtgccggaagctctgggcctgggcaactgggtgaaggcgcaggagtgggcggccgtccccggcgggcaggccacgtacctgggcgccccggtgccgtggggcacgctgccgaccatcctggtgatcgagttcgtggccatcgccttcgccgagcaccagcgcaccatggagaaggaccccgagaagaagaagtaccccggcggcgccttcgacccgctcggcttctccaaggaccccgccaagttcgaggagtacaagctcaaggagatcaagaacggccgcctcgccatgctggccttcgtcggcttctgcgtccagcagtcggcgtaccccggcaccggcccgctggagaacctcgcctcccacctcgccgacccgtggcacaacaacatcggcgacatcatcatccccagatcaatctccccttgagctcagctcagctgctggttgctgtttcctgtgtacgactaggccctgcctgtacaacgagcgacgacggtgacttcccgcccggaaattaaaccctcgtaatgtaaagcttatgttattaagtagcggctactcttgtagtcttgtctgtatcaaatataaactggtttgttagctaaaaaaaaaaaaaaaaaagcggcc

SEQ ID NO: 2202 - DNA, 1650 bp, Zea mays
  Clone ID: ZEAMA-23APR03-CLUSTER251922_1
aaccctctttcccgtgggccgtggccacgaccgcgcgaccgccgccgccctacgccaggtgccctggtcggtcccttcgagccaggtcgtcgtcgtcccttcgcagccgacgagcgcccgtcagcctggaggaccactcgatgtaatcgaagacaccgggggttcacagctgtttttttgtgtgtgaatttacgttcctgaaaggttcgctttcgttacacgcttgggaatggattactacaacatcctcaaggtgaatcgcaatgcgaccttggaggacctcaagaagtcgtaccggcggctcgcgaggacgtggcaccctgacaagaatctgactggaggggcggaggctgaggccaagttcaagcagataaccgaggcctacgaggtactaagtgatccagagaagcgtgcaatttatgatcagtatggtgaggagggcttaaaagggatgcctccacctggttcccagagccggtcctccacaactgctggcccaagtggtccgagtaatttccattacaatcctagtgacccagatgatttctttgctgagttcatggcaagcaacaagacttactcctttgaccatgaccggaggcgattccagccaaggtcacattggacttcagccaggaacagtagaagtgaagctccttctggttcacagaaagagaatggtgccagtacaagcaatatagaaaagccaccacctgtggagaaaacattactttgtactcttgaagagttgtataatggaacaaaaaggaaaatgaagatcactaggaatgttgcaaagccagatggaagaatagaagttgaaacagaggtcttggcagttgaagtgttacctggctggaaaaagggaaccaagattacattccccaacaaaggcgataagctacatggccagttagcacaagacctgacctttgtcctcgattcgaagccccatgatgtgtacaatcttgaagggaacaaccttcttgtaaagcaggtgatccctctggtagatgccctcgctggggcagagataaacctcacaacccttgatggtcggaatctgcctgtgagggtggaggaagtggtgcgccctggatacgaagttgtgctggagaacgaagggtggccgatcaggaaggaacctgggaagaagggaaagctggtaatcaagtttgatgtgaccttcccgatgaggttatcgccgtcacagcgggcagccatcaggcgaatcatgggcagctaactgggggaagagaaagagaaggggcactgcattcttttacatggagaaggaacagtctctacattggcactagaattcagatggatagttggaacttggaagtaacttgagtcaatcagataggcatttccatggttaaatagcccgttactaatcctacctatttgctttggttaattgaatgtgacctagttttttttcgttttctttgttatatcgtgtgaatccgtagaaaaggtgggtgatttcgaggataatgtaagctgatttttccatccgaattttttctggggcatgtgatggttttttcattggaaaactgtagcatacccgggaaatggaaggaaaggacaaaaagatagaaaagacaagaaaggagcctttaaccaaaaaaaaaaaaaaaa

SEQ ID NO: 2203 - DNA, 1270 bp, Zea mays
  Clone ID: ZEAMA-23APR03-CLUSTER2520_71
ttttttttttttttttcgactccacaaaacaaacacaccattaataatttataatttcaatcgccctggtacattacatgcatggacaatgggcgggaaagcatctgcaaattaacttggccttcctccatttcgttcccagtctccaactccgccgtgaaggccgcgcgcacgccaccaccatctaccagtaataatcgactgaggcacctcgcacagtgctcatcagtcccatgctgcatatgcagcaatacaatagcactaccaaactaatcaagcacaaggacgcagagctatcgtggtgcgcggcggccgccgagagctagtactggatgatggaacggtagtaggtgttgggaacccagttggccgggatgacctggttggccaccagcgtcttgccggactcgttggtgatgcgcagggagaagggcgcggcgaggcggtggccggagtccagccgccagatggacccccacgactcgcgcatcggcgtccacgacccggagttggcctccatgaggtccacctgcaccacgtcgccgtcgccgtcctcgaactcgacgagcaccgccaggtacaccgggttggacccctcctcgatgtggaacgtcaccttctgcccggggtagttgcagggcaccctcttgaactggatgtcgatgatgccggcgtggcggagctcgtcggtgcggccgggcttggccatggcgccaaacgccgtgccgctgaggtcgaagtggtacttggccacggggtagtagttcatgtcggtgatgatcaccgtctccggattgccggagcaggctgggtggttttggcatcgtatctggtagcaggagccgcagcccttgccgtccttgaagaggggctcgttgctgcacgatgtcatcgccgagaacggcggcaggttcacgttcttgaatccacaggcaccaccgtcgtcatcagggccggcgccggtgggcgcaccgtaccaggtggcccgggcagcctcccagttggggtcggcggtaaagtcggaggcgttaaagctcgccggtctcgcgcacgagccgcacgttacaaggagcaagaagagaagcgccgcaagtgcaactaccgtggaggaggaggaggaggaggtggcggccatcgtagtgcagtacgccagtaccttgcgagcgagggctgctatatattagagctaggtactggtaggcagacgacaggagaagttcgatctgtgtgtcgattttcgattaggatgttctaggtaatggtctcgtgc

SEQ ID NO: 2204 - DNA, 1206 bp, Zea mays
  unsure (1)..(1206): unsure at all n locations
  Clone ID: ZEAMA-23APR03-CLUSTER2520_83
ttttttttttttccggctcgagagtaccaataatgatgtcttataaacagtagtaattatattttataaatatttaatgtttttcttgatgaaagttgaataccaaggataattaagaagggtcggggagagnattattatatatattatatatatatatatatatatatatatatatatatatattattataattattacagcacgcaccgctgcctgcatatcgatctacccgatcgagctgagcctgagactgcgagggcgacgacaaaaaggctgcagctgtagctgcaggagatgaattgtgggattcacgaggagtactggacgatggatctgtagaatgtgtttggcctccagttgagtgggatgacgtcgcgtgcgacgagcgtcttgccggagtcggtgcgggtgcggatggagaagggtggctgcaggcggtggttggagtcgaggcgccagatggatccccatgactggctcatgggcgtccagcggcgggcgcgcttctccatgaggtcgacctggacgacgtcgccgtcgccgttctcgtactcgaccagcacggcgaagtagacctgggtggagccttcctcgacgtggaagccgaccttgaggcctgggaactcgcagggtaccctggcgaactggatgtcgatgatgccggcgcggcgcaggtcgtcgttgcggccgggcttggccagcctgccgaaggcggtgccgctgaggtcgaagtggtagggcgcgacgcccggggtgtagttcatgtcggtgatgacgacggtctcggtgcggccggagcaggcggcgtgcttggagcacctgatcttgtagcaggagccgcatcccttgccgtcgcggtagagcggctggttgccgcaggaggtcatggccatgaacgggtactggttgacgttcttgaacccgcaagcgccgccgtaccgttgtcgtagggcccggcaccgttgggctggccgtaccatgtggccctggcgttgccccactgcagctgcctggcggcggcatcgctggtgttgtagttgttcacgccgccgctggcgaaggagcaacaggcggccagcaggaggaagacggcccgaggaagcaggtagagcgagaggagggaccccatccccattgatgatggccaccgccgccgccgctgctctgctccaacaatgtactagctacccggccggcttttat

SEQ ID NO: 2205 - DNA, 1957 bp, Zea mays
  Clone ID: ZEAMA-23APR03-CLUSTER2523_5
gttttgctgttcttttcttcctcgtaatccgctcggcttccattgttgccgccgctaccgacggcgacggcagacatcaagtgtcagtcctccttccgccgaagtcttcttttggttggactccgagtctccgactgtccgacaggagttgcgctcctcctccccctctagtctactggatttcactagcgtggagatccatctctatttgtttttggtctcttctttgcttcaactataactagtaaattggcgcgcgccagcgcgcgtactcagagagaactaaacaatccggcaagctctacaaaaatcagggggcaaggtcaatctcagttgataagataccacttgtactctaatctgtcagtctccacgtgcggctgcatatatactgtttcaaaatttcggagtaaggtctgaagtctgaatcctcatgctgcttcagagggattgaagctggttgttggtcgctcttgcacatggcgcagccacagcagcgggtgtaccaagcttggaagggggataacaggttcttctttggtgggcggttgatatttggaccaaatgttaattctctaggtgtttctgttgccctcattgttatcccagttgctgtcttttgtgtgtttgtcgcacaccatctccgtcatcagtttcatgcatatgatgcaggatatgcaattcttgtcatagcaatagtgctcacaatctatgtgcttctgttactcttaaccactgccgctcgggatccaggaattgtacctcgtgcttcacatccacctgaggatattcactatgataatttgtctcttactgacacacctggaatactacagttcccccgtgtaaaagaagttatagtaaatgggatgcctgtgaaagtaaaatattgtgaaacttgtatggtttttcgtcctcctcggtgttcacactgttccatttgcaacaattgtgtggaacgctttgatcaccactgtccatgggtaggacagtgcattggaaagcgcaattaccgttattttttcctatttgttgtcgcttcaagtctcctctccatttatgtgtttattataacggccttgtacatcaagtttctcatggatggagactatcctacagtttggaaggcattgaaacattcccctgcttctctagcactaatgatatactgttttatctctctctggtttgttggtgggctcacaggatttcatacatatctcatcagcactaatcagaccacatacgaaaattttcagtacaggtcggatggcaggcttaatgtctatgatcaagggtgtctgagtaactttcaagaagtagtgtgtgccaagatagagccttctaaacataagttccgggcgcacatacaagaggaagtgcgagctccaccagctaaccgtgctggagagagtgaagaagaacaagttggtggtcctcgagcaaaagtgggggatggcctcgatattgatggtgatctgatgaagatttcacataggcataaccatgaggacgtcgatattgaaataggatgtggggatgctaatgaggtggaatgctcagtttcagattccaaagttaaagacaatacggatgcacatatgtgatatgtagagttagaaataaggtaaatggagaacagtcgagttgggttccagcggtttaatgaatgtgtttgtttagttcataagtaggcaaaatgccgtctcctccggtggtttcagcattattctttttgtaaatggctagtgcaggatacttaggatgctaccctgcaggttctcttgtgcattccgaccagcgtgtgtgttgaattcttaccctcggatccttcagaagacgtttgtgtatagtgtcttggttgagaaatcccaagatggtgtatgaattcagattggtagttctaaacttgttgtctttcagttccacacaggcagaagtcattgcttttcagctc

SEQ ID NO: 2206 - DNA, 2836 bp, Zea mays
  Clone ID: ZEAMA-23APR03-CLUSTER25244_1
ccgctagctcttgctttgttgtgtgtcctgatggtcgagttcctcaccgtgcttttgcttttctgctttcacttgcctgcagctgcagctcgtcaatcaggtccatgccgtatccgcatccgtatccgtggcaaagcagcaggaggaggaggaggaggcgcgggcgcgacggggccccgcggcagcctcaggctcgccgggtggtggagcgcgcagcagcaggccccggccacgcgacgacaacgcagcagcccgacaacgtctccagtgctaaagtgttccagaccagccgtgtggaaaccgagtcgaaattgcgaaatggcaggaaaccacaagaccttgaggatgagcaccaggctgaggaggcagagctgcagccacttatcgaccaggtgagggcgatgctacggtcgatgaacgacggggataccagcgcctcggcgtacgacacggcgtgggtggcgatggtgccgaaggtgggcggcgacggcggcgcccagccccagttcccggccaccgtgcgctggatcgtggaccaccagctgcccgacggctcctggggcgactcggccctgttctccgcctacgaccgcatgatcaacaccctcgcctgcgtcgtcgcgctgaccaagtggtcgctggagcccgcgaggtgcgaggcggggctctcgttcctgcacgagaacatgtggaggctagcggaggaggaggcggagtcgatgcccatcggcttcgagatcgccttcccttctctcatccagacggctagggacctgggcgtcgtcgacttcccgtacggacacccggcgctgcagagcatatacgccaacagggaagtcaagctgaagcggatcccaaacgcgttgatgcacgcgttcccgacgtccatcctgcacagccttgaagggatgcctgacctggactggccgaggcttctgaacctccagtcctgcgacggctccttcttgttctctccttcggctaccgcttacgcgctgatgcaaaccggtgacaagaagtgcttcgaatacatcgacaggattgtcaaaaaattcaacgggggagtccccaatgtttatccggtcgatcttttcgagcacatctgggttgtggatcggttggagcgactcgggatctcccgctacttccaacgagagattgagcagtgcatggactatgtgaacaggcactggactgaagatgggatttgctgggctaggaaatccaatgtgaaggatgtggatgacacagctatggctttccgactactaaggctacatggatacaatgtctctccaagtgtgtttaagaactttgagaaagatggagagttcttttgttttgtgggccaatcgactcaagccgtcactgggatgtataacctcaacagagcctctcagataagttttcaaggagaggatgtattgcatcgtgctagggttttctcgtatgagtttctgagacagagagaagaacaaggcatgatccgtgataaatggatcgttgccaaggatctacctggcgaggtgcaatatacactagacttcccttggtatgcaagcttgcctcgtgtagaggcaagaacctatctagatcaatatggtggtaaagatgacgtttggattggaaagacactctacaggatgcctcttgtgaataacgacacatatctagagttggcaataagggatttcaaccattgccaagctctgcatcagcttgagtgtaatgggctgcaaacgtggtacaaggataattgccttgacgcttttggagtagaaccacaagatgttttaagatcttactttttagctgctgcttgcatttttgaacctagccgtgctgctgagcggcttgcatgggctagaacgtcaatgattgccaatgccatttctacacatcttcgtgacatttcggaagacaagaagagattggaatgtttcgtgcactgtctctatgaagaaaacgatgtatcatggcttaaacgaaatcctaatgatgttattcttgagagggcacttcgaagattaattaacttattagcacaagaagcattgccaattcatgaaggacaaagattcatacacagtctattgagtcttgcatggaccgaatggatgttgcaaaaggcaaataaagaagaaaacaaatatcacaaatgcagtggtatagaaccacaatacatggttcatgataggcaaacatacttacttttagttcaggttattgagatttgtgctggacgaattggtgaggctgtgtcaatgataaacaacaaggataatgattggtttattcaactcacatgtgctacttgtgacagtcttaaccataggatgttactgtcccaggatactatgaagaatgaagcaagaataaattggattgagaaggaaatcgagttgaatatgcaagagcttgctcaatctctccttttgagatgtgatgagaaaactagcaataagaagaccaagaaaaccttatgggatgtcctaagaagtttatactatgctactcattccccacaacatatgatcgatagacatgtttccagagttatctttgagcctgtttaaaaatgtttaagtggtagaccattatgttaggtgtaaatgtgtacataaaagttatcataaggagtaatggtagcagaagcatgcagttgtaagtttatttgttgcttagaatagaaattagtgtagctataatatcaagaatgttcctatataagtaatcatattatggatagaggtgttcatatgaataataattttatatgttaagtgttatcttacctaattttagtagcaaaaaaaaaaaaaaagcaacaaagaat

SEQ ID NO: 2207 - DNA, 993 bp, Zea mays
  Clone ID: ZEAMA-23APR03-CLUSTER25319_1
ctccacccccacctacgatcgacccacctcgcgatatccgccccccgcctcctccgccccgacgatgatgcggggcgatgacgagtaccggtaccagcagcagcacggccccggcggcggcgcgccgcacggcctgatcatggcggtggtggtgatcttctccttccctcgtcgtcgtcgtcgtcgacacactcaattccttccaactccctcatcccaccacgccaccacgcacctagctactcagtacctcctcctgacttcactaccctcccactcccaacctccctccacacccgcctcgcgatctccgcatccgccccgacgatgatgcggggcgacgacgagtaccggtaccaccaccagcagcagcagcacggccccggcggcggcgcgccgcacggcctgatcatggcggtggtggtggggctggtggtggcgggcccgctgttcctgggcgagggcggcgaggcggtcacctccgccgtggcggacctgctcggccccacgggcctgctcctgctccccgtcggcctcgtcctcgtcatccgcgtcctctcctccgaccgcggcgccgccgcgctcgccggcgccctctccctcggcggctccccggactccgtgcaccgcgtcggcggctcgcccgtcggggtcgcgctcgcgctcgccctcatcgccgccctcctctactacaggtcggcgctattcggcggcggcggcggcggcgacgacgagtagacagcggctggttgtggcttctgcgctgtgcggtgcgttgcggtgcggctggtcggtccacacgacgccggctcgctaaactgtgcgcgcggcatcctgctgctgctgccgtcgtctcgtctggatttggaaacgccaacctcctgcgctacctaccttccttgcttgaatgtttcggtagtttagccaagattttctatttaattttgttaattaataccaacaacgctgaacaaaacaaaaaaaaaaaaaaaa

SEQ ID NO: 2208 - DNA, 1666 bp, Zea mays
  unsure (1)..(1666): unsure at all n locations
  Clone ID: ZEAMA-23APR03-CLUSTER25349_1
gcacgagaccattacctagaacatcctaatcgaaaaagagaggaagcgagaggcgaggagagagaaagttctcgagctagacgagcgccgtgcgaggagagaagcgagatgagcggtgaggcggcggccgtgggcggaggcgaaggagaggcgaatggcatcccgccgaacgtcaccatctatatcaacaacctcaacgagaagatcaagctcgaaggtctcctactcccccgctccgctccttcgctaaaccctagggatttatgtcgatttgtctttagtttttgcggctccgtcgggggatttgcatcttagaatgtcgatgtgggcgccgtgccctagtagttgggcaatggaaatctctggcgtttttccatgggtttggggtgggctggtgttagtccatggaatgtacgcgtgagtatattgtgcccgactagtctgtgcatgtgatggtcatagagtgcttcaggtagcggttgctgttgctgccttttaggccggcaacgatcagagaggaagcgagaggcgaggagagagaaagttctcgagctagacgagcgccgtgcgaggagagaagcgagatgagcggtgaggcggcggccgtgggcggaggcgaaggagaggcgaatggcatcccgccgaacgtcaccatctatatcaacaacctcaacgagaagatcaagctcgaagaacttaagaagtccctaacagccgttttttcccagtttgggaaaattcttgatgtgcttgctttcaagactttgaagcataaaggtcaagcttgggttgtcttcgaagatgtcgcatcagctactgaggctctgaagaggatgcagggctttcccttctatgacaaaactatgagaattcaatatgccaagaccaaatcagatattatagcaaaggctgatggcacctttgtacctcgagaaagaagaaagaggactgatgaaaaatctgaaaagaagcagaagcgcgagcatcaccatgatgctggtgctagtcaaattggcatgggtgtaactgcttaccctggtgtttatggggctccacagctcacccagatacctatagcaggaggacaaagggtcatgatgccagagattatcgtaccaaacaacatcttgtttgtccaaaacttgccacacgagacgacgcccatgatgctccagatgctcttctgccagtaccctggcttcaaggaggttcggatgatcgaggcgaagcctgggattgctttcgtggagtatggagacgagacccaggccactgctgccatgaacaaccttcaaagcttcaaaattacaaaagaaaaccagatggtcatcacatatgcgaagaagtaatgagctcccgagcaatgtttacctgatgtgtgagatgttgtattccgagttttacacaactggtaaatttccttcatgtgttaggtagacagcatcctgaacaacctgttaattgtacccactgggctgcagctatgtgcacttcaggaacggagatgaaatgcaaactgttattatttggtctgctcttgtattcaaaaaaaaaaaaaaaannnnnnnnnnnnnnnnnnnnnnnnnnnnnnnnnnnnnnnnnnnnnnnnnnnnnnnnnnnnnnnnnnnnnnnnnnnnnnnnnnnnnnnnnnnnnnnnnncnnnnnt

SEQ ID NO: 2209 - DNA, 1114 bp, Zea mays
  unsure (1)..(1114): unsure at all n locations
  Clone ID: ZEAMA-23APR03-CLUSTER25353_4
gcacacggttgcgagtttgcgaccgcattgcatcgtgcgcggctgcagcacgaagacgaagctttggtagatggcgagcagcgcggaggagcgcttcctgaggcagctgagcgcgagcaacggcggcgacgcaggggtctacggcggccagcagctgggccacaaggagtactgcgcggagaggaggggctcccggcggtggtccaggaagcgggccgccgccgcgaggggctactgcggcgccggcggcgggtacgactacgactacgacgtgaagcagcaggcagaggccgcctctcccgccgcgaggaagcgggtgatagtggtggtggacgagacctcgggctccaagcacgccatgatgtgggcgctcacccacgtcgccagcaagggggacttcctgacgctgctccacgtcctgctgccgcactccgcctccggcggcggctgtagcaggggcgaggaggcctcctccctcgccaactcgctcggcacgctctgcaaggcgtccaggccagaggtgcgcatctgcagacacacatgcacttgcgcatctgcagacacactcgctcggcacgctcggtaccttcttttggttagctgctcgttactagtgcacattcacaccaactttggctttttggggtataaantcntnnncnnccccctttttggaaattctaacccntnncgtcttatctggcaggactccgggcgcccggccagtccccctttaccgggcttgactaggccgtttatgcaagtcagcacccggtggcagaagaacttctggctcctggcctgacagccattttacttgctacacgatcgatcatattttattactcccacatatctctgctaccatttcgtgtaaccaagtgcgtcacaactgttctctatctctctgtgccatgccgtgtatgcgtccgccatggatcgtcctgccagcctcctcccgttgtaaagccaaaaagagccccagatctctgaccgccctcctataaacctgtattctttcttcattttcccctgcgacgagtcttgacttcttgagcgtgcgcgtgtctgtacgggtaaccatcatgtaatgctgcatctgcatatctgttgt

SEQ ID NO: 2210 - DNA, 836 bp, Zea mays
  Clone ID: ZEAMA-23APR03-CLUSTER2539_16
aacctggttctccatccggtcagaccaatcaacaaagtgacgcgagcacgagcatccatcgtttccccttcttccccatcgcgtggcctcgccgcagacctctgccatggcggaccagctcaccgacgagcagatcgcggagttcaaggaggccttcagcctcttcgataaggatggcgacggctgcatcactaccaaggagcttggaacggtgatgcgctcccttggccagaaccctaccgaggcagagctgcaggacatgatcaacgaggtcgatgcggatggcaatgggaccatcgacttcccggagctcctgaacctgatggcgaggaagatgaaggacacggactcagaggaggagctcaaggaggccttccgcgtcttcgacaaggaccagaacggtttcatctcggctgccgagctccgccatgtcatgaccaaccttggcgagaagctgaccgacgaggaggtcgacgagatgatccgtgaggccgacgtcgacggcgacggccagatcaactacgaggagttcgtcaaggttatgatggccaagtgaggagccggtccccgtgaaataagtatctatggattgaagcgaattatcaggcacacaagctgtactttgtcatgtccctttgagtacgcatcagtgtcatgcaggtggtaatgtcttgtagtggtccgtttaggcggtgtagtcatgggaacgcgacatcagatacctggtttctttttattgtgatgttatcttgcattattgcacctgtaggatttgttgaagctcatattttccagggttttggatcttttgtgctaaaaaaaaaaaaaaaaaaaaa

SEQ ID NO: 2211 - DNA, 1421 bp, Zea mays
  Clone ID: ZEAMA-23APR03-CLUSTER25453_2
tccgcatctccaccaccatcaccaaaccctaatcgcctcccttcgccaccgccgccgccgcagctgaccggccatgtcttcctcgtgttccgacgcgtccagggacgatgccgtctcatctcccgacctcccccctctggctgcacccgtcgccgcggcggctgctgcggccgcggcagcggcctcctcggggggcggcataggactcgggggcgtgggctccggccggaggctgccgccgccgtgctggacacacgaggagactctccgcgctcatcgaggcgtaccgcgacaggtgggaggcgctgcagaagggcaacctgagggccgcggactgggacgacgtggccaacgccgtcaccgcgcgctgcgggcggttccccaccgccacgcccaagtccggcgtgcagtgccgccacaaggtcgagaagcttcggaagcgataccgcgctgagcggtcacgctctgcggggcggtctaaggggcccaaatggccgttcttcccgctgctccacgacctcgctggtggcggcgtgccggacccgagtccgaacgccatcgtcaagatcaagaccaagggccccgccccgccggcgtcctcgccttccccggtgtcctcgccttcctccgaggtggaggctgtgcggagcaggagcctgcacgggctcatctccaacggcggtgccgggagcgggctgcgcttcaccatccccaaggcctcgcgcacgaagcccgtcgcggcggcagctgtgaagtcagagaggagcggcagcgaggacgacgccgagtcagaggcaatggcggaggtggctgccgcactccgggctgtcggggaggggttcctgcgtatggaggagcgcaggctggagctatcgctgcagatggagaaggaacgtatggaatcggagatgaaacgcacccagacgatgctggacgcccagcagctcttcctcgaggccttcctcggtaagcaactgcagcacaagaaggcccatgtctccccttcctctgccgcaatggaagaggactgatcgatcgatgtatcccggctgctctctgtcaaacttgtgttcatatgcttgcttgatctttgttaactgttgttcatgctggtagttgtggacttcgatgctagtagaattaatcttattgtgtatggatggtgaatttaaccgaacaaaggggtttgggggcaaaggatgttgctgtagggatatagataaggttggaaggatgatgtttgaagtagaaattaggaagtctcggttgtaattagtgaactacatgtgtttggtttcgaggaggagagcaggagtttctggcagctgtggcgtgagggatgtgccggaatttggttggtgggttttttaaagtttaaactggtggattatatagtggtatagatgaacttgtgatggtgc

SEQ ID NO: 2212 - DNA, 1490 bp, Zea mays
  Clone ID: ZEAMA-23APR03-CLUSTER25488_1
gcctttgctattcttagagtccgatggtggtaaattattcttaaccgcctgattaatctatctcttcgttagtctccgactccgagccaggctttcacctcgcggcttaatcccaattgggttggctggagcgcaacccaattgggggttaattgggattgctacttcgcgggtgctcgtccgtcgtggtcttggattggcgaggcgaatcgactggtttcctgcagcctccttggtaggatcatgaagctgaaaaatagtgcactggagacttttaaggaaaacaatacgattttcactcctgaaggaaatttccactctacaaagatgcgagaagagtatgttgctggtccgaaccaaccagccgttgttgagacaagatgcaaatggatgattggagatgtaactgaggtcctggatcgcaacacgtggaagcttggaaagatcttaaagatgctgaagaacgattacttcgttatcaggcttgctgattgcatccgactgaaggagttccacatatctagcttgaggattccacgcggtctggaagctcctgaaagcaagccctttcatgcagcagcggacaaggccaccggacgcgataaacgccgaccagctgatggcgcctcgcccggcacaagagctgtgcagcagacgtgtcaccgaacaacctacgatctagggagcagtggcaagaagcggaaaccagacgcagatgcctctcgccatccgggcatagcatcagcacacacccggaaggtcgccgcagcctccaacctgaacggcggcatcgccgacagctacctgcacaactatccgcaggccataggagacgcccaatgctcggtggccagctgcagcgtcaacgacctgtaccgcctcggcaatggcggcaacgcagagcggcgccccgccgccgcagtgtgcctccctgacgacgccatgtccgcgtgcccgtgcacgcccggtgccagggacggggagggggaggaggaggccgcggcggccttgcacgggctgcagctggaggcttaccggtcgacgatgcgagcgctgtacgcgtcggggccgctgacgtgggcgcaggaggcgctgctgacgaacctgcgcctgtcactcaacatctccaacgaggagcatctgctccagctcaagcgcctactgtcctcctgatcggccatccttctggccggccgagcgccgtcctgttccggcgagcctcttcctttttactgttcttgttattacatggtttattactttgtctagttcaggtagaaagaatcatatgttattacatggtttataccagtgtcgagacatggatgcatacagagagacgcctgcatctttttgatgccttgggtatcctggatatatctcttgcttgtaaatgcaaacatatttacaagttaaaaaaaaaaaaaaaaaaaaaaaaagaaaaaaaaaaaaaaaatttttttttttgaggggccgtatttctccttagt

SEQ ID NO: 2213 - DNA, 1495 bp, Zea mays
  Clone ID: ZEAMA-23APR03-CLUSTER255099_1
gtagtcggtggcagtcgcagcagctcctccccttcacgagacaccggcatgtgggagtctcctcggcagacgcaagcgcacacgcccttcccctcctggatcccctacgccggcacgttcgccgccggggtcggcatggtggcagcggcagactcgagcctgccgagcgagcgcggccccggccccgactgtgcctggaaccagagcgcccccagcgtgggagcgcgtgacgggggcagcggctaccgagggaactacttcctgtctctgctcgattcgaagaacgtgacgccagagatgttcgaggacgacgtcgtcgttcttcccgcggcgtcaccgtcacgcgactacctcggagtcggaggaggggcgggcgccgccgccagcaacatggccggcccagccgccgcctatggcctcctcgacccgtactactctcctgttgttgcgagccgtgctcctccagtcgatcatgagacggcgagctcgccactcgtgtactcgggggacggtgtggtgcgcgggaccagcatgccatgctacgacgaccacgaggagaaacggccaactggtggcaggcagccgcagggttttggagctcccgcggccgcgtttctgcaggaaatgatgatcccgagccgagtggagacgaagctccatagtggcctgggttatttaggcatggtgtctcaaagactcgagacctcctttggcgtcgtggggagcttgccggatgctgctggttctttcagtgacgagtacaacagcaacaggtcaagtgcagacttcatgtccagcaacagcaacagatcactggagaagcgggtgggcggtagcagcagtggaagaggagctgccacgaggaggaaatcagatggagggcttggaggaaacacgaagaaatctaagcaggaggcttcccccaaggcgtcgtcggctcccaagcagcctcaagtgcccagagtgaagataggagagaagatcacagctttgcagcaaatcgtgtcacctttcgggaagactgatacatcatcggtgctgtttgaaacgatcgagtacataaaatttcttcatgagcagatccggatgtttagtgaaccgtacatgacgaaaagctcgtacaagggtcacattggactcagaggcgaagaggaggaaagcgggacggggcatgatttgaggggcagggggctctgcctggtccctgtttcgctgacctcgcaagcataccaggaagatgacaccctgccggactgctgggcgcccgcgtacaggggctgcctgtaccgatgagctcggcatggcgacgactgcatggttaagattcagctaggatctgcaacggctattcgttggaaactcagaatgatgtgcttgtttctccttgttttattgtcctctactgtagtacttctttagtagatttccagtgtagcccggaacaacaagaatgtataggcacaccaggccttggctctcaaaaaaaaaaaaaaaa

SEQ ID NO: 2214 - DNA, 1824 bp, Zea mays
  Clone ID: ZEAMA-23APR03-CLUSTER25576_1
acaaagggattaggcgcactccacccatcatctagctgtcttgagagagctgagccaggagcggagggaagaataccacgcgctgggtccgaaccggagctggactggattcttcaaggcttccattccattccatggggtaaagcgatcccattcccactcctatcgtctgcctccaagacaacagttttaatctgcttgcttgcgctctgctgcctctggttcacgttcaccgcctctattccatggggtaaagcgagcagttttaaatacgagaggcccctcgcttgtcactgaagccgcggcttcttgtgccttgcaacctgccgttggggcttcttctctacaaatacgttgcgcgccatggatggcgactcgaagaagctgaggcttcgggttgtcttctttttttctccgtaaaagctgaggtgaaaaaagggttcggttttctggagtaggaaagggaggtagaggtggacgccagggttcagcgataccacctcaagaaagcaggcctattggaatagcggaaatgaacagcagcggggagtacgatgctgcgttcgcagccacaattgcagcagcagcatttgcaatcgctgcccgtgaggataagctcgcggctcaaaagaactccgtccccatcgaggaggtgaccccttccctatcgccagtcaatagagctgaaggcaccaaaaagcctgcaggaggcaacaaaatcgcgagatggtttagcggcaaggagcctatagaacacgaggacgacgacgaggggccagttaatgtatcggtaaggaggccactgaaaccagcacctggaaagcctgaggacgtgcctgcagatcatcacaaggtggcacccaggatgcttgagacttctctgggtgtgaggaagggttcgggatcttccagcaggtcggcagagaggaaatggagcaaggagtttgagcaagaacaggctgttcagaaagcgccctcggccgtgaggccagccacgtcataccgctctggacggaatggagaaggcgcggcaggagtagctgctactggcggcacgggatctaaggctgatgaatgggagaaggcaaagcttggaagagttggagaggagtgtgagaagatgatggagaccatggccgaatgggaaactgagaagaagagcgcactggacagaaagagagaaaaggcactagaagaatacaacctggagaagacaaggatcagcaaaatctctggaggagcaagggcgatggcggaggagcgaaaatacaacgataggaaaaagatcagagagaaggcgcgcaagatgcgatccacaggaaagcctccccgcacgtgtgcttgcttttgagaacagctgcatacgctgaaatttggaaccaaaaccaaatgaaggacgtcattttggacggttgtaaaaggcacgcaatagtgacgttctgtattgtaatatgtatttggctttgacaagttatgagtgcacattccactgaaggcaacatcaacatatttttcaagggtgtggagttaaggaataaaaaaaaagatccaccatgcatcaacattcaagatgaagcatggagtaggaactgccccaagaacaacgagaacgaaaacatatattcatcataaaggtcaagatttaggattcccattcaaggtataaggtgtgagactagtatcatccaattcaagtgctgaggttcttcttgagctttggccaccagacttctcagattcattcctatttttgttgattgttgtctcctcatcctgtgtaccagattcatctgattccacttaattcaaaatcatactcttcat

SEQ ID NO: 2215 - DNA, 1240 bp, Zea mays
  Clone ID: ZEAMA-23APR03-CLUSTER25576_3
ctagctgtcttgagagagctgagccaggagcggagggaagaataccacgcgctgggtccgaaccggagctggactggattcttcaaggcttccattccattccatgggggttcggttttctggagtaggaaagggaggtagaggtggacgccagggttcagcgataccacctcaagaaagcaggcctattggaatagcggaaatgaacagcagcggggagtacgatgctgcgttcgcagccacaattgcagcagcagcatttgcaatcgctgcccgtgaggataagctcgcggctcaaaagaactccgtccccatcgaggaggtgaccccttccctatcgccagtcaatagagctgaaggcaccaaaaagcctgcaggaggcaacaaaatcgcgagatggtttagcggcaaggagcctatagaacacgacgacgacgacgaggggccagttaatgtatcggtaaggaggccactgaaaccagcacctggaaagcctgaggacgtgcctgcagatcatcacaaggtggcacccaggatgcttgagacttctctgggtgtgaggaagggttcgggatcttccagcaggtcggcagagaggaaatggagcaaggagtttgagcaagaacaggctgttcagaaagcgccgcggctcggccgtgaggccagccacgtcataccgctctggacggaatggagaaggcgcggcaggagtagctgctcctggcggcacgggatctaaggctgatgaatgggagaaggcaaagcttggaagagttagagaggagtatgagaagatgatggagaccatagccgaatgggaaactgagaagaaggtgaaggcgagatgccaaaaagagcagaaagagaccgagctggacagaaagagagaaaaggcactagaagaatacaacctggagatgacaaggatcagcaaaatctctggaggagcaagggcaatggcggaggagcgaaaatacaacgatgggaaaaagatcagagagaaggcgcgcaagatgcgatccacaggaaagcctcaccgcacgtgtgcttgcttttgagaacagctgcatacgctgaaatttggaaccaaaaccaaatgaaggacgtcattttggacggttgtaaaaggcacgcaatagtgacgttctgtatggtaatatgtatttggctttgacaagttataagtgcacattccactgaaggcaacatcaacatatttttgaagggtgtggagttaagg

SEQ ID NO: 2216 - DNA, 1419 bp, Zea mays
  Clone ID: ZEAMA-23APR03-CLUSTER2557_1
aacttcttgccttctcgcgctcgcctccgtttcgtgtcggctcgctctaaacgtgagatcggggaggtggtggacttggggtcgttgtggtatcggcggcgagccgcgggggcctagggtttcctgccttcctggtttggatccgcgccctggcccatgggatccggaggcttcgcggccgcggtggccgcgtgcccctccgccgccgaggccttccttaagtactatggtattgtatcaggaggtacaagtgcggagtcaagacaagcattggttgagctttcactagctatagacggaattgaaggaatgagggatgtgatatttgctgatattccaaagctcattccatttattgatctggaggatatgagcctattcagttgcttctacgattttgttttcttcatctgccgtgaaaagggtcaaaagagtgtcactattcagagagctgtagcagcatggaggattgttctaagtggaaggttccgtttgcttgatcgatggtgtaacttcgttgagaagtaccaacgccataacatatccgaggatacttggcagcagctgctagctttcagcaggtgtgtaaatgaagatctggaaggttatgacccacgaggtgcttggcctgttctgattgatgattttgttgagcaaatgcacagaatttatcactccactgactgcagcagtgcgatggaatcacagtgtaacatttccagtacccttaaaggactggaccctcaacctggatcaaagaggaaatgcccacacctcaaatccaatgaagaggatgtagagctttcggatagctttacgcgctctgtccatcttacaccaataaagcgactcaaggaaagccatgacgccagatatggagcgggggaatccgccaaaactacccatttctctaatagttcctctggtggttaccacgaggatatgaatttacacaactcaagaggttgccttcagaactccccctgtaatgttgaggatgccctgtccaaagggtttgagggttgtatttcgatgaaatgcccattttgatgtaacaaatttcgtgtcagcccagaaactatacattcccttttagcggcaaaatcatcctgtgtgtgtatctagtcattttgtgcaaaaaaaatgcagtaattgaatgcattttttttaaaatgctttaaagtgtattgatcagcatcggacctgtttttagaggcatcggtatgaagggagggctgttggttgtgtttgcttgacagcaaatccctcccattcaataccccgcactttctgaaaattgcgacttccatattcccttcccttgagctttgttaagacagtattgtattacaagatctgaatcgctgcaagcgtgcagaataatgaatgccatctttctatgcaaaaaaaaaaaaaaaa

SEQ ID NO: 2217 - DNA, 1559 bp, Zea mays
  Clone ID: ZEAMA-23APR03-CLUSTER25709_2
caatactgtagttaccaaaattatttgctgtgctcactggtcagttatggagggttcatgccattttagattgcgctgattctcttagctaaatatgtagatgaaagagatttggggattttaagtattctgattcatttgcattgtctgcttgagactacaatctttcttttagatgtaccttttattctgttcttaagaaagatgtgacctttccaagtttcctgctaaactccataaaaaggttgtgtgatgaatgcatttacaggtgagagacatgcttggtgatggtcgtctaataaaacgacgtgtagttgatggaaaaggtgaatttccaatggactgtcctcttcatgacagcttattaagagtgcattataagggtattctccttgatgaaccaaagtcagtgttttatgatacacgtgccgataatgatggtgaaccattggaattctgttccggagaaagcttggttccagagggatttgaaatgtgtgttcggctaatggttcctggtgaaaaatctgttgtcacctgcccaccagattttgcatatgataagttcccaaggccagcaaatgttcctgaaggagctcatgttcagtgggaaattgaactacttgggtttgaaatgcccaaggattggactggcttaactttcgaagaaatcatggatgaggcagacaaaataaagaacacgggtaacagactgtttaaagaaggaaagttcgaacttgcaaaggcgaaatatgataaggtgcttagggaatataaccacgtgcatcctcatgatgatgaagagggaaaaatctttgctaattcaagaaattccctacatctaaatgtagctttttgctaccagaagatgggtgaatacagaaaatccattgaaacatgcaataaggtgctggacacaaatcctgtgcacgcgaaagctctttaccgccgaggaatgtcctacatgttactcggggaatttgatgatgcgaggaatgattttgagaagatgattaccgttgacaagtcatcagaaccggacgctacagctgccctccttaaacttaagcagaaggaacaggaagctgaaaagaaggcgaggaagcagttcaaagggctctttgacaagaagccgggagagatatctgaagttggtgtagaatcagagggtggaaaggatgcgggtgatgcaaggggctctggtgaggcaacaagtgctgatagaggtgcaaatgcagtggatagtccgaccagagaatcagagtacgcattcgaggaagagaggcctgggcttcttggccgcttgtggccttctgcgaggaggatcttctcgtctgttggcataaacaggtgcacaatactctaaggtgtttaattcctaaatcatggtggtgaagatgaactgtcccgaggttttgtggtgtttattagagtttcctgacgacgaaaaaatggcgaggaatgtttggatgtatggaaaatgaaccgtgtgcatgatgatgtaaaaaatgagaaataaattgcagggaattatattcgcagtttggatggttcgtttt

SEQ ID NO: 2218 - DNA, 1324 bp, Zea mays
  Clone ID: ZEAMA-23APR03-CLUSTER2572_6
gcacgagaccattacctagaacatcctaatcaaaaagtcccacccctcctgcatttcaataatatctccctgcgcttttcctagccctttgtcatccaaggaaacaataaacaaccggcgcttttacacccccgccaagaacaggagcaacaacaacaaggctcctcgcaacaatccattctcatccatggcgaagctcatgaacaagctggtcgattcgttcgagcacgacgagataccggacgtcggctgcgtgcgcgccgtgctggccgagctcgtcctcaccttcctcttcgtcttcaccggcgtctccgccgccatggccgccggatccgacgggaagcccggcgacgctatgccgatggcgacgctggcggcggtggctatcgcgcacgcgctggccgctggcgtcctggtgacggccgggttccacgtctccggcggccacctgaaccccgcggtgacggtggggctcatggtgcgcggccacatcaccaagctccgggcggtgctgtacgtcgccgcccagctgctggcctcctccgccgcctgcgtcctcctccgcttcctcagcggcggcatggtgaccccggtgcacgccctgggcaggggcatcagccccgatgcagggcctggtgatggaggtgatcctcaccttctccctgctcttcgtcacctacgccatgatcctggacccgcagccaggtccgcgccatcggcccgctgctgacgggcctcatcgtcggcgccaacagcctcgccggcggcaacttcaccggcgcgtccatgaacccggcacgctccttcggcccggccctggccaccggggactggacaaaccactgggtctactggatcggcccgctgctcggtgggcccctggcaggcttcgtgtacgagtcgctgttcctggtgcagaagatgcacgagccgctgctcaatggggaagtctgacgaccatcagcaccttcatgcttgtttctgtaaaacaggtcattatctgcaagcatggtacatacattggccaaggtaattagagaggcttgctgtaaagcagtaggattgctggctgtagaaattgttgatgggctttttttgggggtttcctgccaaggaattctttcttttatataatctcaaaaaagtttttttttttggtatgggctgggttctatcaagggtttgttaaggctattagtttaccatgtagcagaaaaactagtgggacgtgaagttttttcacgtacattgtaatactttggtatttttgtctaccagatgaaactggaagtacagagcaaaaacttctctaaaaaagcggccc

SEQ ID NO: 2219 - DNA, 1292 bp, Zea mays
  Clone ID: ZEAMA-23APR03-CLUSTER2572_8
gaccatgtcccactcccctctccctcctccagtcttccaaaatatctccctgcgcttttccgagtccttttccctccaaggaacagaaacaaccggagcttttaccccacccgctttcccctccccgccaggaacaacagggctcctcgcaataattcatccatccatggcgaagctcgtgaacaagctggtcgattcgttcgaccacgatgaggcgccagcgccggacgtcggctgcgtgcgcgccgtgctggctgagctcgtcctcaccttcctcttcgtcttcaccggcgtctccgcctccatggccgccggggccggcgggaagcccggggaggctatgccgatggcgacgctggcggcggtggctatcgcgcacgcgctggccgctggcgtcctggtgacggccggcttccacgtctccggcggccacctcaaccccgcggtgacggtggggatcttggttcgcggccacatcaccaagctccgggcgctgctgtacgtcgccgcccagctgctggcgtcctccctcgcctgcatcctcctccgctacctcagcggcggcatggtgaccccggtgcacgccctgggcgctggcatcaggccgatgcagggcctggtgatggaggtgatcctcaccttctcgctgctcttcgtcacctacgccatgatcctggacccgcggagccaggtccgcaccatcggcccgctgctgacggggctcatagtcggcgccaacagcctcgccggcggcaacttcaccggcgcgtccatgaacccggcgcggtccttcggtcccgccatggccaccggggtctggaccaaccactgggtctactggatcggcccgctgctcggcgggtccctggccggcttcgtgtacgagtcgctgttcatggtgaacaagacgcacgagccgctgctcaatggagacatctgacgaccgtcgggcccccagggcagtgagcacggttcatgcttgttttctgtaaaatagttcgttacctacaagcatgatgcatatattgaccaaggtaattaattagagagggttgctgttaaatagttaccctggtgggattgtgggatgtagaaattgttgctgggctttgcttttcttttttctttttacttttcctcccaaggaattttttaagagggttgggttctgtaaaggatttgtttaggctattagttagctatgtagtagaaaactagagaatgctatacgttggacgtgatttttttcacgtatattgttgtacgatatggtattttttatcttccggatg

SEQ ID NO: 2220 - DNA, 1301 bp, Zea mays
  Clone ID: ZEAMA-23APR03-CLUSTER25748_1
tgaaatctggacagaaaagtccagtctgtcgtggtccccgttcctctgctgcagaggtgcaggcaaccaacaaaagcttcccttcccctccagcctccactctcctctccttttcttccgctgttccgcatcgcatcgcatcgcctcgccgccagcgcaactccagccctggccgggatctctttcaccccccctctctctccgccgcttcgctcccccgcctcggggcctgcctcggatgctcccggcctcgcatccgctgctctacgcctgcgtcttccgcgacacccacctcgtcgccgagctcgaccacgcccactcccactcccggagcaccgccacctccgccgaccccgtcgcttccgacgccccctcccccgcccctgccgacgacctcccggcgctcgccgccgcgctcgtcgccgccgctccgccgcaccaccgccacctcacacacacagccgccgggcgtgcgcacgcgctgctcctgtccccgccgctcgcactcgccgccgtctcgcgggcgccccacctcccggcatcgcagctcctgctcttcctccgccgcctgcgatgcctccccgaggcccggatgcgggacgagatgccgcgcctagcgctgcgcttgccactcccgccgggcgacgacgcgcgcgaggcgaacgaggtcgccgccgcggaggcccacgcggaggaggaggccgcgcggagggacgctgacctagccgcgcggaccacgcccaagagggaccgagcctcgcaccgggggcgggccggacccagctggacgtggaggcggcagctctggatggtcatccttgcggatctcctcctcctcacaatcctcttcgccgcctggctcgcagtctgccggggattcagctgcattggtcggtaaatagctacacaacctccaaggctgctgctcaatttttaagcaagaaatctggagtgcagtttgtttctcagacgaaaaagtgggtcataccaaccataactcggttgtaaggtgccaatattcgcaaggaaaggtgctttgccccccgcgcgcgcatactgttacgtctttattgtatgaatcgtatttaaaagtgaatgccaacagtcctggtagactacataagtttgaatttgatgttttttgtatggtgatctgtaaacccggtagtgcaatttttttgttcattttcctatagaaagcaaatgtcaaaattttgaccatggcagactcgggtatatgtgaatcttattgtcatgtaatattttgccaggcatcttgttcttgaaaaaaaaaaaaaaaa

SEQ ID NO: 2221 - DNA, 1506 bp, Zea mays
  Clone ID: ZEAMA-23APR03-CLUSTER25754_1
atgtcgcatagtctcctgcgtggatcacgttgtctcccctttctcttgcgctgtcccactatcgatgagcttggctgcttctccaaggttggctgcgcgctcaaaccgtcttcaacagttgcctcttggaccacctcctctaatattgtacagcttgttcgctgcggcttgctgcggctgcaatccggctgcggctgcggcttctacagtatttttctctctttcgattgtcgctgcagccgtccgaacagctgcaacagtgtcggcttgtagccagccgaacacgcccggtagttcggtttaggggatacagtcctcttcgctcgcgctcgttgcctgccatcccactccctctctccacctcgtctttggaagtctccaaagcgattgtgcagtctggcaggacaacctggaggattcttcgccgaacgagttttccgagcgcggaggtcagatccacgctcgcaggtaccacgttcatcatcgtcaccgccattcttcactttcctccggtgattcgtctctcactcgtcgacggaagggtgcacatcgatccacagcgtgacctctcctacccgatctggttgtttggatctcaaaatactcagtcttcgccactgctccaccccaccccacacgccacaccaccgcgtcacagcaatgccgccgtcgggacgaaagccgaaggcggccccgtccgagccacggcggcgcccgcagtcccgcctggagtttcgtgccacagtggacggcgcgtggtacgaggcgcgtgtggctgtgcagtgcggcgcgctacgggtcatgtacgaggagttcctcgaggagcaggacgagtggtacgacctcgccgcgctcgcggcttcctccgtgcgggacgtagccaagctccgtgccaggttccgtgtgccgtccacacccctggaagacacccaatgctgcgatctccaagccggcgcgcggctctgcgtctcctgtttgctcgacggcggcgacctcaagttctacgatgccgtcctcgattccgtgttcccagcggctcacgagatcgttgacggcatggagcggtgcgcgtgccgtttcgcggtgcagtggtcggatggaccgcgcgctgggagcatggaggaggtcggcattgagcgggtttgctgcgtgcagtcctcgccggttcaagacccagtgcttatcgagttcctggacggcgtgactaagctggccggggatgccaaccgggaaacggtgtctcaggagatctgcgtcgcgccggtagccgaaggcggcgtccatgcaaacgtgccaccgggatttcaatggaaatttgggtccagcgagtaggcaagcggtttgatgtgcgtggttctgaggttggctatttggtgcctctgattttgtgttgctttaacaatctgatcacgcacataaatcttctcttccaaattctctatccacttggtttgagttcggccgttaaaatactaactaatgtttcatccaaaaaaaaaaaaaaaa

SEQ ID NO: 2222 - DNA, 921 bp, Zea mays
  Clone ID: ZEAMA-23APR03-CLUSTER25828_1
gcacgagaccattacctagaacatcctaatcgaaaaatcatgcatggtgccggcgcaagatagacacgaacactaaggcagcggcgaagcaacgctagcagaggagaagaatgcggaactacgggcagtcgctgtacaaccggcagagcccggtggcgcggtgcgccaacttcgtgtgcgcggtgctgctcaccctggtcctcatcgccggcgtcatcctcttcgtgctgtggctgagcctccggccgcaccggcccaggttctacctcgccgacttctccatccccaacgttaaccggcagtccggctccggcctggccaacctgccggtgcgcttcaccgtcaacgagcacaaccccaaccagaagatcggcatgtactacgacgaggtcgtcgcgtcggtgttctacggcgaccagctcgtcgcgacggggtccgtcatgcaccccttctaccaggtgcccaagggagacacgcccgtgcaggggaccctcaccgccaaggcccccgtcccgtcggacccgtcgtgggggcggttcgccggcgaggtgtcggcggggagcgtcggcatgcggctggagctcagctccaagctgcagttccaggcgaagatgtgggacagcaagaatcaccacatcaaggtggagtgcgacttcactatgcaaggggatgggacgctccgtaagcaggacaaggactcccagtgcacgctctacttctagcgtgatcgccctgcttcttgaattggtgcaggccggcctcgctgacccctttcaactaaccttggtttcaaggttgtatttactgtgtgctttttccctgcatttggctgatgtttgtggttgttgtggtgccattatttgtaacacacgcgtgtcacttcaagagaatattttcaaaatccgaaaaaaaaaaaaaaaa

SEQ ID NO: 2223 - DNA, 957 bp, Zea mays
  unsure (1)..(957): unsure at all n locations
  Clone ID: ZEAMA-23APR03-CLUSTER25885_3
ttccccggccccccgttggtaaaccccggcccgtggaattaaattaggggcgcccaaaaaaaaactaatacctcgcaagcccgcggacgtaaacttgggacccttaaaaaccgccccccccttttttttttttttttttttttttttttnttttttttcctcctttttttttttttttttttttttttttttttttttttttttttttttttttttttttttttttttttttagtagtgaaattccatatattattgtaccacaaagccatgagcggcatacacaagatatatataaatttatatcgctgctgacaacactggaaacctgcaaccagcagctgtgctaaacaactaaccacttgactaataaacaccattactactagcgaaacagggggacactgttactactagctagcactggtacaggcgaaacacaaacaattcctttgataaatactctaggacaacaaagcaaacgcccttattcatggagcccacggcaagcttcttttgcaagtaaaaaaaaaggttgcaaacagagggacgagagagaggctctagctgcggctgctggtagccccccaccaaagcaagcaaaagccactcgtggatggatggagaaatgacatgttatctatcatctccatgagcgataaatccctaatccaacatttttcaaatctcaacattcttgcatcagctaacacctctctctcactcgaaccccttattattactgttccccccgaaccaccaaactggatttctaagcttctcctccatctccaccaaagaaccaatatatcaccggatccaaaatgaacagacctaccactgatgctaacgctactactgtcttcctaactctgctgctaacacactacctaacaaaaggtactcnnnnnnnnnnnnnnnnnnnnnnnnnnnnnnnngctggagcgcgaccactcga

SEQ ID NO: 2224 - DNA, 1279 bp, Zea mays
  Clone ID: ZEAMA-23APR03-CLUSTER258_15
ctagcgctggcgccgcagacccctccccttcgcttccttccctagcgccgacgcccaccagacgagatggccccgaagaaggacaaggccccgccgccgtcgtcgaagccggccaagtccggtggtggcaagcaaaagaagaagaagtggagcaagggaaagctaaaggagaaggtaaacaacgcggtgctgttcgaccaggctacctacgacaagctgctctcggaggtgcccaagtacaagcaaatcaccccttccatcctctccgagcgtctgagggtaatcactcgttccagatctgtgttgcatccaaaccttgtgcacagccgcaacgttgattaaattaaattgctatgagtgtctattatctgtaatgccatcgtacttggccaactgcatgtaagattagtagcctggaattttgtaatgagtcatgattaattcattgaagctccatctgatggctagcttaatggctccaagtttatttgaattggcaggtatgaaaggtgccgcatgtatgctaggcattgtgtgagttgtttttgagtagtaatttgaattggcagttgttgctacgatttttatcttgaatatgtgacatccatgtgtcattttaatagcaaactattttgttgcataccttccagtgatgcacatcagagtgtgctcctgctatcaattagcatgactattgtagcatgtccatgtgttcagtatgcatcaggaatcaaattctgtacctgtattaggtgttgttttgtaatagcttaacttgttctgttgacttgcagatcaacggctcccttgctcggagggccatcaaggacttgatggcgcgtggcctcattcggatggtctcggtccactcaagccagcagatctacaccagggcaaccaatacataaggatggggaagaggtctaaaatgcattgtctgccctctctgcaggaggagctcgtctttagaacagttgccatctttgtcaagagttgccaatgttatgttactggtgatgagttccaggtgacggcaacattttagagattttgagtatttctattagttggtactatggtttgccaattataagttacttggcctaaatggtttttgttttatggatctatggtattttacatgatttaaatcaattctagggcgtagaggcaaagtaagattagccaagagattagtcagctttcgctcgataatgtcgaacttctattaaacacattaacaaaaagattgagtggaaaaaaaaaaaaaaaaaagctt

SEQ ID NO: 2225 - DNA, 591 bp, Zea mays
  Clone ID: ZEAMA-23APR03-CLUSTER258_9
aaaaaccctagctagcgccgccgccgctgcagactcctccttttcgatcccttcacaaagcgccgccgtcgccccatcgaacatggctccgaagaaggataaggccccgcccccgtcgtcgaagcccgccaagtccggcggtggcaagcagaagaagaagaagtggagcaagggaaagctaaaggagaaggtgaacaacgcggtgctgttcgaccaggctacctacgacaagctgctctctgaggtgcccaagtacaagcagatctacaccagggcaacaaatacctaaggatgggattcccttgtttgccctctctgtaggagctcgtcttctttagaacagttgccatctctgtcaagagtttgctaatgctatgttagatgagtttctcacgtggctgaaacgtttcagagagtttgcgttagtttggcttgcctattataccttatctggcctcaatagcttttttctatggaaatctgccttgaaacgtctgatccgtgattatgcgactctatctaaactactgttatgctgcaattctgtcaacttgtctgaccagcaagtctgatgaatgaacttctgtatag

SEQ ID NO: 2226 - DNA, 1530 bp, Zea mays
  Clone ID: ZEAMA-23APR03-CLUSTER25909_1
gcacgagaccattacctagaacatcctcatcgaaaaacccccttctccacccgcaaaatcccaatacaaatactcgcccagcaaatagatagccagagggacggcggagggaagccaagaaaaccacgccaacgaccaaagcagctgtcgataacacggcgtgctacacctgcctgcacaaccctcagcagggccgcaggcgagagagagagagataggaagagagacagcgcgaagcggcagcggtagccagcaaaggcggctagagctgttgcccatgcaaggcgagtaccggtcttccagcgaggagtcggcggccgctgcagcagccgcagccatggctcctctggcggccgccgcggccgcagcagtgaagatggaggcggagcaggcggcgatggcgagcgcggctgcgccgcagctggggtcggcgcaccagcaccagcaccagcagatgcagccgcggcggcagtaccgcggcgtgcgcatgcgcaagtggggcaagtgggtggcggagatccgggagccgcacaagcgcacgcgcatctggctggggtcctacgccacggccgtggcggcggcgcgcgcctacgacacggccgtgttctacctgcgcggccggtcggcgcggctcaacttccccgacgagatcccgtcgctggcgccgtcggagggcgagggcgagggcgacggcggggagcccgcgcgcgaccccgccgacggcggcggcacgctgtccgccgcgtccatccggaagaaggccatcgaggtggggtcccgcgtggacgcgctgcagaccggcatgatggtgccgccgccgcaccaccgcgagcgccagaggcaccaccaccaccaccaccaccacctgccgcagctgcggatgcacgccgccgccgcggaggcggcggctgtggcggagcaccggcaggaggtgaagcagtcgccgcagcggccggcgtggagcgggcgcgtcaagaacccggatctaaatcgggcgcccagccccgagagctccgacgccgagtgacatgagaagcgagcgagcagcagcagcagcagccaccgcaaaggctcaacgacgacgacgtccgttgttgcgacggcgcccagcgcagcatgccgctgtcgtcttcgttcgtatccacgtacgtacgacggcccagctgacccgcttgcctacccgtccgttctgtgcgactggatggtcggtcggcgggcgtcgcggcgagggctttcggtacgtcgtggataagcacgaggggagggcgggcaggcgggaacggaggcggaggcggcggccccaagtggcggtctttccaaatgtcaaaaaggacagctgtaacagtgataagaaaaacaagtcatcatcctcgtctctccaccccccctatctctctctctctctatcctctcgcgcagtagcttgttctcgttccgagtagataagcagcaacgattagtactccactactatgatttttcaaatccaatccgcctaccccgaaaaaaaaaaaaaaaaaacccgcggcc

SEQ ID NO: 2227 - DNA, 1284 bp, Zea mays
  Clone ID: ZEAMA-23APR03-CLUSTER25909_2
acagggaagccaagaaaaccacgccaccgccaaaagcagctgcagataccactgctgctgcgcctgcacagccctcagcaggtgggagagagagagacagagagagagagggaggcggcagcggcagcgtcagccagcaaaggcggcggcttgcggcaagagctgttgctgatgcagggcgagtaccggtcttccagcgaggagtcggcggcggccgccgctgtagccgcagccgcagccatggctcctctggcggccgcggaggtgaagatggaggcggagcaggtggcgatggcggcgccgcagctgggggccgcgcaccagcagacgcagccgcggcggcagtaccgcggcgtgcgcatgcgcaagtggggcaagtgggtggcggagatccgggagccgcacaagcgcacgcgcatctggctggggtcctacgccacggccgtggcggcggcgcgcgcctacgacacggccgtgttctacctgcgcgggcggtcggcgcggctcaacttccccgaggagatcccctcgttagggctggcggatggcgtggacgtgggggagcccgcgcgctccggcggcggcggcggatgcacgctgtccgcggcgtccatccggaagaaggccatcgaggtggggtcccgcgtggacgcgctccagaccggcatggtggtcccgccgccgcaccaccgcgagcgccataggcaccacaaccacctgccgcagctgcgggggcacgcgcacgcgcacgcggaggagcagcagcagcagccgcagcggcctgtgtggagcgggcgcgtcaagaacccggatctgaaccgtgcgccgagccccgagagctccgacgccgagtgacaagcgagcgagagctgagcagcagccaccgcaaggcgaggttcaacgacgacgtccgttatcggttattcccaatcccacgacgcagcatgccgttgtcgtctccgtccgaccgtccccacgtacgtacgtacgtacacgacgatccagctgacccggccgcctgcctatcctatcctatccgtcctcgacgaccggatggtcggcgggcgggagggcggtgcggcgagggttttggccttttgggtacgttgtggataagcacgaaggcagcaggccagcagcagcaggggcggcgtggcgggcgggcaggcaggggcagggcaggcggagacggagggaggcggccacaagcggcggtctttccaaaatgtcaaaaaggacagctgtaacagcgataagaaaaacaagtcatcatcaccctctctc

SEQ ID NO: 2228 - DNA, 3026 bp, Zea mays
  Clone ID: ZEAMA-23APR03-CLUSTER25939_2
atgtatagcaatattgacagcacacaggaggcgttcgacatgtttgatgaagaatgttggaaatctactagtaaacctacggccatccaattagaaaatcttcgacgtgatgggttgaaaggtggaccaaacttcgtgcagtggtttcgtaattatgtttccaaaaactctgtgcacccggacttgcagcaaatggcacatacctctgtgtccgtccgaaactatactcgctatgatgtaaatggatatcgcttccgaaccgcgaaattggagaagagtcgaccattggcagccaccaccaatagtggtgtgttggcaagttcatatgttgacgatgacaaagtagtggactattacggtgttcttcaaaacattgtagagttgattttcgatggccccaaagaacttaaagtcgtgtttttcgagtgcgactggtttgatgctcatagtgggactcgtgtcgacaagtatggtaatgtcgaggtgaagcatagctctaggattccgagcagtatgagcgatgttgtccttgcaaatcaggcaaaacaggtgtactacctgccatatcctcacccaagccttagggcttggtgggttgcaatcaaagtcaacccacaagtcgtcgctccagagagtgctgactacgtgagtataatcagggacaacgatgatgctgtttttcaaccagaagcggcgtcgaatcaagacatagctcaccgattccatgtgaccaatggagaaggacttgaaaatctctgttgcaattcaagcgacttaattgaagaacctaggtcaaagcgcaaacgacctgtcgtcgttagaagatcagtaaggatccaacggaaatcaagagcgtatgaataaacaacgagccgaagaagcatcatcgggatgcggatgacttttgatttattgaacatgttcaagcataggagatcgaggaggagtgggggcagcgcggccagcgaggacagctcgggcagtgggctttttcagggcacctcacagagccgacaaaggcagcaacaacttctcgactgtctagacgaagtgcagggtgaggagggtgagcaggagactcctcagcaggatgctcatgtgcagggtgaggagggtgagcaggatgacgagggtgagcaggatgaggaggttgacccaatgggggcaggcagcgcgggcgacgcgtcagatggttctacgtccttcaggtataagaagagcaatgcgcttggtccgagacctgccgagaggaggctcatccggccgcatggagaatggtcatgggaagacttgacttgggacggtacaggcagacgtcctaaggtgaacgcggtgttgggtagcctctgtcgcttctactaccctggcatggtggagctcaatggcgagaggttcgcggctatgcagtgggctgactggggtctaaaggactatgtcgagccaggggagtcaggggaaagcagtagcggagggggaagttcggaaaaaaaacgaaggacttgtcaggtggctgtgtgggacgagttctgggggaggttccaattgccggatgacatcgaggaggatcaggctcagtggacacgtgtaagaggcactttcggaaagtgcgctgataagataatcaaggatgccatgtacaatgctcgcatcgcggccgtcaactactactacaagaagataaagggtcagaaaatgagcaaagcattaggggccaatgagatctacctcacagaggagcagtacctggagagcgttgtggattggctggcgaaggacatggaagcctggaggtggttggctaagagatgggcgtcgcctgagtggattgcagagtccaacaagcaccgtgccaaccgtggcactgaaggaccgaggcacaggtacggggccgatggacaccttggtaccgcacgccgcatggaagctgaaagtggagttgctccaagttttatggaggtttacgtccgtggtcaccgtggccctgatccggcgaaccctgatgagctatgcagcgaggcggcaagggagaaaatgaatgcatatggggaggaaatgactcaacgccatgggcctgatttcgactggatgcattcagacttagatgcctcggcgttgtaccacagtggtgggggtagaaagcatggcaggtttgcctttggcaccggcgttgtggagtacaacaggacattaggtcaagggaaaacatcgtcttcggcagggagttctcgctcctccaagtctgctcgagaggctcagctggaggaggagactcgggcagcacaggagcaggctcgagcagcacaggagcaggctcgagcagcgcaggagcaggtcggacagctgacgcagtatatgacttcttattttcaggaaatgactactcgactcggccctgatatgaacttgccagcttttcgccctccccaggcacaaggatggggacagtggccaggacaagctccagcgtcgcagccacagtggactggtgttgggtggacgcaggcacctccaggcacttggacgcctccaccaccccaaggatcgcagccagtcccgggatggatgccaccggtctcccagccaccggcgggctctcagccatttcaagcgtggatggcaccgccaccgacggggtgggtgccaccacctcaggggtggccagcacaacagtacccgtggatgcatgcacagcctcctcctcaccatggatcacagggttcagcgtcacatgctcatggatcggagggtgggtgtcaacgtccaagacttcctcgtccatggttctggaggggagtggccaccttcctggtggcggaggagggagtggccaaaactcacatagcccgccgagtgagtagtgaatttgtttatggactatgtatggatatgtatagactttgtttatggttctagatggagtgagtttgtttatgtatggactgtatatggactatatgtatggaatatgtttgaaacaattatgtaagtgcttgtgaatgttgtttgccaaaaaaaaaaaaaaagtc

SEQ ID NO: 2229 - DNA, 2940 bp, Zea mays
  Clone ID: ZEAMA-23APR03-CLUSTER259_65
cgtaagcttggatcctctagagcggccggcccttttttttttttttttttttttttttttggtacaacattccatcttacaagaaaatcaacatcgatgaaaacaatgcatcttctgcatcctgtcatagcagcatcgtgctgccgttacttgtaattgagcccttcctgcaatgacagtaatcgctgcaaacaaatctgtaggatagctaatacctatagagcgacccagaaatcagaggaagccctcagttggcaaagaacgggaatcaatagcccccacaggaaagaaaagaaaaagaaaaaaaactgaatgacgtgcttgttagttgactggcatgatctaatgagagctagctgacttgcaatggtatatctatgttttttggctaccagtgtagagtcatacaagccaagtttcaaggcccatagacctgcaaatttcaggagcaatccaaattctggctcatgtctttgtctacaaacttcatcgtcccattttcttcttcaactcctgctgtattgctttttgcctgccctgccttctctgtaaggtcaggccacagattctgatccgcggcagaatcaacttttgacccggcttttaggggaactcttgctaaggttctttcttgatccgacttttgaagaaaccgcttttttagagatggtagcatccctgtttatgcatacattagattcttccatcacagtcccctctggttctttaggttgcatactaggtgtcactgggctattagtattttgggggctatgcttatctggactgatgcctttcctggaagaagctaaccttgcaaaatgacgcctattttcaaaccatctgttgacctgatgaaatgttagccctagttcttctgccaagctttctttaagagaacgactagggtatggttgtgtcttaaaatgttcatgtagcttctgactaatcactggaccaaaatgtcctttcctatctttgatattgctgccattagaagtaagatctccatgtttctcatctactgaaccatgaagagaatgcaagctttctttagtgttttgtgtagtcagttcattatggtgcgcaactctagagccttttcctgcaggagaaccaacttcaccctcttcattgctttttattggtgtgttcttcccagaccattcttcttcatcactagaatcagatgatgcttcaccatatgcctcatcatacagccttttgtagtccaaccgttcagcttgacgtctccttgatactggtaaaaccacactctggtctatttcagtctccatagggtcgtcagcagaacttgttgtgttagactgagcagtgttcttttccatatcacccaccctgacatcgggtaatggaggcgatgaaacttcatcatgtccaccagattttttaatctccttacaaaaatcatccgagtcagacgtgaaatcagactcatcagaatttgacttcttttcgacatctttatccgaatcaggacctgctggatcatagtcatcatcctctgaatcttcagaaggtaatcccaggtcatcaaccttctttttatctatcaaaggttccaaatcatcagaacaggttaagaagtcagagtcgtcagagtctgatcctccgtcatcatcctcttcctcttcagaagatccttcttccttactagccacatgctcttcaggcatattggggtcaaaatcattgtcatccgaatcatcagatggaagatcaaatgcttcatcttgcttagagccattggtcatagcagctgcctctggaaaaactttctcccaagggtcctcaatggagatgtcactgccctggagttcatttattagatctatacagtctaacttgcaatcacatgctgggcagagccatccttcatctcccatgggaatatcttcagtacgcagaggaggatttagacagttctggtggaaccctctgtcacaagctccatcacagagaatgatatcattacccaatgtagcatttttcgaaccacaagtagcacaaaagatatcttcacaagatatttctccttcagaatcaaataaagattcgtcaattttccccttggatagaagagaatcaatattttggaagacttcccgtattctcaatttgcatcgtaagatttctgatttggctcgttcaagctccttctcaggtcttatcttatccaaactttgatttttccagccttcactagcataagcttcaattaggctttgctcataattcattcggttcaaaatgtatctaacccgtttacgaatttgtgagaactcatctgtcgaatttttgtttgaggctctgctcctttttcttctcttggcagctggttgtcctggaggctgcacatgctcagtagatgttgtctttgaacctgatgtagagcgaagcaccctgacatcaatatcagatgacctcaatgtatatgcctgacctgttagtccttgggaaccctttttacctctgtttgctgcccttttatagtttttccttatccccaagttatttggcacagtttgagatgcagacagcaaaactggatgctcaagggtctcaggattctgactagagctcgtaccattttcaatctcaccattaccctcagccggaacgtgaactgtctttttttccatagtatatgatcaccaaaatttcatcaatttacagtagacagaaagcagtctcagcaaacctgtcttctgaggacaacaataaaaaagatctatgtggccaagccagattcaccagcaccttgaaatcgctgcgagctggcgacgcagcgccgcggagaagcttccaggcccggcggctctcctcctctcctgcgtggggcgagtgtggcggggaggaagagcgggaggcgtggccgcgtgagcgaagcggcgggcagaataaaaagtgtctatgcac

SEQ ID NO: 2230 - DNA, 1761 bp, Zea mays
  Clone ID: ZEAMA-23APR03-CLUSTER259_66
gcacgagaccattacctagaacatcctaatcaaaaaaacccgatcgcccacgcaaacctctcgtcagaccacagctcgatcaaaccgcgaatgaaaaaaccacaaaaaatctcccaattctcgcaaccccaagccggccagcccccacgatctcgaatcccgatgctctcagcatctatcaactcccgagcggtcgtcaccagcgcatgagctttctccgctcgctggcgaactccttctcctcgctgctcttctcgtcggggggcgagacggcgcccatggacgcggcggggtcggcgccgtcgccggcggcggtggtgagggagcgcgtggcggtgaagctccggggctacttcgacctcgccaaggaggagatggacaaggccgtgcgcgccgaggagtgggggctccccgacgacgccaccgcgcactaccgcaacgcgatgcgcgtcatgctcgaggcccaggccgcgcgcgtccctgatgccgtctcctccaggtgcgcccgcgttctcttcctcgcgcccgtcgcggctagggcttctggaatgaattctgactagtgggtggtgccctgcggagcttgagaggcttgcagcgagagggggcaggtcagggtgtaccaggagaagatcgccaagtggcaggcgcaggtcgaggagcggctcagagtgcttggtcagagaagtgctgaaggtgccactgctgcagtagtgcctaagaaggttgtcatggtgcaatggtctacttgttaggctatgttgaggtgggggtgaggcgtcctcttgtgctcctggggagctactaataaacctcaagagttggatgatgctgttcttcgaagactggtgaaaagaatatatgtgccactacctgatccaaactctttttatgtttggcacggtagccaacctggaactgatccctggcagaccatgatttcgaaagattagttgtggagaccgaagggtattctggaagtgacctgagagccgtgtgcgaagaagctgcaatgatgccaataagagagctcgggccacagagtattcttgctattaaagcaaatcagttgcgacctttgaagtacgaggatttcaagaacgcgatggcggtgatcaggccaagcttgcagaagagcaaatgggacgagcttgagaaatggaacgaggaatttggttcgagctgacggcggctcgcactgcctgtgcctgatgatgatcaagcggtcctatttccatctgtatatatgatttatgtctcccacgctgtggctcacaacacaaggggtcacaccatgcgcccattgatgcgtcctcgttgggctaggcagcacaacatcgacagaagcagaatgtaaaggtatacttctggcaacggcctatacagccattgagggctagtttgaaacaccgttcaagggattttcatttttcaaagggaaattagctcattttcccttgtaaaaatgaaaattttttaggaaaatggtgttcccaaactagccctaagtattgctgttgcccaagttaaacaaaaaaacgtgtctattattgggctctgtttgtttaccctctaaattatattatccagcttaaataagttaagagataaataaacaacacaacatagattattaggtggattatataatttagatacctagattacgataattcataagcaggtcattggatgcttatagaaataagttaagacataaataaacaacacacaatacagattattaggtcggaggctcgg

SEQ ID NO: 2231 - DNA, 802 bp, Zea mays
  Clone ID: ZEAMA-23APR03-CLUSTER26043_9
gcacgaggagacttcgagttccctctccgttataaaaccgaacgcccagggcgctccgtgttcaatctccttgcccgttgtgctctctctcttcattcgttcccggcctcaccccgagccagtcgtctcgctagggtttcgccgccgccgccgccatgcctcgccgcagctcaggaaggtctgccccacgcccagctccccgtgctgcttcactgaggaacccgccacagccagcacgccaggctcctcctccagctcctgttcgagatggtggtggctccatgtttggaggaattgggtccaccattgctcaaggtatggcgtttggcacgggtagtgccatggcacacagggctgttgactctgtattaggtccccggaccatccagcatgagactcttgccacagaagctcctgctgctgcccctgctgctccagcgatgaatgctgatgcttgcagcttccattctaaggctttccaagattgtctcaacaactatggcagcgagatcagcaagtgccagttctacctagacatgctgaacgagtgccgccgtggtggtgtgtctgcctaagctgcctctggggttattcgtggattttctttcggtgatgctatctcattaataagataccgtgaaacttttgtctccacagcttgaagctaaacttcctgggattaatacattttgttatcctatgctgttggagcagacttttgtctcttgatcataaatatttaaacgaacctgttatgttggaaaaaaaaaaaaaaaaaaaaaaaaaaaaaaaaaaaaaaaaa

SEQ ID NO: 2232 - DNA, 1601 bp, Zea mays
  Clone ID: ZEAMA-23APR03-CLUSTER260999_1
gcacgagaccattacctagaacatcctaatcgaaaaaaccatccatccatccatcggcgggcgcgcagccagccaagcggtcccgccataaaggtggcgagcgcgagtatactgttgcattgctgctgtagtgctgtgctgattgctccgtctcctccgcctctcgctcgctcgctcgctgaggtgaggaacaagaagcggagaggttacgggtttgcgggttgcgttgcgtgcgacatggggagagcggcggggctggcgcgcgccggtgtgacggcagcggggcgggcgacgacgacgagggtcatgcgggctgccgtgtccgcgttcttcgccgggtaccaccgcttcacctccgtggcggcgctgctggcgctgccgttctcggcggcggtgctggcgtcggaggcgatggcgccgtcgtcgggggcgctgcgcgctgtggcggcgcggctccgctccgtgttcgcggccgcggggttcccgccctcccccttcttcgcgctgctcgaggccaagctgtcgcagaccgtcttcacgttcgcggccacgctgccgttcgcgctcaccttcctgctgctggccaaggcctgcgtcgccgccatgctccgcctccgggacgacgacgcgtcggagtcgccgccgcctcggcggcggcgggtcgccgtggccgcgctcccgccgtgcgcggccgtggcgcgcgcgtacccggccgtcgtcgccacgcacctcctcaacgccttcctcatgctctccgccaacgccgcggtgttctcgctgctgctgctggctttcggcgccgccgacctgctgggtctcacctcccacgtctggacgctcgcgctctcggccgcgggcgccatcgtctactcgctcgtcgtcggcgtcgccaccgtggtctgcaacctcgccatcgtcgtggccgccacggagcccgggtgcgcgggccacgccgcggtgctcagggcctgcgtcgcgatccggggccgggtgtccacggcgctggcgctggcgctgcccaccaacctcggcatggcggcggccgaggcgctgttcggactccgcgtcgtcgcgcagcgtcggagggacgggaggctcgcgccgggtgtcgccggcgaggccttctcgatcgcctacatccacgcgatctgcgtcgtgctggagatcatcgtcacctgcatgttctacaggagctgcaagaggagtgaagccgacgagctcagagagctggagccagaggagaagggagacctccaggcttgatgccctctcaccttcagcttcagtctggtgcgtgcacaatacagatagtagcatcatcatagattgtgtttctgatcagaacaacaggatcagatcatagggtacagagctgatacaaagaaacatagtggtaagccgacataaatttctgcaaaatgtttctttttttatgcaaagcaaatggtaaacattgagttcaaataaacggttatttgtacagaaaaaaaaaaaaaaaagaactgttcttgtgtgacactggtagcttgcaccagcacctcgaagaaggaattgcagttcagagcgtataaactcaacctcctcatcaatctactaggtat

SEQ ID NO: 2233 - DNA, 1545 bp, Zea mays
  Clone ID: ZEAMA-23APR03-CLUSTER260_40
gaattcggcacgagcacgaccttaggggttcagatcggatcggaagcttccataagtttccatcgggcgtcgccggtatggcgatccgcaaggggtcttcgtacgccgtcgcggcacttctcgcgctcgcctctgtcgccgccgtcgcaggggaggtcttcttccaggagaagttcgaagatggctgggaaagtcggtgggtcaagtccgagtggaagaaggatgagaacatggctggtgaatggaaccacacatctggaaaatggaatggagatgccgaggacaaaggtattcaaacctccgaggattacaggttctatgccatttcagccgaataccctgagttcagcaacaaggataagaccctggtgctgcagttctctgtgaagcacgagcagaagcttgactgcggcggtggctacgtcaagttgctgggtggtgatgtagaccagaagacattaggtggagacacatcttacagcattatctctcgcccagatatctctcggtacagcaccaagaaggttcacactatcctgaccaaggatggcaaaaaccacttgatcaagaaggatgtcccttgtcagactgatcagttgactcatgtttacactttcatcatccgtcctgatgcaacatacagcattctcattgataatgaagagaagcatactggcagcatctacgagcattgggatattcttccccctaagaaaatcaaggacccagaggctaagaagcctgaggactgggatgacaaggagtacattcctgaccctgaggacaagaagccagagggctatgatgatattcccaaggaaattcctgaccctgatgctaagaagcctgaggactgggacgatgaggaagatggtgaatggactgcccctaccattcccaacccagaatacaagggaccatggaaacaaaagaaaatcaagaacccgaactaccagggtaaatggaaggcacctatgattgacaacccagattttaaggatgatccatacatttacgccttcgacagcttgaagtacattggcattgagctgtggcaggttaaatcgggcactctgttcgacaacatcatcatcactgatgaccctgcgttggccaagacttttgcagaggagacctggggcaagcacaaggaggcagaaaaggctgcttttgatgaggccgagaaaaagaaggaagaagaggatgccgccaagggtggggatgatgaggatgatgacctagaggatgaggaagacgatgagaaggcagacgaggacaaggccgactctgatgccgaggatggcaaggattctgatgatgagaagcacgacgagctctagatggcgaggatgatgttgctggcctagatttatcagctctgccactatgaagttcttttttttttcccgtgaccatcaagaagtagaacactgctaataagcagatggacagtttgggtcgccgtagcgctttgtagtcatttttcccattaaagccgataacactgaacaaggaggaaggatcttttgccaaaaaaaaaaaaaa

SEQ ID NO: 2234 - DNA, 1267 bp, Zea mays
  unsure (1)..(1267): unsure at all n locations
  Clone ID: ZEAMA-23APR03-CLUSTER26116_3
atgaatgcagtgtgcctacctagttatggactgatctcttcagaatgctggacttattgataatgatgacattgacgtgactgcactttgagaatagtaaggagagactgtaagcaaatagggtgtgtgattgaagctactcttttggttatttctgttttggatagttttactatttagcatagttactagtgaggttttggtaaattcaatatatgctgctattgaatatctttgcaatgaacgctaagcaaccttaagtgagttcttgagttgttttgtttgtaattttgagacatcaacatcatgcttttttcttttctatatgtgatcctttgcttgcttggtttcttctttccttttttcctttttttttcttcttttccccggccatggttcctttgctttccagcagttctctgctggatgtgatgtatccattgttgcaatcatggccttgcattggctacctctatacctgctacaaaactactgcaacgcctatatatacttggggtgaggaacaaaaaaaaaaaaaaaaaagatagttttactatttagcatagttactagtgaggttttggtaaattcaatatatgctgctattgaatatctttgcaatgaacgctaagcaaccttaagtgagttcttgagttgttttgtttgtaattttgagacatcaacatcatgcttttttcttttctatatgtgatccttgaaagtctctgcttgaactctgaccaaagtttggtgtgactattgctgattgtaaaatccagtcgcctgcctcaaaggggagcaagaagtccgcaggccatggtgggcgccggcatgcctctccatagtgttcgtgagggcagccaagcagaacaggaagtcccgtgtcgtctccttgaagctggaaccataatgcttgtcaagcacttggaatcgtcgccgcctgtgctccaatcctccagctctataggaggcagcctgcgcacaccatcgtgcgctagtccagagtggcatggaagctgtctgttttcgctcttggtgcatcatgcacaactggtctctctctctctctctctctctctctctctctctctctctctctctcttatcccttgctacttgttcttcatatataggtttggaacagtagtatgttgtagacaaagaaagaaacatataatgtgcagatggtctctggtctaaaannttggtgtgaatcatggaagagggaaaaaaaaaaaaaaataagaaaaaaattaaagggggtgcc

SEQ ID NO: 2235 - DNA, 2098 bp, Zea mays
  Clone ID: ZEAMA-23APR03-CLUSTER261381_1
ataaaaaaatggcgaaatgaaattcacggtaccagggtcaaccgagcacggacgcgtaaagccaacaaggggggaccgggggagcacgaggaaaccgaggagactgacccaacccgtgcttgcggcggcgctgcgctggtgccggccacggccatgatcggcggcgggcgggcagcggatagccacccggcgtcctgctcgtcctcgtcctcgtcttcctcctcgccgtcaggcccgtcgacggggggctcccgccttcaccgcagcaagaggcgtcccgacatcctcaacatgctcatgagtgcagcatgtctcagttcatcatcttctgatactggaaaaggacaaagcaagttttcaagcaacaaagtaacacacggatttcacttagtggaaggaagatctggccatgatatggaagactaccatgtagcagagtatagatatgaaaatgatcacgaacttggtctttttgctatttatgatggacatctgggagatagtgtggccagttatttgaaagctaatctttttgacaacatactgaaagagcctctcttttggtcagaccctcaagaagcaattaaaaacgcatacagctctacaaacaaatatattctggaaaacactaggcaactaggaccaggggggtcaacagcagtcactgctattgtagttgatggtacagatatgtggattgcaaatgtaggtgattcaagagctgttttgtctgaaactggtactgccagccaggttactgttgatcacgaacctcataccactaatgaacgaaagaggatagaagaaaaaggtggttttgtctctacgttccccggtaagcatctagttgcctagctctcaggtcattgttctctccaatagctatggaatttgtcccaatgcattttctagttgctgataggtgacgttcctcgtgtaaacggccaacttgcggttgcaagagcatttggtgatcagagcctcaaggcacacttgagctcagagcctgatgttaagcatataaagataaattcaagcacagagtttgtcatacttgccagtgacgggttatggaaggtatgtgtcttccttgcgtatttcactttacgttgccgtcgccttccctatatagttcaagatttcgatatccaatctgaatcgttttctcttagttctctcttttctcgttgttcatattcactcttttaccctgtttctggtgaaggtaatgaagaaccaggaagccgttgatctggtgaagtcaaccaaggacccgcaaacagcggcgaagcgactgacgtccgaggccctgggaaggatgagcaaggacgatatctcatgcattgtcatccgttttcgatgctgactcttgggtaatccagctcatccattgccctaagctgcctgtgtgcatcagcagaactgtttcctccgtatcgtagctggtagcgtctggatctgtttgcagctcaggatcagattggtgattggactggacaggttattgaccaaagaatagaagaatgctgggtttgggtgttttcagcgtctgcaggctgttctttttttcttcttctgtgcatatatacacgttggaatcaaatatataccgtcggactggagacaagaaaaaccatatatataccgccccaagatgcaaagatgatacagattatgtaagcttgtagacatgtagtagttggattatggcttttagtgactcgtgtgtgtggtgtggtgtgaattcctgtgtgtattgaagataaagttccgttgccattcacgtacggaaccagcgatatgctatgaacgggatcaacttgaaataacattcgtctctcctttataaaacaagaactctatcagaaattgcatactgccgtcgcgtatccagtggcaacagaaagctggatagcagggttgaaggttgaaagttttcttttttggttgataagtgctagcacgagactgattcttacaaagttacatgtttgaggaacaccagactggcgagcctgtttggctagtctatctgctatcttgttgcgttgcattggaatcttgtaaaaagcaacattctgatttgatgtatctgagc

SEQ ID NO: 2236 - DNA, 1348 bp, Zea mays
  Clone ID: ZEAMA-23APR03-CLUSTER261_11
aaacgagtagtagcgaccgataagatagaaacaacgattcggcgaggatacagtactacggaagggacggcccaatggcgagcggcattttaatatccacgcacgatgcaaggaacagaaagcatatggtcaccgatggttcgtagcgacgtcgccgcccacgcatttatgccgccgcgcgccgcgctggtacgttcgagcgagccctgtggtctggtctctcgacgtttgcccggctaagctgcggagccgtccgacgacctgcccggccgcgtgctactgcatatacactgcacgtccccgtggtctgtcgttctgtcaacagtgcccacgggacgggcccccgggcacgacgacgttgaacgaaacgaacgttgctgccttgctggcgtgaaaggcgacgcgcgtcgtgcgacggccaccagagagtctccgcgctcacgggatccgagcgcccagcggtgcgggccagctcgtctcgtctgagcacacagcacagggcgattgcgctgggagccaatgcgctgcgcccgcgggccacggcgggcccaatgccatgatgcgccggcccgggtcgccgtcacgtacgcgcgcatgggttccttcatcccttgacgactcccctgtcagaaaaaaaaaatacgaggccgtgtccttcctgtcagaatttagaaacacatcaaaccttccgctctcttcccttcctttgcgggctgctctccagttcaggcgtccagcttcgcccagagtccagacacggccaacagttaaacgcgccaccgccaccacgctcgcacgcacgccccacaggtacagctagctcccacccctcaacagcaacagctaagcttctcctagcagacagcaacatgaccgaggaggaggccaagaaggtggaggtggaagtggaggtcaccaaggcggcgccggcgaaggagaacgccgccgaagagaaggccgtcatccccgcgaccgagccgccggccgcccaggagaagccgccagcgccggccgacgactccaaggccctggccatcgtcgagagtgagtacaacttgctctgcttaattctccctctgtgtagtggaaggcttgcgatggaaaggtggtgttggcgtactggtttctgctctaagaattctgagaagctttcctcctccctactctatgctttggttcgtcgtctctgcacttcctggtagctgtacagtgggagtactaggtaggtactcagcacttgtgatccttgacagttggtttgcctttttcttttcatgggtttctggtttgttgttggccaactcatttggtccgactacttttcgcagaaaacaaaaattttcttctt

SEQ ID NO: 2237 - DNA, 690 bp, Zea mays
  unsure (1)..(690): unsure at all n locations
  Clone ID: ZEAMA-23APR03-CLUSTER2624_6
aacacaaaacacatccatcctcgctagctcgctctctcttgcaactccagtgcttctcactgccactgccagcaggtcgagctgctccgcaagtctgctttgctgctgcacctgcaagtctgcaaccgcgcacagagatgtcgacgactgtgagccgtgcgtccctcgaccagaaactcgccctcgccaagcgctgctcccgaggtacgtgcaaagcacactagctagctctgccctcaaactaaacaaacaagcctaattaaccacgcagcacactaaactaactgatcgatacttgtctgtatgtcgcatgcatggtctgcagaggcgaccctcgccggagccaaggcggcagccgtggcgactatcgcctccgcgatccccaccctggccagcgtgcggatgctgccatgggccaagggcaacatcaaccccaccgggcaggcgctcatcgtctccacggcggctgggatggcctacttcatcgccgccgataagaagatactgtcactggcgaggcgccactcgttcgaccaagcccctgagcacctgangaacacctccttacagggcacctgacgtgcacagccggctatcttcaggccgtgagacgagacctacgtcgagctagctagctacctgcctgtttcagttcgtcagtgcagattaagcaccaaatgtcgaccgatg

SEQ ID NO: 2238 - DNA, 883 bp, Zea mays
  Clone ID: ZEAMA-23APR03-CLUSTER26277_4
attaccgccgcaacgcagcgcaagaaacaacgaactcatttctagaggcgaaagagcaaaacccttcagaaacccatcggagaagaggcggagggcgatcggagagcgggatcatggcggggccagttgcggcggtgacggaggcgtgggacaagctcaccgtgttcctgtactcccagctctacgacgagaggaactgggccaaaaacaagaagttggcgaaggctcttggtgtgttcgctggatccatcctgttcatgcgcacctgtggtgatatggtggccatctagggagccttcaccaacttcttgttttaggcccagggcgagtaccaggcggagcacgcggcgcagtgcgtcaaggacaccgccggagccgcggccgacagcgcgcagctgcagcagcaccgcgccaccggcaccgttgagcaggtggcgcagacgggccagggcgtggcggcaggcgtcaagaacacggtggcgggcgcggcggttggcgtcaccaacacggtggcgggcgtgacggcgggcgtcacgaacacggtgaccggcgcggtggcgggcgtcacgaacacggtgaccggcgcggcggcgggtgtcaaggacaccgtgaccggcggccactgatcgacgacccacccaagaatgctgcatgcatggccaagtgttgagggtttgagcccaaagatggcttgaatttccgtccttttttgctttattttttgacattattgttttaacatgtttcattcacccgtctctgattgggattgtgatcacgaccgcctgcaataaaaaaaggccatctttactatgatccacattatgtttcctagtgcaattaaaggatcatcaatactacaccatgtgtaattctttgcgtt

SEQ ID NO: 2239 - DNA, 613 bp, Zea mays
  Clone ID: ZEAMA-23APR03-CLUSTER264885_1
attgatgggtgtaacgtaccagcggctgctctcgcaggggagccagagccagcgtccgcggagcggcgtgcgggcgcgggcgtgggtgctgctgcggtgggcggccgtgcggctaagctgcgcggcgaggcggcggttactggtggcggcggcgcaggccgcgcgcggaggctggcgtgggcggggctctgcggaagaggcggcagcggcaggaggagcgccacggcgggcggcggggccggagccggagccggggtgctggggtacgattccgccagctacgcgcgcaacttcgatgacggtgcgtggaaggccgaggagggcgtgtcctgggccggccccggcggcgcgttcttccccggcgccaacatcggcggcgcggccgtggacaccgcccgcctgtgatgccgttcccagctccgtccgtccactagctaactggtaactgttgctgcgctggaaatggatggatcgtggtcgtggatgcgtcactcgggatttgctttcttttcttttttttcttgttcatctggattattggcatttactttcttcggtcgaaaatgaaaaatattcaggccgtgcttgttcgggtgcaaaaaaaaaaaaaaaa

SEQ ID NO: 2240 - DNA, 2229 bp, Zea mays
  Clone ID: ZEAMA-23APR03-CLUSTER2648_2
actgtgtttccttgttttgtttctagtttaaaatcccaacaccttgctccagagattcacctgaaaatccttgtgtctttgctgtagtgtgtcttgtttgcattttcattgggagatgtgtacagataatgccatgatttgcttctagaaattagatatacatgactgttatatttagcagaatttactctttccatgaagtaaataaattgtgatgcactttattgtttgccaatacttttatggagtataatgcttcctctcagtttctttgcaaaatgcatccacttctgtgcacttttagggtaaacggaatatctagcatgccaatttttcttgaccacacaggagagcagcatatcattgtattaagaataaaaaggggtttcaaacctatacaaatacaacacaaaccccactcaagcaaaatgcagaacttaaaaaaccagtgcacccttgattaaaaaaaaggcagacccagtgcttgctcacacatgagtggggtctggagaagggataaatcaaggcaagccttctcatgcaagtttggagaggctgctttgaacccgcgacctggtgactgagacaactttcattagtgcacccttgattagacagaaataaaatcaaactttaaaatcaaaatcatgaaaataccattcctttttgaattactctcctgataaaaatacaatgtttgaatttctgaaattaaaatcatgaaataaggatcaggagttatatatttgattcacctttcaatgtcctattcctttgacatgtattgatgttttagtttagtcctgtgttgtctcacagtttcttaactaaaattttgttcctacattatctaatatctagtgctatctttgttgctttttctagtgctatgattaggatgcaatttttttatttgttcgttgggtcaacacaaaacttgctaaaatggactaaaattaacgttacatgtaattaatttaggtggcaaaatgaactaaaattaacatggaacataattaatttactgacccataaaacaccattgggtatctacttgtcccttgacagcctcttggcagccagattagaagagatgcccagaaaatgtttcaactctttagtaattttgggagcttggtccgtgtggaaacacaggaatgcttgtgtcttccagagagtttctccggatgatggtgttgtgttgagggctgctaaagaggagtgcttctggtgatctttagccggagctaagggcatcaccttcctccaggcactagaacccctaggacccctgggttagagtgggtgtggcggcgtgtgtgtgagggtctgttgcctgttctaggtgttcggcagcatgttttgagtgggttgggtgagtggtggggcttctttaccccttcttcttaatacaatggtacacagttctcctgcgtattcgagaaaaaaaacagcctcttggcggtaaccacatgaaacatgtataatatggtgaccatgttatttgtgtatgctaagaacagctcatgttcattttgcaggcacctttactctttcgaatcttggtatgtttggagttgataggtttgatgcaatactgccacctggaactggcgcaatcatggccgtcggtgcatcagaaccgacagttgttggtacaaaagacggtagaatcgggatcaagagccaaatgcaggtaaatgttaccgctgatcatcgggttatttatggagctgaccttgctgcttttctgcaaacacttgctaagataattgaggatcccaaggatcttacattttaaaagtccctgagtgattgtttttaaaagttcctgagtgattgtttttccttgagccaatcacaattgggtgcttctcacccatagtagatttgtagtatgtcttattgtgaattagttgatttaagctatcatcaatgtcagcatcaggtaactttacctgctggttggttatcttaccatcattggtttgtttttcaataaattcttttctttcatctttcttcttcattcagataggtgggtaaggatgtgtgtattcatcattttacctgagttttcatggacatttgattttgtttagcttaacaatgtaccatgaccttgggtacaaggaatgaaatgcaccttgtacttgtaccaccctgtggttgatttcacatgcctgtcaaacagaaatacggttgatgcccttgcaagtgtgtcaaaaa

SEQ ID NO: 2241 - DNA, 1679 bp, Zea mays
  Clone ID: ZEAMA-23APR03-CLUSTER264924_1
gcttttcctctttctgcgtctgcctctgccactcgtccctcctggatcagtgagtcccggagtagaagatccggcctttttagctgcttgtagtggtagttggttgtttctggggagttgcaccaccgggaagcggggcaggagaggagggttggtgggattgcggtgatggactccggcaacagcgggagcctccagtcgtctagcggcggcggcgacgacgagtacgactctcgggccggcggcggtggagggggcgtcgactcctccgcgctcgccgcactgctccgaccatcgccgtcgccctcggccgccgcgttctcgctccacggctcctacttcggcctgcaagagctgacgtcgtcggcgccgccgcctccgcagcagcagcagcagccgggtacctggtcattaggggcgttcgctggcgcctcggggctgccctcctcctcgtccccgcgcgtcgcgcaaccccgactcgggcacgggcgggcggcagcaggctgctgacaccacgacagtggggcgggatgcccgcgccggcgcagccaccgagggggacgcggaagcgagcgcgcgcgtcgcggcgggcgcccacgacggtgctgacgaccgacacctccaacttccgcgccatggtgcaggagttcacgggcatcccgtccccgcccttcgccgcgggcgtcggggtcgggggccccgccgcgtcgctccgcacccgcttcgaccacatcttccccccgccgtcctcctccctgccgccgtacctcctgcgccccttcccgcagaagctccctgctgcgccctccagtttcccgcccttcacgacgacgacgacgacggcgacaccgtcgtcgtcctcgtccacgcccgtcggcgtcgccaatgccaatgccgcgacgggcacgtccgccaccgcagcagcaccctccaaccctgccgcgccggcagcggcagcggcagccggagcgggcgacaccttccatcatctgacgtcctcggcgcttctccggctacaggaccccagcggctgctacctctccttcccgaacctcctcgacccgcagccgccgtcgtcgcagtgcattttcggcgcggcgggcgggttcgggcaggcgtcgaggctgcacgacccggcgccgtcgccgtcggatttcctggccagcggaagcctcggcctcagtcacggcggactcttgggctccgagggcctacacttgcaccacccaaggaccgacgacgagctgtcgggtgtggtcgcggccggcgcttcgggcggcagctgcaagctgaactactcccacgccggcgcggccacctcgtcatcgggcgccgacaagccaccagacggcggcggcgccggtgctggcggaaccggaaggccgggacgaggcgagggcctggatccgtggatttgtacatcggagtagggatgggcaaggcatgctgcttcgtcctgtgtgagctgtgcgatacggcggggacgaacacgaaaccgagccaaatccgccatgcatgagcaatgacaaaacgaaggtctgattataccttttgttacttattgttaaatcatcacttctttgccgaggcagttgtcgtagattgccgccccttttgtacattaaattaaaaaaaaaccatcatcttgcttcggcttgatctcaaaaaaaaaaaaaaaa

SEQ ID NO: 2242 - DNA, 2445 bp, Zea mays
  Clone ID: ZEAMA-23APR03-CLUSTER26495_1
ctcggtgctctcgagtctcgagagtcgagactcaggggacctgatttcctcgtccggccatggcgaccggtggcaagtccgctgcccctcagccacctcccgccgcgtcctcctcctccgaacgcgcgctggagtcagtccacttctcttccggaaaccctcgcatcgaggagacccgcggcgtcgtcgtcctccaccccgacccgcccgcggccgcctcctggtctcatgtcccgttggggagtaagccgcgggtgtgcgtgctcgccgtgcccaaccacatgacctacgccgacttctgccgtttctgcggcgccttcgtccctcacacactcgagatgcgcatcgtcagaactgatggagcagaggaccagtacagcgttcttataaattttgacactcagagctccacagacagcttctataagcacttcaacgggaagcagttctcttcgctggaggggggtgtctgccatgtccgttttgtggaagaggtgcactacactgaattgattgagcatgcacatacctcagttacaaacttggctgagcaacctacatgcccagtatgtcttgaacgacttgaccaagatcctggaggtattctcacaacaatctgcaaccattctttccactgctcgtgcatatcaaaatggacagactcctcatgcccggtctgtagatattgtcagcagcaaccagagaaatccatgtgttctatttgcggaacttcggagaatctttggatatgtctaatctgtggccatgttggctgtggaaggtacaagggtggacatgctattgaacactggaaggaaactcaacattgttattcacttgagttagagacacaaaaagtgtgggactatgctggggacaactatgtacatcggcttattcagtcaaaaacagatggaaagctagttgagtacaatttccatggtgatcacacagcagagagcacgtgttcactatgcagtggtgatgccgcaatggatgaagctctactgaacagtaaatttgaagctattgttgaagagtacaatgatctcgtcacatttcaacttgaaaagcaaagaaattactatgagtcacttctactagaagtcaaggaggaaactgagaaagaaatttctgctgctactgagaaagccatgagcacaaaactccaaaagttggaagtaaagtttgacaagtgtatggaagagaaaaaatttcttgatgaagtaaatggcaatcttgtcaagaatcaggagatgtggattgaaactatacgaaaagcacaagcaagggagcaagctgcgctcagattaaaagatgagaagatcgaaaaacttcaggaagagctaagaggtttgatagcccatttcgactgccaaagtgacactgcacaagcttcaaatgcgatctcgagcgatataccagggggcatgattcttccggtagcatcagaatcgtcctcgagcggcggcgttgttggtggcactggaaacggggagcaaaattgagtaaactgcgccctgtataaagcacgtttggatcttagggacctaggtatattcttgcttccaaacccccaccgttgtatgttcagttagggtaatacacacttgttagctgtcacctcactgcccctcgattctactgtcactagccgctagtagtgtggtactagggatgaaaacgatttcatttttttttggtttttcgaaattcgtttccgatttttcgaccgtatttaatggttatggtatttttcgaaaacataattggttatcggaattttatatcgaaattggattaatgttttattgatcgttttcttcgtttatcaaatttaaatcttggaattttaaaaaaattaaataaacttggaaatttttttgtctcaagttaaattatattatatgctaaacgatatcccaataaaaattaatattaattatgaacttttttgattaagacgagattgttaaatttattgtaaaaaagtcaaatgaattataaattggaacagagagtatttgtgaactttgaatctgtgaacttgtgatctttataaatttgttatattgtgaacttatattatgaacatgtgatctttatgaacttgttatattatgaattgtaaatgtgatctttgttgtattgtgaacttttatattaagatatttttatattgatatgtttactgatcgtatattagatttcgatcgttactggtatatttttcgtatcgaactttcatttccgatattttcaaaataccgatatcgttttgtttccatgattaccatttcaatttcatttaaaaatatgaaaatggaaatggttttagtgtttactggctgttttcatcccagtgtcgctatagcgttttggataggttactgctaagatattgtatattttgtcgctattgttgctatgattgttttttcgggt

SEQ ID NO: 2243 - DNA, 958 bp, Zea mays
  Clone ID: ZEAMA-23APR03-CLUSTER2653_2
ccaataggtggtcactctactacccgaagccgcgggctcaaccctaactgacccagagcgatcggagctgacgacgatggccgggaaggcggcggccgcgacggcggcgaggtgggcggaggggtacccgtggaaggagaagctggcaaagtacaagggtgagctcgggaagggggtgtggggatactgggagctcggcgcgtggaagccgctcggcatcagcgctcgcaagcgcgcccgcctccgcaaggaggtgctcctcgccggcgaggactggagctacgatcctccccgcggggagatgcgtaccaagcgcaagggccacaagtgcgaccgcatctccgccgagaagcgagcaaatactgttgagctgatgaagaagatgccccagatgctgctcgactacaagaaacgtaggtgggagaagaagatgaaagtggaggagagcggcaagaattgataccacgcggctcgtccagggtgcttctcttcctaaataaggtccaaactttatccaggaggtttgcaggacggctagattctgacgcatcatttccttggtggattccgtctctcctgtgatgcgactttggacgcactatcctgattgtgatgctttccaacactttgccactggatcgtgatttcagtgagccccaacttctgcagcactagtattttgttgagacaaatcagctataagcatgccatctgcccaataaacttgttcatcatgtaagatcaatgctgttagtttttgtccgagtttgtgcttgcgtttgcttatactcacctgcagaagaatggttgtctgaaaagtttgtccttctgtaataagtgttgaatgttggaaatcctaaccctcggggttgggagattaatatatagacttagttggatgggccagcccctttcccaaaaaaaaaaaaaaaaaaaaaaaaaaaaaaaaaaaagagaa

SEQ ID NO: 2244 - DNA, 1315 bp, Zea mays
  Clone ID: ZEAMA-23APR03-CLUSTER2656_6
aacagcaacgaccgccccgaaagagagccggaaaaaaagggcaggaaatcgccaccgcccgcacctatttgagcagccgcttgttccttccgcaatccgcgtcctcgctgctcctcaattcgattggctccgtgtcgacctccaggttgagaaggaaagcatcgcgagttcgccatacggatgggttccaaagcgcctttctgtctcacgctcctcttgctgctcgccgcggcctgtggacctgctgcacatgccaacgatgctgtcttgaaggaacatatttcttcaaccaagattcctgcccgtctcaagaggggcagcggactatgctcggcctgtgaaaacttcacgagcgaagccgtcacttatctcggcaaggaacagacacaggacaggatcgtggagttccttcatgatgcttgctcccaatcattctcctttgaacagaagtgtgtcgagctgatggactcttatgcgactctcctgtttgccaagatcacggagatcagaccggaagcgttctgcaaacggtatggcctgtgcagggacacggctcttctctccggtgtgggaagtgacagcacgtgtgtgttctgccaccatctgctcgatgaaatcatgtccaaactgaaagatccagatgcggagtttgagataattcagattcttgtcaaggagtgcaataagatcgaaggtcacgtccagcagtgcaagaggctggttctgcaatacattcccctcatcttggtgaacggtgagaagttcctcgagaagaacgatgtctgcgcgctcgcacaggcttgtccagcgagcagtaggaagacgttcagctcgatgttgaagggagcgttgtggagtgacgcctggcttgaaggttgaagaagaacacacggagcggtttagcagtggtcagaaatagtgtgaacaagtgctgtgctgtacatataataatgtcgtgtataaacgcatgaaggacgtgtgccctgcattcttttcgtcttgtatcataaattcataaacacgtcgtcttaagtaattgtttatggacacctagaggggatgaaggttaaaatatttggccttgaggtatgatgcagccaatcaatttgtatccacaaagtttcagcgctggcgacttgacactgcaaatgatgtggtatttttatttaaaaaaaaaaaaaaaaaagcggccctgcattgtttccatcttgtatcataattcaaaaacacgttgtcttgagtagatttttatggacatccccaggggatgaaggttaaaaaatttgtatcataattcaaaatcccattgtctttg

SEQ ID NO: 2245 - DNA, 1157 bp, Zea mays
  unsure (1)..(1157): unsure at all n locations
  Clone ID: ZEAMA-23APR03-CLUSTER2660_2
gcacgagaccatnncctagaacatcctaatcgaaaaagtcccaactcccaactcgcactcgcccaacctcgaatgccaagctagcaagagaggcctcgatcgcagaacccagcggcaaagcaagcacgcccgtgtctacaggcagctctttccatatggcgcccaaggcggcggagcaggagcgcgcggcggcggagcaggggcaggagcagccgaggctccgcggcgtgcggaagcggccgttggggcaggtacgcggcggagatccgggaccccgtgaggaaggcgcgcgtgtggctcggcaccttcgacacgcccgagcaggccgctcgtgcctacgacgccgccgcgcgcaggctccgcgggccgcgcgccaccaccaactaccccggcgacgtcgtccgagaagcgccgtgcacggccccggctctggctgcgagcgcgagcggcagcaccgagtcgtcgtcgtcgtcgtcgtcaagggacgacggccacccgccaccgccgctgcctacggcgccgtcgtcgctcggcctgggcctcgggctcttcccggcgacggtggccacccagccgtgcctgttcctggacccggcgccggtggagagggaggaaggggagcgggagcggagctgctgctcccggtcgccgccgtcggtctggcgggcctcgggttcgacttcgacctcaacctgcctccgcccgccgagatggtcatgtagcgttggagatagtaattctagcaaaaagggattgtgtagtagtagtgtagtactagctagccagtttgcctgtgcactagccactagccaatttgcgacttcgcaatgcaaatcaagaaatcgacggccaaatatttttctcctgcaaaaaaaaaaaaaaaaaaaaaaaaaaaaaaaaaaaaaaaaaaaaaaaaaaaaaaaaaaaaaaaaaaaaaaaaaaaaaaaaaaaaaaaaaaaaaaaaaaataaaaaaaaaaaaaaaaaaaaaaaaaggggggcccgttttaagaacccaatgttaccatccttggcatgctacttcataacctttatatagggccacctaaatataatttacttgcccctttttaaaaaacgtgaaactggaaaaaccctggctttacccaatttaatcccctttaaagaaaatcccttt

SEQ ID NO: 2246 - DNA, 1606 bp, Zea mays
  Clone ID: ZEAMA-23APR03-CLUSTER26615_1
aatcctctccctcagtgctcacgtctccaccggtccaccccctcggcagctcaatggcagctgcgacggcgccaccgccggcggcggttgccaccaccctctcgggcctcatgcgctgccagaacatccgtagcagcaggcctagagccttctacgcgaggtgcgcctcctccaacgcgagcgcggaggcggcggagagccggaagggaggccacggcgggacgcgcctggaggaagccgtgcccgtcggcgaggggcgctcgagggtagacgcctggatatcggcgcgtctcggcggcgggggcgttagccgcgcgcgcgtgcaggccagcatccgggccggggcttgtcgccgtcaatggccgcccggtctccaaggtttcgcatactgtgaagggaggggacttggtcagctgcacggtgtcagagctacagccgctgagggcagaggcggaggacatcccgctggacatcgtttatgaggatgaccatgttcttgttgtcaacaagccggctcatatggttgttcacccggcgccaggaaatgccaaaggcacattagtcaatgctatacttcatcactgcaagatctccacatttacctgtttagcacgcagctcagctggtgatgaatgcccggattcttcggatgaagacactgatgtatttcatgtggatcagtttgctgctgaagatgtaagttcagaagtccggaatgctcttgtgcgccctggtattgtgcacaggctggataaggggacaagtgggcttcttgttgttgctaaggatgagcattctcatgctcgattagcagaacagttcaagctgcatacaatccgtagggtatacatcagtcttacttgtggcgcgcctaatccaaattctggcaggattgaggcgtctattgcacgtgatcctaacaatcggattcgtatgactgctattgctggatcaggccacagatatgcacggaatgctgctagtaggtacaaagtaagagaggtctttgctggtggcggatccgcactagttgagtggagactagagacaggacgcactcatcagatccgggcgcatgcaaagtacatagggatccctctcctcggcgacgaaacatatggaggtacccagagcatggcgttatcgctcctgagaccaaggagtccttcgaaatatcacagtggcctctcgaatctgttgtctaaagtggacaggccttgccttcatgctgcatcgcttggattcaagcacccacgttcaggaaaggtccttgagttctcgtgccccccgccagatgatttcttggaggtgcttggtgaattgcgacgtgttacgtccagtgatgccccaaatggtgatggtgttttccggtgagggagatggatagaaccaaggctgaggatgtggaacgagacatgggaaccctgttccaagttcctagaaagagaaaagtgtttcgtacgacttttcctgatggctggtggaagggagagggaaatgagtaggataatctgtatgctttcgacttttcctaatgcaaacacaagcatttgtttgggctccgattcatgggcttccagcaggaagaacttcacgggattcgatt

SEQ ID NO: 2247 - DNA, 1278 bp, Zea mays
  Clone ID: ZEAMA-23APR03-CLUSTER2667_1
gcacgagaccattacctagaacatcctaatctaaaaacaggatctcccactcgtctcgaagacggccgcaccgcagacgccgcgggaatttaacgagagagactggcgccgcgcctcgcggagaccgcagcctggagccagcccgtgacgctgacgcggcgggccacgggcggggcgatgccaggagccatggagccggcagaggcggacgcggcggcagccgctgttgcgggaaggcggccgacggcgtccgagcgccggcgcatgtaccgcgacctggcgctgtcgctgcggtgcggactccgcgacgcggccgcggggttctcgttcctgcgcctgcgcggcctccgcgcgctcctccgcgcccctccgctccacctccgacgccgacgccgacgccgacgcgggcctcttccgcgactcccagtccatccgagatctccaagtgatcccggtgctgttcgagcacagcctgcgcaaggcgaccggggacgcggtgctgacggtggcgcaggtgctgggcatggagcccgccgccgccaggctcaggaaccccgccacggactccgaggtcgtgcttgcgctcagggtgctcgaaggttgctgcctcctctgcccggcctgcgcagccgcggcgcaccgctacaatgccgtcaaggtggttttgaatatactgatgacacgtggtatcctcgagcaaagagcatgtctcgacactctcttagcgttgctggtgaattgttcaggaaacctgacggatttcaaagaacaagatggactaaataaaattgctgtcattgtaaaagatgcaaatagggatgaccatgtaaggttaaaatgttccgagtttctgcttctttactctggaaacgcaaaagaaaaatgtggcgcagattccgagtctaatatgcgagaagatttggcaaaggttttcggagaaaaatgtgcatcatttatctcctcaatgaacctattcagctcaactctagagtcacaaatgaggcaatctgagctaagctttcttgcagagcatgtgttggattacatgtagagccatactaaagataaccataatcgtgccattttctccacacacaacagagttcagtgctccaaaatgtatgtttcctattaacttgggtaattattgacgatgctactgtatatgaactcaactacgagaatgttactgttcacctaaaaaaaaaaaaaaaaaaaacaaaaaaaaaaaaaaaaaaaaggccggccggtcgcgatctagagccccgggaattcagg

SEQ ID NO: 2248 - DNA, 2233 bp, Zea mays
  Clone ID: ZEAMA-23APR03-CLUSTER2669_6
aaccacgcctcgaaatataaccccccgccacaccgtacgagacgagggcagatatggaagctgatgctgctgctgccagtggcggcctggccctgctgcccgccgtgctgctcctcgtggcgctctccaccctcgtcttctccacatggagcaaccgcaacagcaggctgcccccgaggcccgatggccctcccgctgatcggacacctgcacctcatccgcccgccgccgcacagggccttcgaccgcatcctggcacgctacgggccgctcgtctacctccgcctcgggccctccacgcactgcgtcgtcgcgggcaccgcggacgcgcgcgggacctcctcaagcacgaggccagcatcccggagcggccgctcacggccgtcacgcgccacctcgcctacgacgacgccggcttcgccttcgcgccctacggcccgcactggcgcttcatgaagcgcctctgcatgtcggagctgctgggcccgcggaccgtggaccagctgcgccccgtgcgggaggccgagctggcggccgtgctggaggcggcgcgccaggcggccgccgctcgggagcccatcgacgtcagccgccacctcatcagcatgtccaacaacgccatcatgcgcatggtggccagcgcgctgccgggccacatgacggaggcggccagggactgcgccaagcacgtcgccgagctcgtgggggccttcaacgtcgaggactacgtcggcctctgccgcggctgggacctgcaggggctcacgcggaggacgcgcgaggtgcgtgacaagttcgacgcgctgctggagatcatgatcacgggcaaggaggagagtcgccgtcgtcgccacgccaccaccgacaccggcggcggcaccaaggacctgctggacatcctcatggacgcggcggaggacgccaacgccgaggtcaggctcaccagggagaacatcaaggcgttcgtcctcgacatcttcacggccggctccgacaccaccgccaccagcgtggagtggatgctggcgctgctcatcaaccacccggcctgcatggacaagctgcgcgcggagctggacgccgtggtgggcgcgtcgcgcctggtcggggagcaggacgtcccgcgccttccctacctgcaggccgtcttcaaggagacgctgcggctgcagccccccgcggtgttcgctcagcgggagaccatcgagccggtccacgtccgcggctacgtcatcccgcccaagacctccgtcttcttcaacatcttctccatcggccgcgacccggggctgctgggaggacccgctccagttccggcccgagcgcttcatgcccggcggcgccggcgccggccgtggaccccaaggggcagcacatgcagctcatgccgtttggaagcggccgccgcgcctgccccggcatgggcctagccatgcaggccgtgccggccttcctcgccgcgctggtgcagtgcttccactgggaggtgcccatcccgccgggccaatccactgcgccgcccttgtacatggaggaggcagcggggctcgtcaccgcccggaagaaccatctcctcctcatccccacaccgcgcctcaatccgctaccggcaagagcggctacgtagttagtacctgcgaatccagtctcagttcatcggtccatccaaattcagacgtgtcctccattattgcaagccgcgcactaagatcatatttctgtttgtttatatttctcggtcacacatacgtttgcaatcaccttcaggaaaagtgacctttgtacccgttcgatgttggtacatccagatccgtgtgctcaggaattacgtattactactatatatatactggtccgtttgagtccgagcgtgaccaagagggtggcggtcgaggcggtgtgctctcccgccgcttaggcttagccccgcccgcccctacttctccgactccccgagcagcggatttgaaggccgaaaccgatgtgtgtggagagtggaactgtaagtatcgacttgcattggtcggagggaggtttagcattcgtccgtctgattccggattaggattggtgctctgctacgtctccatgaactgttcaaagcggacagctgggtccagggatggagctgtagagagagtaggagtagaagactgatcatgcgttctttttgctgttgtgtgttagtagtagctgtttacgttcttatgctctctatccattcattaacgtc

SEQ ID NO: 2249 - DNA, 1613 bp, Zea mays
  Clone ID: ZEAMA-23APR03-CLUSTER26747_2
cgcacgagatcatttcgccagctcatcgccaccgccctcctccgctcccgcgtctccttcccctcgtcgtcgtcgggttggtgggtccacctctcgccgtgccccgccgtcgacccgcctcagaatcaaagataagtcaaaggaaaggtcggtatgcgccggtggttttgctgcacgaggtttaatgcttcatatcgtgaacatgaaaatgaacgtcccatcactccagaggagaaagaaggaaatggtttttctgttaaaagtgatcccatcaaggcaccaccttccattgaagtccctgaattatcatttgaagaattgaaagaaaagaccgacaattttggttcaaaggctttgattggtgaggggtcatatggaagagtatattatgctattctggacagcggaaaacatgttgctgttaaaaagcttgacgcttcaacagaccctgaacttgataatgagtttttgacacaggtatccattgcctcaaaactaaaacatgataattttgtggagatgcttggatattgtgtggaaggaaatcagcgtctagtggtctatgaatttgcgacaatgggttctctgcatgatatcttgcatggaagaaagggtgttccaggtgcacagcctggcccagcacttgattggatgcagcgggttaagattgctattgatgctgctaaagggctagagtatcttcatgaaaaggtgcagccttcaatagtccaccgggacatacggtctagcaatattcttctgtttgaggactacagagcgaaaattgcagatttcaatctttcgaatcagtctccagatatggctgctcgtttgcattctactcgtgtccttggaaccttcggctaccatgctcccgagtatgccatgactggccagctaactcagaagagtgatgtatatagctttggggttgttcttttagagcttctaacaggaaggaaaccagtagatcatacaatgcctagaggtcagcagagtctggttacatgggcaacacctagattgactgaggacacagttaaacaatgtgttgatccaagattgaagggagaatatcctccaaagggagttgccaaggtctggcttcaatccttccataccttgtgtgcgtgcgcttccatggcttgcggctgtggcggcactgtgtgtgcaatatgaatctgaatttagacccagcatgagcatcgtagttaaggcactctctccccttcttcaacataaaccgcaaccaccggcagccactactgacgctacagcaccgtcagatgcctgactttctcaaggagctatgaatcatgaatgttaagagaaccattttctcttcggtgcgtgcgctgttctagatcactatcgtgtgcctatgaagtgatcagtgtcacacaagcaacagcattgtgggctaaagcatatctccacctttacttagcttggtacaggcaggagacttcccattgtcattaccgtgttctatgctgagtcatgtgctgctttcgttggccgggtgaggtgtgcttgttggccagcggtcgtgaccacctaattaccgtgttatggtcatcactgtaacatgcgaaggttctaattttttttcc

SEQ ID NO: 2250 - DNA, 1781 bp, Zea mays
  Clone ID: ZEAMA-23APR03-CLUSTER26767_1
ggtcctaaacataggacagtatctgttggtcatattctcttcagtcataaatttggcataaaagagagaaaaaaaaaggagaaagagaaaatatataccagcaatcaacaacaacaactgctaatgagggagctgccactgccaaccgtgatgcatcatcatcagcggcctcctcctccaactcgcaatgattgatgtgaccaacccaatgcgggtctggtctggacgagatccgcgcccggagccggaggcccctgcgacgcgcggggccacctgtcggtgtcaacctttacttgctcctgagctcctccttcagtacacggtggctacgctggttgggcattataaatgttactagctggctaatcatccccccctccccctggcattgcttgccacccctgcaactgcaactgcaacacagagaaagatagcgctatccagaggatcagccccggtcatccagtgaagctcaggctactctacctcgctctcggccatggcgtcaggggaagcagcagagccactgcagtacacggtgagcgagaccttcttgtgcacgcacgcgctacatttccctgtcatgtcgcctggcgtcctactctgtgcagaccaccgcgctacgggtgtccatccagtgggagggctgcacgaagaaggtggagaaggtgccccacagcatggaagccgtctccaacgtcacggtggccgcggcgcggcacaaggggacggtcaccggcggcgtgcaagccgacccgctcgcccggcggctgcacaaggcgggcaagctggcggcccccgggaccgcaactgcagcacagagagagacagcgctagccagagggtcagctccggtcatcgagtgaagctcaggctactctacctagctctcggccatgcgcgtcaggggaagcagcagagccactgcagtacacgaccaccgcgctgcgggtgtccatccactgcgagggctggaagaagaaggtcaagaaggtgctccacaacatcgaaggcgtgtacaaggtgacggtggacgcggcgcagcacaaggtgacggtcaccgggagggtggaagccgacgcgcccgggcgacgaagaagcgctgccggcaggcaggggggcaggacgccgaggaggaggctggcgcggacaagcccggcggcggcggcggcggcaagaagggcaagaagaacaagaatcccaacaaaccgctggactgcggcggcgaggccccggccgagaagcaggcgtcgccggggcccgagagcccgcacgtgcacggcggcgccttcccgtactacgcggcgcacccggtgctgagctgctacaacgtggcgcacccgagctcgagcgtgtcgtactacgcgcccgccgccgtggtgccgtacggcgggttcccgcccatggtgccggcggagttcatgtacggcccgccgggcatgcaggagtctagcatgctcaacgaggacaacgccaactcgtgcagcctcatgtgatgtctgtcacgcacgcgccgccgctatacctacctacattgtcaaattaggcggtcaaagctcttgcttgttgaccagagattctttgaattgctcatccaaaaaaaaaaaaaaatgtaaaaatcagatgatggtaatagtatattctagttctaggagcgttcagcagtgcactgctaccacttgcattccttctgtgtgcagctatgtatgaactcgtggtagtaggacaggacagaaattcgaaatttttttcttgtgaatttaaaaaaaaaaaaaaaaaaa

SEQ ID NO: 2251 - DNA, 1021 bp, Zea mays
  Clone ID: ZEAMA-23APR03-CLUSTER2689_11
agtttcctaccttcctctcgtcccagcagccgcaagccaaaaccctagcaagcaaaccaccggagcagcggcgctcgcgcgggcggagccatggcggacgacgattacaacgaaatcgacatgggctatgaggatgagcctccagaacctgagattgaggaaggggccgaagaagagcttgagaacaacgaagatgcccctgatgatgtcataggtggagagggtgaagataaggaacaggaaaagaccaagcgtgagcgcaaaacaacaaaatatatgacgaagtatgaacgtgcgcgcattcttggtacacgagccttgcagataagcatgaatgctccagtcatggctggaaccgacgatcggccggacgacgtctggttttgctgccgtctgatcagcagaggcggcttcatcaagttgtggatgtgtatgttcttcgtttttgaacgagtttataccctgctgttcgtttggcaggagttcactcattgagttaatgagattcacccttagcaatcacctttcaatggtgaccatcacttttagttcttatactgtgtactcaatgatatatatgtatttttacaattttagattgcaatgaaggagctgagagcgcgcaagatacccttcacgatcagacggtacttacctgatggaagctatgaagactggggagtagacgagctcattgtggaggactcctggaaacgccaggttggtggagactgaagacgcggatctacttggcatggaaagggtatgtggtgcagtgggtctttcctgtagttacaagtcttcgttgccactatgagtggatactgtagcgaatgaaccaagacgaaatgatgctatgttaacttaacgtctgtggttgccttgaactctggaaccgtaatgctagcatggttgttggttgcgcaatgcttgtttttgtttgtttcagtttcagccaaaaaaaaaaaaaaaaaaaaaaaaaaaagggcgagcgcgcccgcggaacagagcccacgcacgc

SEQ ID NO: 2252 - DNA, 1684 bp, Zea mays
  unsure (1)..(1684): unsure at all n locations
  Clone ID: ZEAMA-23APR03-CLUSTER269434_1
ttttttttttttttttgntttttttttttttnnnttttttnnttttttaaattatttatttataattgctataagacagccgctgaaaatagtcatacaggncnnttttgggggcccagtctcaccaaatttgtaaagcacggctcagcccatacaacggttcggcccctgcaagacagtaacactgcgcacctcgctgccggcacggttcgctagctcgaacggggttacagccgcacagggcaacgagatggcggcggtgcttacccgagccggcggccgctccaagcgatccgtctccggcttccacctccgctccgttctcgcggggcacgggcccttctcatctgaagccgcgtcgaccgccgtgggcgatcgcgtggtcgcggctacgggcgagcacgatggggacgacctgcgcagccgcatcttccgactgggcctggcgaagcggagcgcgacggcggcactcgagaagtggtccagtgagggacgcgacgcacccgcggcggagctccgccgcatcgcgcgcgacctcacccgcgtccgtcgctacaagcacgcccttgaggtagcagactggatgaagacacatcacgagtctgatctatcagagaacgactacggaatgcgcatcgacttgattaccaaagtcttcggtgccagcgccgccgaagatttctttgagaagctcccagcgggagccaaatcgctagaagcctacacagcacttctgcactcctatggccggtcgaagatgacggacagagccgaaaggctgttcgagaggatgaaaggcgcgagcctgcctatggacgccctggtctacaacgagatgatgaccctgtacatctccgtgggggagctcggtaaagtggaggccgtcgcagaggagctgaaacggcagaacgtctctccggacctgttcacgtacaacctccgtgccagcgcggccgcggcgtccatggatctcgagggcttcagagcagtcctcgacgagatgtccagagacccgaagtcgtccacagaaggagggtgggcgctgtaccgggacctcgcgtccgtgtacgtcgacgcgggccagcttctgggctctgtgaattcgccgccggtggaggccggggaggcgaggatcagccagagggaatggatcacctacgacttcctcgtcatcttgcacgccggcctcggcaggccagagaggataagggacatctggaggtccatggtggcgacctcgcagtcgcagtcgcagtcgcagcagcgcatgacgagccggaactacgtctgcgtggtctcgtcctacctggcgtgcgggcggctggaggatgccggggaggtcgtcgaccagtggcagcggtccaaggcccccgagttcgacgtctccgcctgcaaccggctgctggacgccctcctgcgcgccggtctcgccgacgccgcgggtaggtttcgggagctgatgctgcagaagcgttgtatactgactagcagcagcagcagggcggctgtggtcgagtgattacggattggtttcgagtctgttcttttgttgttgtcttgtgtgaaggaataaacgatggaccgcccaggcactctgcacgttacgttattctctggcatgattcatgtctggttagtgggtcagtgggttacgtacgtacatagtgccaagctcgtggcataa

SEQ ID NO: 2253 - DNA, 1658 bp, Zea mays
  Clone ID: ZEAMA-23APR03-CLUSTER26946_1
gcaaccatgacctcgccttcgtggcgttcgttggggcgctgccgctgccgccaacggctccctgttctttggccacctgcgcagcgccatctctctgtcctccctctctcgctcatcctcccccaccgccctgccttttttcccccatttcttaagagaggatttgatagcctgtcagaataaaagagctcgaggaaattgcggcggccggaaattctggtcatggtgccacagaaacacgagaatctgcttcgtcctcggcggaattgccgtgggggtccggcgattcttcggaggacaagcgcctcggtttcgttgagctggctaggtccatggggattagtcaggacactcatgagtcgatggcaacagatgcagccaattacctttgccaccagcttcagcatcttcttgggcctatctcttctgcgacgagccaaagtggcccctgggaggagaggtcggcgatggttaggttgactcagaagctgcagaaatataagagaaataagcggtggcggcagaggagaaggaagcatgttgcggagctttttcagaaggagcgtgcggattatgatagagttgaccaggaagctgatgaatggagggctaagcaaatagccaaggacattgcaaagcggagggtggaaagcatgcagcagattgctagaaagaaaacaaatgaggaaagaaagcgcctagaatctgagctggagcttgccctaatggtcgagaaacttcaggagcttcggtctataagagttcaaaaaatgaagaaacaaggccattttcttcctgaagaggatgataaatacctcgagcgtgttaaggctgcagttgaggaagaggagcgccaagctgcatctgctgctcggactgatgctgttaaggatgctattctgactgctgaggagtcaaggaagcctctacagtatacaaattctcaggaaggtggttctgaacagcctaaaagtggaccatctgaagacgaggaccagggagatggcgggatgagtgagagaaatgaccaggcaagccaaaaaacagaacatgaagatgaaggtcatagatttgaggggaaagggcatggacatcatgaccctgtcagcaatctgccttttgagttctaccattattatcatggaagtgactatgacatggggacactcattgaggtccgcagaatgtgggattctttcatcagtcctggaggaagccgtatacctgggcactgggttcaaccaccccctccagctgatgaggtttgggcatcttatttggtacagcacaagtaaatcaccatgggtatgagaaatggtcttttctgcttcaaaaccaccggaatctttaatggttcctgcaaggtaatctagatacttaagttagaacttcgagttttgttagaatcctcggaattccgagatgtattggttattcctgccattaattgtcgttagttaacttcagtaccttctcataaattatagaataggatgtattctacctcttggtacgtcatgtcaactaatgatatagagaagttgtataaagggtgcaagtgattgcagttacctgggttaaatttactacttcacccatttgtttgttgtataaacattttatcaattcttgattttcttccagactatgcatggatt

SEQ ID NO: 2254 - DNA, 3083 bp, Zea mays
  unsure (1)..(3083): unsure at all n locations
  Clone ID: ZEAMA-23APR03-CLUSTER27034_3
aactctcgtatcgccggcgtatttagcttgcttcagggggcacgtggcggtggaagcttccctggcggtggtggtggtgcttggttgatgtcgatggcgcaggtctgctgtgactcggctgtagcggtgacggcggcaccggtggttggtgcggaggcggaggccagggccagggcgcgcgccgagaggcggagccgggccggagagtccggggcgtggaagcacgcggcggccgctggcacggccgatgccacgaggaagcggagtctcgggtcgggggagctgctgctggcgcggaagcacggggcggcgtcggtggccggccgcaggagggagatggaggacgccgtgtccgtgcgtgacgcgttctgcgcggagggcacggccgacggcgggaggcgcgacttctacggagtgttcgacggccacggctgctcgcacgtggccgaggcgtgccgggaccggatgcacgagctggtcgccgaggagctcgccgccaccgccgccgacagctccgtctccgcagcagcggcctggaccgcggcgatggaacgcagcttcgcgcggatggacgccgaggtgacgtcggccggagggcgcgccgccgccgccagaagcagcacctgccgctgcgacgcgcacaggtgcgaccatgtgggctctacggccgtggtggccgtcgtggaggagcacccgccgtccgtggtggccaactgcggcgacagccgcgccgtgctctgccgtggggacggcgcgccgccgctgccgctgtcgtcggaccacaagcccgaccgccccgacgagctggagcgcatcgagtccgccggcgggcgcgtcatcttctgggagggcgcgcgcgttctgggcgtcctcgccatgtcccgcgccgtcggggacggatacctgaagccgtacgtgtcgtccgttcctgaggtgactgtgaccgaccggtccgacggcgacgagtgcctcatcctgggcagcgacgggctctgggacgtggtgagcaacgaggccgcgtgcgaggtggcgcgcgcctgcctccgcaggggccgggccaagtggtgcgccgaggccgccgcgttgctcaccaagctggccctcgcgaggagaagctccgacaacgtctcggtggtcgtcgtcgatctccggaggaggaatcactagttctgtgcagttgtcaactagtactagtacagtaggatggctggtgcgcacaagggatttcgcgggggtgcgctaattgggtttttttttcttgcgttttcattcaaaaagtttttttttttttttgctgtactctccctgaatcaaaaagttcagaggagcccttagattaattattgtggtagagccggaatttggtccggataccattcggagaggtggtcgcgtagaaaaaaactcagaaaggggagacggtctcacaacaaaaaaaaaaaaaaaattgtatcatctagccatctagtgaaatagccccccnccccnnnnnnnnnnaaaaaaaaaaaaaaaaaaaaaaaaaaaaaaaaaaaaaaaaaaaaaaaaaannntctctcaactctcgtttcgccggagtatttagcttgcttcagggagcacgtggcggtggaagcttccctaggggtggcggaggcggtggtggtgcttggttgatgtcgatggcgcaggtctgctgtgactcggccgtagcggcgacggcggcaccggtggttggtgcggaggcggaggccagggccagggcgcgcgccgagaggcggagccgggccggagagtctggggcgtggaagcacgcggtggccgctggcacggccgatgctacgaggaagcggagtctcggggcaggggagctgctggtggcgcggaagcacggggcggcgtcggtggccggccgcaggagggagatggaggatgccgtgtccgtgcgcgacgcgttctgcgcggagggcacggccgacggcgggaggcgcgacttctacggagtgttcgacggccacggctgctcgcacgtggccgaggcgtgccgggaccggatgcacgagctggtcgccgaggagctcgccgccaccgccgccgacagctcagtctccgcggcggcggcctggaccgtggcgatggaacgcagcttcgcgcggatggacgccgaggtgacgtcngccggcgggcgcgccgncgccgccagaagcagcacctgccgctgcgacgcgcacaggtgcgaccacgtgggctccacggccgtggtggccgtcnnggangagcacagcgtcattgtggccaactgctggcgacagccgcgccgtgctctgccgtggggacggcgcgccgccgctgccgctgtcgtcggaccacaagcccgaccgccccgacgagctggagcgcatcgagtccgccggcgggcgcgtcatcttctgggagggcgcgcgcgttctgggcgtcctcgccatgtcccgcgccgtcggggacggatacctgaagccgtacgtgtcgtccgttcccgaggtgacggtgaccgaccggtccgacggcgacgagtgcctcatcctgggcagcgacgggctctgggacgtggtgagcaacgaggccgcgtgcgaggtggcgcgcgcctgcctccgcaggggccgggccaagtggtgtgccgaggccgccgcgttgctcaccaagctggccctcgcgaggagaagctccgacaacgtctcggtggtcgtcatcgatctccggaggaggaatcactagttctgtgcagttgtcagctagtactagtactccctccgaaggatggctggtcgcacaagggatttcgcgggggtgcctaattgggttttttttcttccattttcattcaaaaagtttttttttttttttgctgtactctccctgaatcaaaaagttcagaggagcccttagattaattattgtggtagagccggaaatttggtccggataccattcggagaggtggtcgcgtagnaaaaaactcagaggagagacggtctcacaagaaaatcagtctgtgtattgtatcatctagacatctaatgaaatagcaaccgaaacaaacaccacctccggtgtctggatgttctcgc

SEQ ID NO: 2255 - DNA, 1293 bp, Zea mays
  Clone ID: ZEAMA-23APR03-CLUSTER2704_3
actctaggctaaacttcactgacgctacggaaggggtctcgaagagctgccaagacccacctgccacctccgatggacttcgccggccgggtatccttcctgctcttcttcctggtcgctggcactgtagcaaacgaccagatcttcaccacttcaggtttgccatttgggcgaagttcgcgtgagccaaggtaccgcgtcgagttccatcctgttgattcgccattccatccagataatggtcaggaatcggtaccaatggctagtcatgaggggaagcgttataagtgctttctaccagttgaagaaactaaaaccatgaagtcaatgctcccacaaaatgcgactaatattataatagaaagtgaaaggcgaattaagccaaaggagccggatgagttacttgaggttctcaaggatcagtgtttctacaggcacgaaggttggtggtcgtatgaattctgttattatgggaaaatcagacaggtccatgtagaggacagtaaggttatccaagaatttgttctaggcgaattcgatgatgacgcaactgctgcataccatgaaaatagcacctctgagttaactgacgatgaccatcacgtgaaagatatatctaagaggtatcatgttcacttgtatacaaatgggactgtatgtgatctcacagatattccccgggagacagaggttagatttgtctgctcggagcctactgtgctgattagttcagtcaaggagatctcttcctgcaaatatgttgtaacaattcaaagcccgatgctttgcaaaaacccgttgttccagcaagaaaaacgaacccttcccatccattgcaatgaattacctgctaaagcagaatccggtgctgaggatggtttgcttccaaaagaagcgcagatttccatcatccccgatcaggatgagctgcatggttttccagcttatgctacttgatataatgatatgccttcaatatttatttctggtgtagaaaaagcacagttttggaggcccagtggcaactgagcaacgcgatgtattactctctccgttcttttttatttgccgtggtttagtttaaaaattacgacaaatattggagaacggacccatagatcctacagcagcggctccttgtaaagcaggttgagacgatcattctgcagtgctaattatttaggaggattacgaaggtagaaagtttctcagtattagtaaatgtaacaagtttgagacagtaacatttgcttgaaatgtctagtctataacaaggacaatactgcattcttg

SEQ ID NO: 2256 - DNA, 947 bp, Zea mays
  unsure (1)..(947): unsure at all n locations
  Clone ID: ZEAMA-23APR03-CLUSTER270543_2
gaagngnaaacgttcaagtcacccgcctcctcccaaaatcgcctccatctcccctcaaaatcctctgctcctccctccattccaaatcctccggggaaccatttcgcgcggctacgattcgctcctgcaactgcagcatagaaagtgacgtcgccgtcgccgcattcgcgccgccctgggctccgtccaactaccgttgcaaacccagagccccgagatgcctgagtccagggacggcaggagtgaggacctagctgacctttctggtggtgttggtggtggagggttctttatcaggagggtggcctcgccgggagccttagcggtgaggggtgtcaggaagccgttggcgcggcgttatatttcaccctcgaggaacaaggagaacctgctgccggtttgggcgttgagggtcacaccgacaaagaggagcccgcttcctggatggtaccccaggacgccgctccgtgatattacggccattgcaaagtgcattctaggctggtagcccttgtacaacagaagctcaatggcaccaacgaggactgagaatcctgaccaattcaccttcctgtcgtgcactggatagctcaggtcatgatctagccatgtgttttgcttgcttacaacctacctgcttgcaattcaatctcattgatcctaaaattgattgagatttttttttactcaagcatccactggcaatatagctacaaatataatttggcagcactgtcaatgctaataaaaagccaaattatcagataaggtaatttaaaggcttgtatgagtcttcaaacaaatgaggaaaatggagactgttcagttgtgcaaagtcacatgcttgtatattgagttgccatcagcatacaagtccaaaagtcctgggtttttggtgtgntgaaattcagtggccaaaggacttcatccatgatttgctcctttcc

SEQ ID NO: 2257 - DNA, 2148 bp, Zea mays
  unsure (1)..(2148): unsure at all n locations
  Clone ID: ZEAMA-23APR03-CLUSTER2707_1
ccnanttgaaaagaccaaacacgtacacggtgcagtgcaatccactcacctgctatggcgacatcaaggccccttgccttggcgctcctcttgtgcgccttgtcggcctgcagccacgccgccatttcctacccaccgtcggccatgtccacggcggcacctgccaacaatggcttcctctcgtgcctcatcaagagcgttcccccgcggctcctccacggcaagagctcgcgtgcgtacggctccatctgggagtccaccgtcaggaacgtcaagttcgtgtcggacaagacggtgaagccggtgtacattatcacccccaccgaggccgcgcacatccaggccaccgtggcgtgcgggcgcaagcacgggctgcgggtccgcgtgcggagcggcgggcacgactacgagggcctgtcgtaccggtccgccaagccggagacgttcgccgtggtggacctgtccatgatgcggcaggtgcgcatcgatgggcaaggccgccacggcgtgggtggactccggcgcgcagctcggcgagctctactacgccgtggcgaagatgacccccagcctcgggttcccggcgggcgtgtgcgccacgatcggcgtcgggggccacttcagcgggggcggcttcggcatgctgctgcgcaagtacggcaccgccggggacaacgtcatcgacgccaaggtggtggacgccaacggcaccctgctggacaggaagtccatgggcgaggactacttctgggcgatcaggggtggcgggggcgagagcttcggcatcatggtgtcgtggcaggtgcagctcgtgccggtcccgcccaaggtgaccgtgttccagatccacaggggggtcaaggacggcgccatcgacctcatcaacaaatggcagcaggtggcgccgtccctccccgatgacctcatgatccggatcatggccatggagcaggatgccatgttcgaggccctgtacctgggcacgtgcaaggacctcctcccgctgatggccagccgcttcccggagctgggcgtcaaacaggaggactgcaacgagatgccgtggatccagtccgtggccttcatccccatgggcaagtcggccaccgtgatggacctcctcaaccggacgtccaacatcaaggccttcggcaagtacaagtctgactacgtgaaggaccccatcccgagggacgtgtgggagaagatctacacctggctcgccaagcccggggccggggtcatgatcatggacccctacggcgccaggatcagctccatcccgcaggatgcgacgccgtttccgcaccggcagggcgtgctgttcaacatccagtacgtcagctactggttcggcgagggcgacggggcggcgccgacgcagtggagcagggacatgtacgcgttcatggagccgtacgtcagcaagaaccctaggcaggcgtacgccaactacagggacctcgaccttggcgtcaacgaggtggtcggcgacgtctccacctacgacagcggcagggtctggggcgagaagtactacaatggcaacttcgagaggctcgccaggaccaaggccaaggtggacccctgcgactacttcaggaacgagcagagcatcccgccattgctcaagtgatcgatgatacccggtcccatccagatcctttcgaccgcgccaagcaaaaggacgacgagtcgtacatgattctgctgattatattaattagattgatcctgctttgcatgcgttgagccaggtgctttgcatggcgagttagctacgtagttggcatcagccacatgcatgacattaaaacacaagctgacagccggctacccaagtaaataaggatacgcgacatacactgtcgtgccaattagtatggctgcttcttcttttttaatattattagtcaacattttatttcattttccttgtactgatgctactccatgcatcttaattatattcatatatatatacacgtcgccatatgacatttttcttgcgaaaaaaaaaaaaaaaaaaaaaaaaaaaaaaaaaaaaaaaaaaaaaaaaaaaaaaaaaaaaaaaaaaaaaaaaaaaaaaaaaaaaaaaaaaaaaaaaaaaaaaaaaaaaaaaaaaaaaaaaaaaaaaaaaaaaaaaaa

SEQ ID NO: 2258 - DNA, 2933 bp, Zea mays
  Clone ID: ZEAMA-23APR03-CLUSTER27102_1
gtcgtgtcttgggctgtcgtctcacccactggctcgcatcggcatcggaatcggctttgccacttcaagcgcaagttctaccagcgctacatcattgcaggagcttgccttgtagcgtcgcgttatgctggttgcagcgagtgactaagcagagatccgttcggcccattcactccaccagtgctcccaccacacaggggtagtacaaggcatgtcgcgaggggtcagctctggccgccgcacgtgtttggagctggagcggatcatcctaaatcggcaccgctccggaagcctcggccgagaggacgcgctcaacctgttcgatgaattgcttcctcaggccagaccggcatcggtgcacgccttcaatagtgtcctcaccgtcgtcgctcgcgccgactcctcgccgtcaccgcgtcacagcgctgcgctcgccgtgtcccttttcaataccatggcccggtccggcgtcaatatgatggccgccatcataggcatcatcatccgttgcttctgcactgttggccgcttggacctcgccttcgctgcctttgccctgttcctcaagacgggatggagggtgcagaacgtgaccctcaaccagctaatcaagggtctctgtgatggcaacaggactgatgacgcaatggatatggtgttcagaagaatgccggagcttggctatacaccggatgttttctcctacaatactcttatcaaggggctctgcgtcgagaaaaagagtcaagaggctcttgagctgctgattcacatgacggccgatggcggatacaactgttctcctaatgtggtgtcgtataacagtcatcgatggtttctttaaagaaggtgaagtcgacaaagcttacttcctgtttcatgaaatgattggccaggggcttccacctgatgttgtgacatacaactcactcattgatggcatgtgcaaggctcaagcaatggacaaggctgaagcaatcctacaacatatgtttgataaaggtgttatgccgaatacttggacatatagtatcatgatccatggatattgctctttaggacagttggaagaggcagtgagactgctaaaaaatatgtctggtagtggtcttcaactggatgttgtcacttacaatcttctgatacagtattattccaagattggaagatgcgcagaagctaggagtgtctttgattcaatggttcggaggggtcaaaaacccaattctactacctatcacatcttgcttcatgggtacgccaccaaaggagctcttgttgatgtgcgtggtctctttgatttgatgattcgagacggtactccgattgaacatcgtgccttcaacatcttgatttgtgcatacgctaaacatggagcagtggataaggcaatggctgcatttacagaaatgcgacagaatggtttgaggccaaatgtagtcaactacaacacggtaattcacattctttgcaagaccggcagattggaggatgctgtgtaccatttcaatcagatggtcagtgaagggttgtctcctgacaccataagttatacctcactaatacatggtctatgttccattggtgaatggaagaaggttgaggaactggcttttgaaatgatcaataggggcatccaccctgatgccatattcatgaacacaataatggacaacctatgcaaggaaggaagggttgtggaagcacaagatttctttgatatggttatacacattggtgtgaaaccaaatgttgtttcatataatacactgatagatggatattgcttcgttgggaagatggatgaatcgattaagcaacttgatcgtatggtctccattggcttgagacctgacagttggacctataattctctgcttaatggctactttaagaatggaagggttgaagatgcattagctctttacatagaaatgttcaggaaggatgtaaaattttgtgctattacatctaacataatgctgcatgggttatttcaggctggaaggattgttgctgcaagggaattatacatgaaaatggttgacagaggaatacagttgagaatcgacacatacaacacagttcttggaggactctgtgaaaatagttgtgttgatgaagcgctgagaatgtttgaggacttgcgttcaaaagaatttgagcttgatgttcggactttcaatatagtgattaatgcattgctgaaagttggtaggattgatgaagcaaagagcctgttttcagctatggtgctccgtggtccagtgcctgatgtgataacctacagcttaatgatcaaaagtcatatagaagaaggtttgttagaggagtctgatgatctttttctatctatggagaagaatggctgtgctgcccactcaggcatgctaaacgtcatagttagaagactacttgaaaaaggagatgtgagaagggctggaacctaccttaccaaaatccatgagaagaacttctccgttgaagcttccaccgctgcattgctgattcgtattatttcagagaagaagtaccagaaagaagtaaagtttcttcctgaaaaataccactctttcatggaacctagggatgattgagacctttcccggtttttctgtgctggacattagagattgctaactagacttatttcagaagatcaatttgaaaacatgaaatcttctgcataacttgggcacaaatgaagtggagagatacctggccttgaaggattttcttgtttctagagattttctttcatatttaataaccacgcttgcattcactctgtgcctatcaaataccgtgtgcaggcttgtgtgggtagtgtttacccaatagcatccctatcggctatcgtgattgatggaaattctgaaactccattatgccttctacttttttgcgtcttcacatttcaaaaaaatatttat

SEQ ID NO: 2259 - DNA, 1961 bp, Zea mays
  Clone ID: ZEAMA-23APR03-CLUSTER27125_1
cttggcatataacttgcttgtcatcgtgttggcccttgggtagagccgcccatgcaagtgctttcggacacgctgctaggagtatgtactgtgagtgtgtggatcttggctcctcctaagatcaatcgccccatggccttgttagtcaagcttgctgcccgcattatgaggacagaaccctgagcccgagcaaaatggcggcgctcataaaccctatataccgccgactcgccgccttcgcctgccgccggatctctgcaccggcggtagagaagcccgtgctgcccctcgtgtatcaccggaacttgcagcaaagacacaattccagtttggtggatgcgagtggaggattcagcgagatgcttgcctctacacggaggtgctatgtatttggaggcaaaggtggtgtggggaaaacaagcatggcggcgtcgcttgctgtgaagtttgccaaccatggtgaaccaacagctattgtttcgacggaaccatctccgtcactcggtgatttatttgaacaagacatgggtgttggcggcaaaactgtacgcatcactggatttgactctctttttgcagttgaggctggtcagttcaagataaagggagaacctgaagatcttggatcttttatcaacaatttacttggaaagatggggcttggaacacattctgatattatgtctatgattagagagatgctggatggaatgccccctggacttgaagaagcgcttgtactatcaaaggtgataaaatctattgacgtgcaagaggccgatatacttcggcgtttagtgctggatgctccatccactggacatacacttaagcttctgtcagcttctgattggattgaaatgttccttactttgagcattaagggcataaaagtggcttcgtccatgccatcgtttaatatgtatcttgaggacgtgcaattcatctctgccaggctagaggaactaaggcagcaggttcgcagagtgcgtgagattttgtttgatccacaatcaacagaattcatcgtcgtgacaattccaacgatgatggcagttactgagtcatcaaggtttcacgagtcattaaagaaggatggtgcacacacaagaaggctcgtcataaatcaggtgttgccaccgtctgcgtcggactgcagattctgtgctgcaaaacggagggaagaagcacgtgccttccgtgcgatactggaggaccgagaactcggcggcctgaagctgatccaggctccgctccttgatatggaggtgaaaggcgtccctgcactccgattcctcagcgattcagtgtggaagtagcgagaaacactaggtcaaataaaagattaatctctgtcggtctgttcggattctttcatttggttggagttagaatctagttcatgaatttggcctagaatctggcattcgaccacgttctatcactcttctcaagtatagacctgtgtcaaattcagagggcaaaaaatggtagaagtttttttttttttggtcacagcttatactagttcacaacagcacaccaagggataaccctcgcttgacgcttgttcacagtcttatcgaaaacttatactaattgataagatgaattgaggatgtattaggagttcggcagacgattatactcaattatcatcataataaaaaacactcttctaattgttgatgatgttatgttacttgcatcagatagcaaaccaccctattgtacaatctgttggtggaaacatgtttgtgttgtgtgttccaggttgtctgtttcttggtagccttttttggctgaattggtgatatacacaaaatctatttacttgttagacaataaattgaaaaaaacccctgatatccaggccattgcttgtgttttctatgattcgttttaactgaagttttcacgctgtgaaaattttctaccgtaaaaaaaaaaaaaaaaaaaaa

SEQ ID NO: 2260 - DNA, 1531 bp, Zea mays
  Clone ID: ZEAMA-23APR03-CLUSTER27125_2
cttaagataggtcttgtgtgcatcccggatagccctaagatcaagccctccatgtcaatggttgccaagatgctgcaaggtgagtgtgctgtgagtgacaggatcatgaggcctggcctgatcacagacgtcatggacctgaaagtcaggatggtagagccgatttagttcagcttgacatcatgctcgagcactgccgcaccggaccttgttggggatttcctcgattaaaaaataagctccttgatatggttctgtaacatagttctgcaatgctcctttatttagttctttactttttttgttaagatatgaggtgtagcgatacaatatgtctactaacagcgtttgtgttcttgatagttcatttaggattgaatgaagttactggtatgaccttgtcgagactgaagtaaggagggatagagctaaaaactctcttggcacaactataaagttcaagctatatgggcgtgtttggatggcagcctcccatgcaactgcctggcaggcaaatgatcctagccacaccacaggcataggaaatcgaacggtcggcattgtttcctgggccagctgataaaatccattgaagtgcaagaggccgataaacttaggcgtatagtgctggatgctccatccactggacatacacttaagcttctgtcagtttctgattggattgaaatgttccttactttgagcattaaggacacatgaggtgtagctattgggcctctaacttggttatcatggttttgggccgtgggtagagcaggcaatgcaagtgcagtctggcacaatcctggtggtttggcattgagtgtttcttttcacagtttgcgcttgcgaacatccgaaccccgttttcatcttgaattcaacttatgatgtatatcggacagttccaccacattctggcgccgccttcgtctgatcctggaggcaattggagccgctgcaagtcggatcctggtggatgcagcgcaacacagatcgcaaccctccaaggactgagaagtggaatgttgacatctctgagacagtctgaaagcaaaccgaaggcaggggtgttcatcaactcctgcttcgcgcattgctagagtgagctacaggacacatggttcgcaccaaattctccatccatatataacaagaaaattgcagaggtggtaggtgattggtactttgaaagaggagctgacgtggagattgactgcgcctatccctgtgattcacagtcttgtcgcaaccttataccaattgataaggctgaccatcctagattaaacttcaaagaccggtaccctgagccatacagagattctcatccgactgcccccgttgctgtgcatggatgtcaggtgtcattactgtaatgtagtggtgaaataggtagattaaaacaatgaaatttatatgtggctaggatcataaatgaattgcaaaattttttctcagaacagtataacacatatttgtacataagttgttgtgttattatatgtttccgttgccacgcccgggcact

SEQ ID NO: 2261 - DNA, 2145 bp, Zea mays
  Clone ID: ZEAMA-23APR03-CLUSTER2728_4
gcacgagaccattacctagaacatcctaatcaaaaaaacaaattggcactgctcgtcgccgacccctcctccctccccgcgtcccccgacaagccatccgcggccatgatcaccgcgctggacctctaccacgtgctgacggcggtggtgccgctgtacgtggccatgacgctggcgtacggctccgtccgctggtggcgcatcttcacgccggaccagtgctccgggatcaaccgcttcgtggcgctcttcgccgtgccgctcctctccttccacttcatctccaccaacgaccccttcgccatgaacctgcgcttcctggccgccgacacgctgcagaaggtggccgtcctcgcgctgctggcgctggcctcccgcggcctctcctccccgcgcgcgctcgggctcgactggagcatcacgctcttctccctctccacgctccccaacacgctcgtcatgggcatcccgctgctgcgaggcatgtacggccgcgtcgtcggccggcacgctcatggtccaggtcgtcgtcctccagtgcatcatctggtacacgctcatgctcttcctcttcgagtaccgcgccgcgcgcgcgctcgtcctcgaccagttccccgacggcgccgccgcgtccatcgtctccttccgcgtcgactccgacgtcgtctcgctcgccaggggggacgtcgagctcgaggccgagcccgacggcgtcgccggcgccggcgccgtctcctcccgcggcggggacgccgggcgggtgcgcgtcaccgtgcgcaagtccaccagctcgcgctccgaggccgcgtgctcgcactcgcactcccagaccatgcagccccgtgtgtccaacctctccggcgtggagatctactcgctgcagtcgtcgcgcaaccccaccccgcgcgggtccagcttcaaccacgccgacttcttcaacatcgtcggcgccgccgccaagggaggcggaggagcggcgggggacgaggagaagggcgcatgcggcggcggcggcggaggacactcgccgcagccgcaggccgtcgccgtgccggccaagaggaaggacctgcacatgctcgtctggagctccagcgcctcgcccgtgtccgagcgcgccgccgtgcacgtcttcggcgccggcggcgctgaccatgccgacgtcctcgccaaaggagcccaggcctacgacgagtacgggcgcgacgactacagcagcaggacgaagaacgggagcggcggcgcggacaagggcgggccgacgctgtcgaagctggggtccaactcgacggcgcagctgtaccccaaggacgacggcaaggggagggcggcggcggtggcgatgccgccggcgagcgtgatgacgcggctcatcctcatcatggtgtggaggaagctgatccggaaccccaacacctactccagcctcatcggcgtcgtctggtccctggtctcctacaggtggggcatcgagatgccagcgatcatcgcccggtcgatttcgatcctgtcggacgcgggtctcgggatggccatgttcagcctaggcctgttcatggcgctgcagccgaggatcatcgcgtgcgggaacaagctggcggccatcgcgatgggcgtccggttcgtcgcaggccccgcggtcatggccgccgcctccatcgccgtcggtctgcgcggcgtcctcctccacatcgccatcgtccaggctgctctgcctcaggggatcgtgccgttcgtgttcgccaaggagtacggcgttcatcccgacatcctgagcacagccgtgatcttcgggatgctcatcgctctgcccatcaccctggtctactacatcttgctggggctgtgagcctctctcgctcgcttcttcagcgtgcggaaggcgccatgctgtggtgtatcggccccacatgaaatttctgatgagcattagcgattactattagcttaggtagggaaacgaaagatagctccgacgacagcgatctattcagtgattcagtgagtgaggcattgcgatctgtcaaacatgctgacctgcggtcgaagaatcgatatatatatatcttatcttgcttcatgctgtcttaagataaacattatatatcttgtttcctttggagaaatattagcaattttagcaat

SEQ ID NO: 2262 - DNA, 1791 bp, Zea mays
  unsure (1)..(1791): unsure at all n locations
  Clone ID: ZEAMA-23APR03-CLUSTER272_1
cggccagtgagcgcgcgtaatacgactcactatagggcgaattgggtaccgggccccccctggaggtgtcaggtaactnnaanngctcttctggtttttctggcaaacctgatccgttttttccaaacaatcacgacaaaaggtccacggcaacaccaacacttgctgccagttggagagcgtgcccacacacccagatcggacggtgcacactgctcagggcccaccacgcttcaaagcggcgttgccggagtgtgagctcaccatgtcaccacactcgcggccgcggagctttatatagctcagcgcgcgcgcggcgccgactccctccctccgtcactcaccgcaccggccctctctcccacgccaggcgcacgtgcgcgcacgccatggacgccacgcgagttcgggttcctcttcccccgtctctgccggcgtggctcgctgtgctactgctcctcgttcaggtgacgcccggggtcggcgcggcggcagcggcgggcgtggggtgcgattgtggcggcggcgaggcggcggcgatcaaggaggaggacgcgcgcggggcgctgcggctgaagctcgtcgcggtggcgtccatcctggcgtcgggcgcggcgggggtgctggtcccgctgctgggccgctccgcctcggcgctgcgccccgacggggacgtcttcttcgccgtcaaggcgttcgccgcgggggtcatcctcgccaccggcatggtgcacatcctgcccgcggccttcgacgcgctcgcgcccccctgcggcggcggcgccagggccggcgggttcccctacgcgggactcgtcgccatgtgctctgccatggccaccatgatggtcgactccgccgccgcgggctactaccagcgcgcgcacatccgcaaggcgcgccccgtcgacgacgacgccgtcgacggaggccagggccgcgcggcgcccgcggacgaggagggcgccgccgccgagcccgcgggccacgtgcacgcgcacacgcacgcccacggagggcacggccacgccggtgcctcgcctcaggatgcctccgccgtcgccgtgtccatcaggcacagggtgatctctcaggttctggagctgggaatcctggtgcactcggtgatcatcggcgtgtccctgggcgcctccctgcggccgtccaccatcaggcccctcgtcggagccctcagcttccaccagttcttcgagggcattggccttggcggctgcattgttcaggcagagttcaaggcgagggcggccgtggtcatggcggccttcttctcgctcaccgctcccgcgggcatcgcgctgggcatcgccatcgcttccggctacagcaggcacggcgccaccgccctggtcgtggagggcgtcttcaacgcggccgccgcagggatcctggtgtacatgtccctggtcgatctcctcgccgcggacttcagcaacccgaggctgcagacgaacgccaagctccagctggcggcgtacgtcgccctgttcctcggcgcggggctcatgtcgttgctcgccaaatgggcgtagaacagaacagattcgctacccgtcagtttttttttctgccgaatcaccgtcagcgagaatttcggtgcgcagaggaagcgaggaaagaaggcccggatgtgatgtatgtaagagcactcccaactctgctccgtggtttccatagctgccacctagtcaaggaaccatttatagaaactaatcttctcaatgcaaatggtagtttctacgctaaaaaaaaaaaaaaaaaaatttttttaag

SEQ ID NO: 2263 - DNA, 1621 bp, Zea mays
  Clone ID: ZEAMA-23APR03-CLUSTER2735_1
agggccagttccgtccgacgcgtcgcaacaacccccagggctcaattgacgcgcgggggcgtttcggtcatccagtcatccccctcccctgccaaaggcgaagagcagaagcagaagcagcagcagcaggcgaagaggcagtggtagacatgccaaggtcatcagccggggcgtcatgcacagcagttgaccattctgagcagagcagaaaggatgatgaatatgagaggctggttacaagagctcaacatgcaacatctgatgttggcacgacaattttatctgagcaaccaaagtcaagatctttcatttggtggatgaaagttctgcttggctgcttccttcttatattagtgggctatgtcttcgtgaaatggggggtcccctttgtctttgagaaggttctcttgccaatcatgcaatgggaagccagtgcttttgggcgtccagtattagctattgttctcgttgcatctttggctctctttccagttattctagttccttctggaccttctatgtggttagcaggaatgatctttggatatggttggggtttcttgattataatggccgggagtactattggcatggtggttccatattggattggttcattgttccgtgaacgtctgcatgtatggctgacaaagtggcctcagcagatagcactaataaaactcgcgggtgaaggaaattggttccagcagtttcgggttgtcgcgcttttcagaatctcaccattcccatatacaatttttaattatgccgtgactgtgacagaaattaagttcaacccttatctatgtggttctgttgctggaatggtacctgaggccttcatttatatctacagtgggcgtttaatacgtacattggctgacatgaagtacggcaactataaaatgacaccagtggaaatagcatacaacgccatttccttcgtcatcgctatcgccctcacggtcgccttcacggtgtacgcgaagagagctctgggtgacataaaaagtccggacgatggcatcggtaaagacgaagaagatcacggcccaaatggctcaggggtgcgtatgaatcgtcgtcaggagcgtgccgacgcacgttacatagaactagatgatatgtgatggtgtgttggcccggatcttgcttggaaggaggcaccagtaggtcattaggtgcacggctacggtaggtagctagctatagtttacaagaggaggctaaaataatccacacccagctgacgtggtttgcgtgattcgtttcgtgtgctttgcccactgcactgccatactgtctgaatctgaaggtgcagggctactcactactgagttactgaccgagcgatgctgctctcaacgatgtttctgtgaccatcagcgtatcatccagtccttgatctgaagcctacactggagcttcatgttgaagcatacattggacttgagtagtacatttgtatataacgtaactgctaatagagttagcatatgataaaaaaaaaaaaaaaacgtatcatccagtccttgatctgaagcctacactggagcttcatgttgaagcatacattggacttgagtagtacatttgtatataacgtaactgctaatagagt

SEQ ID NO: 2264 - DNA, 3048 bp, Zea mays
  Clone ID: ZEAMA-23APR03-CLUSTER273_31
cctcgggtctcggctctcgccgtcgccactcgccgcgagcgagatgcagggcctagccgtatcatgccagcttcctcctgctgcggccgcagctcggtggcggccgcgcgcttcttcctctaatagggaagcagttttacaatgttggaagtatgaattaagtcaagaccactatttgggaggccccctaaggataggtcagtctcaaggaagtttgcacagacatcgctctacaaattttctcagaccagctgctgcagctatttcagttgaacaagatgaagtcaatacttatcttccaaaaggtgatatgtggtctgtgcacaagttcggtggaacctgtatgggaactcccaaaagaatccagtgtgttgcaaatatagttcttggtgattcttctgagaggaagctgatcattgtttccgcaatgtccaaagtaactgacatgatgtacaaccttgtacaaaaggctcagtcacgggatgattcatatgcaatagcactggcagaagtttttgagaagcatatgactgcagcaaaggatcttcttgacggagaagatcttgcaagattcttgtctcagttgcattcagacgtcagcaacttgcgagccatgctccgtgctatttatatagctgggcatgcgacagaatctttctctgactttgttgttgggcatggagagttgtggtctgcgcagatgctgtcgtatgcaataaagaagtctggggcaccctgcagttggatggatacaagagaagttctagttgtaacacccagtggttgtaatcaagtagaccctgattacttggaatgtgagaagcgacttcagaaatggttttctcgacaaccagctgagataatagttgctacaggatttattgcaagtacagctggaaacattccaacaactctaaaaagggatggaagtgatttctcagcagccatagttggttctcttgtcagggcacgccaggtcactatttggactgatgttgacggggtatttagcgcagatcctagaaaagttagtgaggctgtgatcttaagcactctgtcttaccaggaggcctgggaaatgtcatattttggggcaaatgttttgcatccgcgcaccattatacctgtgatgaaagacaacattcccattgttattaggaacatgttcaacctctctgcccctggaaccatgatttgcaagcagcctgccaatgaaaatggtgatttagacgcatgtgtcaaatcatttgctactgtcgataatttagcacttgttaatgttgaaggaactggaatggctggcgttccaggtacagcaagtgctatatttagtgctgttaaggatgttggagctaatgttatcatgatatctcaggctagcagcgaacattcagtatgctttgctgttccagaaaaggaagttgctgtagtttctgctgagttacatgataggtttcgtgaggcattagctgcagggaggctgtctaaggttgaagttattaatggttgcagcattcttgctgctgttggtctgaggatggccagcactccaggagtcagtgcaatactttttgatgcattagcaaaggcaaacattaatgttcgagcaatagctcaaggttgcagtgaatacaatattactgttgtattgaagcaacaagattgtgtaagggctctgagagctgctcactcaaggttcttcctctccaaaaccacacttgctgttgggatcattggacctggtttaattggtggagcactccttaaccagttgaagaatcagactgctgttctcaaggaaaatatgaacattgatctgcgtgtcattggaataactggctcaagtacaatgcttctgagcgacacgggaatagacttaacccagtggaaacagcttctacaaaaggaagcagaaccagctgatattggtagttttgttcatcatttatctgataatcatgtatttccgaacaaagttttggtggactgcacagcggatacaagtgtggcatcccactattacgattggttaaagaagggtattcatgtcatcacgccaaataagaaagcaaattctgggccacttgatcagtacctgaaattacggactatgcagcgtgcctcatacactcattacttttatgaagcaactgttggtgctggcctcccaatcatcagcaccttgcgaggtcttctggagacgggtgacaagatactgcgtattgagggcattttcagtggaactttgagttatatatttaacaatttcgaaggaacaagggcgtttagtgatgttgttgccgaagcaagagaggcgggatacactgaacctgacccaagggatgacctatctggaactgacgttgcccgaaaggtcgttgtcctcgcgagggaatctggtctgaggcttgaactttctgacattcctgtgaagagccttgtgccagaaacactcgcagagtcatgctcgtcagcagatgaattcatgcagaagctaccgtccttcgacgaggactgggccaggcaacgcagtgatgctgaggctgcaggcgaagtcctgcgttacgttggagcgttggatgcggtgaacaggagcggacaggtggagctacgcaggtacaggagggaccacccgttcgcgcagctctccggctccgacaacatcatcgccttcaccacgtccaggtacaaggagcagccgctgatcgtgcggggtccgggtgccggcgcggaggtgacagccggtggcgtcttctgcgacattctgcggctggcgtcttacctcggtgctccttcttgagcttcgagctacaggtgccagtttcaggaagcagtcggagacacactgccatgcatgatgcctcccctccgtgtttgggctatgctcacatgttgtaatgttgttctgaataagtgccaggaaataatgcctctagcgtatgtcgagagagagaggtggttcggctttggaatagccgattaggtgttgtttttgctgcatgatgcaaatgaattatcgtaccaatgaagggatgtttgcttgtgcct

SEQ ID NO: 2265 - DNA, 1673 bp, Zea mays
  Clone ID: ZEAMA-23APR03-CLUSTER27499_1
aaccttacccactgccatccctacccccaccacggccgaaacggatcgcagcgagcgaaaatggatgcacggtttgtgtgcgccgccgactctgagctccagctggcgcgggcccggtgcgtcgcgctgcaggaccacctcgccgcttcgccggacctgccacgccatcccgcgctccgctccctccttcgcctcgtcaacgccgagctgcgcttcctctcctcgctccgcctcgccccggccacgccgctctcctccaacctgccccacctcgtggcgctccacctcgtcctcacccaccctgccatacggagcccgtcccggctctcgccgctccccggcgtagatttctcctgcgccttccgcggccggcccgcgtgggtgctcgtgtccgcgagcaaccccgccaggctcgcctgggccccgcccgggggtctccgtgcccgcttcgcggcggcgctagaagccgcgcgcggtgccccgcccgctacgcggcccgagaagctgcttgtagtcttctcccgcggtgtcggcgtggatatcgcgcgggggctaaccgaggggttcgaggccgtggaggctgacttgctcgaggagttcattggcgactccgaggaggagaatgagcacgggtgggttgtcatcagcttggactcgagtgaggagctcaggaatttcagggcgttcgagattgatgtcgtggagggtgctagtgaggttttgcttccatcagacgtcgcggtggacgaggtaagtgctgatgaggaagagcttttgggtttctggggatcctttgctgcctttatggagaagatgtggaaagtatcgagggagctggtgaatctggacaccacggcactggtcgctatagtgtcagggatcagcaatggcggggtagggaagctgatggctgcacctgaggcagagaccagagcaaggttcaagtgcaactacaagttcgtcatggatcaggcacaatacgaactgcagtttccaatactcatagagttacggaaagcagtggaggggaagcaatgtatcatatgtgaaactgtcaacttggaattcaaagaaattgtttctatgtgtggtgggcctgaggagaacaccagagcaagacatttgttgaaacaacttaccattgtcccagacaatccttcagcacgaatgatggatcttccaaccacaaggaagctcgcgatgaaaaataaaattgtttttggcacaggtgaccattggcgggcccctactttgactgctaacatgggttttgtaagagctgtttcccagtctggtatgtccttgctaaccatcgagcaccgacctcgggcgctgattggtctgtgacagttagtatgccataactattctataggtgttttgagatcctaacgtttgtaattctgccccttctgaacattaaacaatatgaagttctggcaattgtagttgtcctactcctagaactatggtgtagtgtaggatgtcctagtttactccagtgtctagtactgcgagctttgtccatgactgtgtaactggtccagatccactggagtttattcgagcgagaatgcttactatctgtacttgtatccttgacgtcaaagtcaagcaaagcatatgtacaatatgaatgaacgcatcagcatgaatgactcgttggcagcgtg

SEQ ID NO: 2266 - DNA, 1830 bp, Zea mays
  Clone ID: ZEAMA-23APR03-CLUSTER27512_1
gcccacccagttccgaacttcgaacacgacgttctccctcacttccaccctccaggctccgagctccaaaaccctagctatgcagaaacagacgggcaagtccggcgggaccggtggaggcacgccggcgatgcagaaacacccgtttgggagcaccactggcggaggggccgctgctgctgctgctgcggcggcggtcgttgacccgggtgcacccgccgcgctgggtcgggccgtccctccaagtcctatcagccctgtcagatcagaacaacaaaagaattgtccttgcattgcaaagtgggttgaagtcagagatactgtgggcactgaatgcccttacagtactctcatttaaggagaaggacgacctccgacgtgatgcaacacctctcgctaaagttcctgggctcctagatgctcttcttcaagttattgatgaatggagcgatatttcaatgcctaaggaccatacgaaaccacccagactaagaactttgggtgccaacacaacactctcgggctttggccaggagaacatggaaaaagtatactctgacactgccactacctctaatgaccaatcaaaggcggaagattccagtgtcacaaagaagcgcgctgcaagcttttggtttgatgaggatgggttgtttaacaacgatgatgaagggagggcggaaaggcagcagtgtgctattgcagcctccaatataatccgcaatttctcttttatgccagaaaatgagattatcatggttcaacataggcattgcttggaaactatatttcattgcttagaaaaccagaatagagaagatgatgagctcataacaaacatgctggagacccttgtcaatttagcacctgtgctggacctgaggatcttcagctcatcgaagccctcgttcattaaaatgaccgagaaaggtgcaattcatgccataatgggtatgctttcttcttccgtaaagccatggcactgtgctgctgctgaattgattggccgtctgataataaatccagacaacgagccatttcttcttcctatcattccacaaatatacaaacgactcgttgacctattgagtgtaccagcatatgatgcacaggctgctgctgttagtgcactctacaatgtagccgaagtgaatatggattgcaggctcaagcttgccagtgagcgatgggctgtcgatagactcctaaagattgtgaaaacgccgcaccctgtgcctgaggtctgcaggaagacgtcgatgatactggagagcctcgtctctgagccgcagaacaggatgcatctcctcgtacacgagaacacttttgctgagatcctgacatcagaagggaaatactcggacacatttgctcggatcgtgtatgaactgacagcaaggccaagcaacaaagtgacctcaggacacgccatctggggaaacataaactgatgcgacgcgatggcctgtaatgtgttgttgggatctagactagatgagatttatttaatgtaggtgcttcgttgatcatgtattatgttatgtaatagacgctttgctgtatcgagttgcaggcttgcagcttggcaacctggccgaatttgggcagtttctttcatgcttcttttatcagtttgttggtggaaagtagcgtgtagcagctatgtatttgttggaatcagatgccacaggctggtttagccgcgttcataatagattattaaaaccgctgatggtttgcttcgtgctgaagctttacaagaagccgcgttcataatagattattaaaaccgctgatggtttgcttcgttgaagcaaaaaaaaaatcgat

SEQ ID NO: 2267 - DNA, 1776 bp, Zea mays
  Clone ID: ZEAMA-23APR03-CLUSTER2757_1
agattgcacgacgttttttttcgcttatcagtatttcggtcgagaaattcgcgaagggattaggggaattcgaggcaggggtttgcaagaatcagggcagtttgatgttgcttcctgtgcgcgtcgctaatttctctgttttattcgcgtgatttttagggttttatcttgagtttttcgttttctccaccgtatttcgttggcttcgttccgtgctactgtaaattcagaatcttgtcagagaaaagagaaggaaaaggaaaaacaaacaaaatagtaaggggaatttggtacctgggtgtttgctgttccttgagttggtgaatctttggagtgcctggctccgacgagatcgaaaggagggacctttccttggttcctctgctggagctgtgattgcagaggtgaaccatgtcagcgatggcggcggcgggtgaagcggagtatggtgaatgcgtgcagaaggggtccctgcagcagcaccaggcgcctcaacccagccccggcgctctattctacacccatgatggcgtcgccgtctacaggaatccggtcatgccggcgttctaccaacagcccgcgggcagcaatgtcgtcgtgccggcggctccagggccagctcattcccctgccagctctgagcccttcaagcgcaagcgcgggcgcccccgcaagtacgcccccgcagacggcgccgtgccgctggctatcgtgcccccatcgcagccacccactgctcgtgccccagctacctctgaggcctcacccacggttcctcctggcttctctccaagtccgcagagtggtggcgtggtgagtcggcaggcctcgccggcgccggcgccggcgtcaggtgctcccgatgtcaagaagcggggccggccgtcgggcccctccagcaagaagcagcagccgcaggcggcagcgcctggaccaggctggactggattgaagcctcatattttcacagttcaagctggagaggatgtagcatcaagagccatgtcattttctgggaatggatgggctgtttgtatcctgacagccaatggcactgtatctaatgtgaccctgcgtcaaggagagtcttctggtggaacagtaacttatgagggccgttttgagattctctctttggctgggtcatatcttctgtctgaaagtactggcatgagcagtcgaacgggtggacttagtgtttctcttgctagtcctgatgggcatgttttaggtggtgctgtcgcaggacctctaaccgcagcttcgccagttcaggtggtcattgggagctttctggctgatacaaaaatggagcttgaccctggatcagcacctgagaaacatgttttcagcaggtttcaaactaccagcagtccatctaggggtaccgaatcctcgggtgggcatgcaagcccaccaaacaccacaggctccttcagcaccagcacacagccaggcttcccaagctttcccacatggaaatgagtttacctgctatggtggagtgggaccgtggcctctggggatgaggagggaggaatttggaactgacagtcctcgagcgtcgtcgctgtagtttcatgagatgttatgagagtcaatcctatttaggtacttctaactggttacaatgaagttccggtttgctgcttgtcttgacattttgcatcattgaggcacttcaaactccaaagtggtggtaacatacagtatattagatgattccccctatcaaatgccttttgtcattctactgctcttaaaaaaaaaaaaaaa

SEQ ID NO: 2268 - DNA, 2016 bp, Zea mays
  Clone ID: ZEAMA-23APR03-CLUSTER27588_1
acgacaaaatgctcctcgctgcggtttgatcgaggccgcggccccccgaaccctcgcctccccctcccgccgccgtcatggacgacgaccgcgaccacgaccaggaccccgatgcgtcgtcgccggccgcgccgtggcggcggtccgtgaagcggaagctgggcgcggaggcgggggacgaggcgggccccgcggcgcgggtcgaggcggaggacgagcgcgcggcgctgcgggaggcagcggcggcggcccagtccacggcgtcggcgctgcgggtcgaggtcgaggaggagcgactcgccgcggccagcgccgccagcgaggccatggccatgatgctccgcctgcagcgcgacaaggccgaggtccagatggagctccgccagttccgccgtttcgccgacgagaagatggcgctcgacgcctccgaaatcgaccagctccgcgcgctcctcgcccagcgcgcgcgtcgcctgctgcgcctgcgctccaggctccgcgagtacaggctgcagtgcctccacctcggcatcccgcttcccgagggcgaggacctcgtcgcccagaacgccgccgaggaggaggaggaggaggacctcctcctgctcgagggcgaggagggctacgtcgttggcgatggagggtactactaccctgagctccgctgcaacgacggggagtactactacgaggacgggcgggaggaagaggacgcggttgccctcgatctggagcgccggatctgcctcctcgagcacgatcaggaacctcgcctgcttgagccaccacatgagaaagaggaaggtacccacctttacacagatgaagtgttgccggacatgtctgaacatgaactgggtggcctctatgccgacgagatgttatctaaggaggatgtggaagcaaggaacaacctccacaatgatgatgaagaactgccagagtctcctactgctggacatgatgacggggaggaagcaagcaatgctgacggtgctgacagtgtaagtggcagtggcagtggcagtgatagggtatacactattgataaggtgcatcaaggtgcagcaatgcctattgcaagggtcgtggataagtaccaaggggaggcagtggagccggacattaagaagctttacatgaggctggaggcactggaggcagatagggagtcgatgaggcaggcccttgtggcaatgcgcacagagaaggcacaacttgtgcttcttcgtgagattgcgcagcagcttgccaaagatggagttccagttgggccgggagctggggcggggccaggtgtacaccatttgcctagaaaacacacagttgggattgtagaaaggagattcacagaggacaagaaggcgatacttgtgaagacattttccatggctgccttgtttaagtggatcctcgctttattgggcaagaaaaagaagctatctcaaagcaggtatacttttggcttaacaaataataatgttggtttgctcatactcttggataagtgcccacggatccagaaaaccctcacaagaacaaagttaaaccttgccgaaagaagcagcagcagcagcagcagcagctgtacaatgtaaatagatagctttcagttgggaatattgcatttcttttgttaatgttgggtggagcgaaagttcttttgattctttagttgatgattttccgatttcccatcttttggtgatgaggattttatgcgttggtcttgcaattgttaagtcacaaaatcgctttcgctttctttctcaccaggaagaactacaatgcatgtatagtgcgcttgtaaatacactggtttggtttgcttgctgccttgcttccaggttgagtaaatatttatgaatgttagtgcaaactctaaacttttgtgaaaaaatgtccttgtattcaaattaaatctgtttatgcttgtatgctcagtttttttggactggcaaaaaaaaaaaaaaaaaaaagcggcctaccggttaaggacttctcagtagccccccc

SEQ ID NO: 2269 - DNA, 773 bp, Zea mays
  Clone ID: ZEAMA-23APR03-CLUSTER27602_2
gagagagacccactttgaactttgatttgaagagtaacagtactagtacatagtagtaggttgcagcaacgcttcgcggatctgcgcagatcgggcacatcccggagcggccgccgcggtggacaatgggagggaggggtagggcgcctcataaaaccagcagatccctgcccctcctgctccacgacgacgacgacgacgacaatgggggagtggaaacaaagacatccccgaaaatgaaggcgaaaccagtatacacaaaagcggcggagctctagatctacggaggcagccagccggccggccggccggtttaggcggagcgggcaaggcgtgaggcgatggcggagtggtacatggcgtcgtggaaggactccgtctgcgccatccgcgcccgcagctggcgggccttctcctccgtcagtccccccacgaactgcctgcgcgccgcggccgcgtcgtcgtcctgcggcaccaccggggccggggccggggcctcaaggtagtcggccttccccgaccaccccagtagtggtgcccaccacctgccaccctccgccgccgccgcagcggcgcggatcacggcggcgcgcggccggacagcggaaggggcccgcactgggcgggcggggaaggaggagacggaggcgggtgcgcacggtgccatcgccattccggtcgggctgggacgcttcggtggggtcgctttggggcgctgggttttgcgatgagacggcgagattattgctgattgctttttcgattaggatgtt

SEQ ID NO: 2270 - DNA, 1999 bp, Zea mays
  Clone ID: ZEAMA-23APR03-CLUSTER27647_2
aattcctgtctgtgcgcgcgcgcgcgtggcgccggccgagcggccgttgacccgatgaccggcgcggcggccgtcgatcccccggtgcctcggccgcggcggctcacggtcctcccgctcatcgcgctcatcttctacgacgtctcgggaggccccttcggcatcgaggactcggtccgcacgggcggcggcgcgctgctcccgatccttggcttcatcgtcctcccagtcctctggtcgctcccggaggcgctggtcacggccgagctcgcatcggctttccccaccaacgccgggtacgtggcctgggtgtccgccgccttcggccccgccgtggcgttcctcgtcgggttctccaagtgggcgtcggggacgctcgacaacgcgctctacccggtgctgttcctcgactacctccgctccggcggcgggctggcgctgccgccgccggcccgctcgctggcggtcctcgcgctcacggccgcgctcacctacctcaactaccgggggctccacatcgtcggcctctcggcgctggcgctcaccgcgttctcgctctccccgttcctcgcgctcaccgtgctcgcggcccccaagatccgcccgtcccgctggctcgccatcgacgcccgcgccgtcgacctcaggggctacttcaactccatgttctggaacctcaacttctgggacaaggccagcacgctcgccggcgaggtcgaggaccccaggaagacgttccccaaggcggtgttcggcgccgtcgggctcgtcgtcggcgcgtacctcattccgctgctggctggtaccggtgcgctgcgtcggagacggcggccgagtggaccgacggcttcttctccgaggtcgggcagcggatcggcgggccgtggctgcgcgtgtggatccaggccgccgccgccatgtccaacatggggctcttcgaggccgagatgagcagcgactccttccagcttctcggcatggccgagatgggcatgatccctgccatcttcgctcgcaggtccaagtacgggacgccgacgttcagcatcctgtgctcggcgaccggggttgtgatcctgtccttcatgagcttccaggagatcatcgagttcctcaacttcctctacgggctgggcatgctggccgtgttcgctgccttcgtgaagctgcgcgtgaagaacccggacctggcgcggccgtaccgggtccccgtcggcaccgcgggggccgccgccatgtgcgccccgcccgccgtgctcatcgccaccgtcatgtgcctagcgtcggccaggaccgtcctcatcaacgccgccgtggtcgtcgccggcgtcgcgctgtactacgtcgtggagcaggccaagaggcgcccgtgggccgagttcttggcgcccgtgccgcccgctgacagctcccacggaccagccacggcgcctgatgacgccgacgccgccgacctcgaggatgtccgcgccgggctgctcgccggcgagccggccgacgaagaaggcagcaaggtcgagtactcaagactggagattcgtgcatgaacccgtttgccgttctgtgtacagtaattccagcgaatacatggcgaatcattgtgtgaaattcagaggaggaggtcaggtgatcgatcgcgctcacaagaagattcagaactgcaaaccgactactagataagtctgaaccatgaatcggagaagtgagaacagatctcaaattgtagaagctgtttttgttttgaccttttaagtgtagtgtgatgccaggcgaggtggtgccggtttgagaagaagctgtatttttccagcaagggggtcagataggttgtactgtacttgcattgagtcaacttgataattcagtaaagtaaccagcatagaaaatctgtgtcgtaactacgcagaaatgtgatcgtttgattaggcggatagttcgtctgataacagagtgtcgtttgacttggtatggctgtttcctgccagtgccagattatctc

SEQ ID NO: 2271 - DNA, 2428 bp, Zea mays
  Clone ID: ZEAMA-23APR03-CLUSTER2766_1
ggagaattggctggaaatagtaaaaatcgtctcatcgagagctgagcttaaacagggacatacaatgatcttaataaatacagtctgttcaatttgatggacggacagagatcaatccttcgttccagcgaccatgggaaggatcgtagcgatgacatgaccaaataatcaagagaacgcctcccaaaccaaaaccatcccggtccccgcgcgttcgatcttagctgcagagagggcagggcacgagtccgttctcgttgcacgcggagcacggcacgcggccggcgccggcgctggcgtcatggagccaatgactgccgccgcacgcgccgcacaccacgaaccacgcgccgccgcagaccgcgcacgggccctcccctgcgccgcgccacgccgcgcgccggagcacgggccggagctgggaccgctcgtgcagcgccacgacctcgtcggcgccgccgaggtaccggccgtccacgaacagccgcggcggcacggggaacgcgccgccgccgtcctccccccgctcgcagagaagcagcgcccggagctcctccctgtagggcgcgagctgctgaaggcgctgtccaaggacgcggaggccgtgcgggcgcgccttcgccgccgagcccgcgcctcccgccagtccgcgcacaacgtcctcgccctcgccgccgcgctcgagattgttgccgttggatacgccatcatgaccacgagatcgccggacatcagctggcagatgagggcagtcagggtgctacccatgttcttggttcctgctctagctgctctcatctactcgaccattacaaacctcacgaaaatgcttgacaacagagaccaacaaactcttgaaaagctacgaactgaaaggcaagccaagattgatgaattgaaggagagaacaaattactacactactcagcaacttatacagagatatgatcttgacccagctgcaaaggcggcagcggcaacagttttggcatcaaagttgggtgcggattctggactgagagtctttttgggagatgaaacaagcagggatgcagcaataggtagaagtaatgataacaatcttggaccaactactggacttaggcaaagaaaaggacacgtaaccaatggtgctggaagggcccaatcccttgagccatttgatggctccaatgtgtatgatggcagtgatgaaggccccagccctcctaatcagactgttgagcactttagaggtccatcgggtaatgatggggggtggcttgcacgagtagcagctctgcttgtaggagaggatccaacacagtgctacgctctaatctgtggcaactgccatatgcataacggtcttgcgaggaaagaggactttgccttcgtcacgtactactgccctcactgtaatgccctcaatggatcccggcaacatgatgaccatgaattggtacctgattctggcaaggagagtcctgattctcaatctggcggaatcattggccaagctggtgcaagccttgcaacctcaggtgctgcgagtcctgttgcaagcagcctaccaacccttgaagaactctctgcagaggaagattctggggagaaggcgagcagtgaccaacctgccaattgaactcatcatttcctgtatattgtgttctttgtggagtattgttttggatttgactctgggtatcgaaatttttgtacctaccatgtagtatatatccgggcgggcaccgccgctcgaacgcatccagggggtccgcgacgcccggcccacctccgccgccagggacgccgtccccgtcgtcgacgtcgacgtcgcggcgcctggccgcgtccagggcctgcgcgtaggcgtcgacggcgcggcggaaggcggcgaggaggtccgggtcgaagagcgtcgccgaggcgaggtccggccggcggtagcgcgtggcgccatcggcgcgctgctcctccccgaggcccgggcttctgtcgtggtggtccgagctgagcttcatcttcttggccttgcgcggggtggcgcctggcgagacgttctccttgtcgtcatcgcctccgccgccgggcacctcgggcgcggcccgcgcttcatcgcccagcggcgccggttcctggaggcggacgcacggcgccgcgggcggctgaggcgaggggccggcgccgggagggagcggcgcgaggatgaggttgggcgactgcgcgggagcggcggtggggaaggactgcaaggtcctgaggatcctcgatctgagccctcccatttctcctgtcatccgtccgaccatccactcccctctcagtgagagttctctcctcactctcgctctgtggtgtgatcgccactcggattacttctctgtgcattattttctgttgctagattattttttcgattaggatgttctaggtaatggtctcgtgc

SEQ ID NO: 2272 - DNA, 819 bp, Zea mays
  Clone ID: ZEAMA-23APR03-CLUSTER2771_2
aagagtttcctcctccactccctcccccccgcctccactaccccactcccaggagccgcccaggtacgtcgccggcggcgatgacgacgcgcttcaagaagaaccgcaagaagcgcggccacgtgtccgccgggcacggccgcatcggcaagcaccggaagcatcccggagcgcgcggtaaggccggtgggggtgggagtggaggcggaggatctggtggaggcggcagcagcggtggaggcggcggatctggtggtggtggaagcggtggcggcggcggatctggcggcgggccgacgagcggtcgttgccccgtggacgcgctgaagctgggcgtgtgcgccaacttgctgaacgggctgatcaacgcgaccctggggacgccgcccaggacgccgtgctgcacgctgatccaggggctggcggacctggaggcggcggtgtgcctctgcaccgtcctcagggccaacgtcctgggcatcaacctcaacctgcccatcaacctcagcctcctcgtcaactactgcggcaggcgcgtcccctcgggcttccagtgcttctgatcacgcccatcgatccatctgcaggctaaataatttgtccaagctagtatatatacgtacgtacgttgatatatatgatgtagtattatatatatgtccatgcatgcaatgcatctcgtcgtccatcgcatgttgttgtcgttgttgtgtgtgttttcgatgatcctgtctctgttataaatatcattattattacagtaaaaaaaaaaaaaaaaaaattgaaaaaaccacaaagggcggccgccaccgcggtgga

SEQ ID NO: 2273 - DNA, 617 bp, Zea mays
  Clone ID: ZEAMA-23APR03-CLUSTER2774_8
aggcagggggagagaaaatggcgtatttgtcccgcacagccgccgccgtcgccgtcgccgtgaggtcggcggtccgctccgcacctctcactggccgcgtcctcggagcgccactgccttcccttgcctcgccttccgctgcccggtccgcccgaatcctccgcaggacggcggccgcggcgtcggcggggctggagactctaatgccgctgcacagcgcggtggcggccgcgcggcttaggtcctgcatcgccgtcgactcctcgtgctggagctcgctctcgcaaggtttaaacaagcgcatctgatcatggctaggagctgagcacagaagagaagtgaggacaacgagttagaacgaagtcatctcttttgcagatatttgtaacatgtactactttggttgttgctctatgtgtttgctcatgtcttcaatggagcatgcaaaatagttccttgtaacttgcttggctcttattttcagtttggtcatgagctatgctgaaggaaaaaacttgtacttgtaataaaaaaacacttcagttttttctttaggtgtgcaaaattcccccctttgaaaaaatggcagcaaatggtattacatcttgtatcccccc

SEQ ID NO: 2274 - DNA, 1348 bp, Zea mays
  Clone ID: ZEAMA-23APR03-CLUSTER27761_1
agattcacgctgttttgctccggcatgtcagcatgtgacgaggacgccaccatcctctgcacctcaaaagtgagagcgagagccccccctcaacatcactgacaccaccaaagctcgggacagcagaggaagcggagcagagctttgtgggagcgtcaatggcaggaacttatcactgacaccaccaaagcacgggaaagcagaggaagcggagcagagctttgtgggagcgtcaatggcaggaacttgggtgaagatggagcagaagggcgccggtccgggagcacggagctcccacgccatcacgctgctcgggggcacggcctactcgttcggcggcgagctcaccccgcgcgtcccggttgacagcaccatgtacgccttcgacctcaacacccagacgtggtcggcgctggacgcgacgggcgacgtgccgccgccgcgcgtgggcgtgaccatggcggccgcaggcggcacggtgttcacgttcggcgggcgcgacctggagcacaaggagctgaacgagctctacgccttcgacgcggcgacccgggcgtggacactgctgtcgtgggtgcggcgacgccggccgcctcaacgacctgtgggcgtacgatgtggcggcggggcaatgggagcagctgccgccgccgggggaggcgtgccagccgcgcggcgggcccgggctggtcgtcgccggcgggaaggtgtgggtggtgtacgggttctcgggcgacgagctggacgacgtgcactgctacgacccggccacccgggagtgggccgcggtccagaccacgggcgacaggcccagcccccggagcgtgttctgcgccgccgggttcgggaggcacgtggtgatgttcggcggcgaggtggaccccagtgacctcggccacctcggcgccggcaagttctcggccgaggcgttcgcgctggacacggagaccggcgcatggacgcggctggacgacagggcggaggccgagcaccacccggggcctcgcgggtggtgtgcgttcacggcgggggagaaggacggccagcgagggctgctggtgtatggcggcaactcgccgacgaacgaccggctcggcgacatctacttcttcacgcccgttcttgaggccacaagctagcgcgtgtgacgaactggctggcaatgtgtagcagttcaatctgcatgtgcagggcttgtatgttgtgaattgtgatcatcgtcttgtgtcgtagttgagtttcctggtttgtttttcttaacttccgtcgtttttttggatttttatatgctgtgtgatttgagaataatcatggtaaaacttaaatcccagcaaaaaaaaaaaaaaaa

SEQ ID NO: 2275 - DNA, 1612 bp, Zea mays
  Clone ID: ZEAMA-23APR03-CLUSTER2780_1
gctctatgcgatctcatctcatctctgtgccacagccagtcgaatctcacagccacggtgtggacctccttttcgtctccactcttcctgttcctctccttttatttatcccgaaattccactttactatactgtactgtagtactgcaaaaagatctcaaagccgaagcaaacaaatctctcgtgcttagccctagctagctactggtccttttcttctcctctcccgtcttcgttactcggatcacgaaatctatagctactaattactggcgatggaggatctctcggatcttggaggccacggccacccgggtgctgctgcctggcggcccgcggcgccatcattggcgtcctcttccaaggtctcggtgcaagtctacaccgtcccaagctcagctgctaccggccgtgaagcccgaggtcaaggtgttgcaccaatgatgcatgcgtctagcgtcgctggccatggcggccgcgctgctgatctagaccccgtcaaggccaagatcgtctcccaccctagctaccaccgcctgctcgccgccttcttggactgccacaaggtcggctgcccgccggaagcggccgaggagatcgcggcggtggcgcgggagcgcgaggcgtggcagcgtgcagccgcgggcgacgtcgcgcacacaaggccggacccggagctcgaccagttcatggagtcctactgcgagctgcttgtgacgtggaaggaggagctgacccggccgctccgggaggcggaggagttcctgacgacagtggaggcgcagctcaactccattaccaacaccgggccaaccatgggagctttcatctcttcagctgcagctgcagataaaactggagtcgtcgatatgtccgacgatgaacaagaagaaggcagcggcatggaggcagaagtagccctgggcatcgatccttgctccgatgacaaggagctcaagaagcagctcctcaggaaatacagcgggtgtttgggcaacctgagaaaggagctgtgcaagaagaggaagaaagacaagctccccaaggaggcccggcagaagctgctcagttggtgggagctgcactaccgatggccctacccctcggagatggagaagatcgcactggcggagtcgacggggctggagcagaagcagatcaacaactggttcatcaaccagcggaagcggcactggaagccgtcggaggagatgcagttcgcggtgatggatgggttccacccggccccgcccaacgccgccgcgttctacgtcgacgcacgcctcgtgggagcaacgccggcgatgttctacgcccggccggatcatggggctcatcatggcctctggcacaattgattcagcccacgcacgctaccatgaagtattgaagtgtgcgcctgaaaacctgcatgcatgccgtagcttaattagcctataaatatgaatgatctgcacaatgaactggagatcgagaaagaaccctactgcattactgtacccccgttgttgcaccaagaaactttacatgtcatgaacagcaaagactgtgcctccttaatgctacaggtttgcggcattttgcataaaaaaaaacaaaaaaaaaaaaaaaa

SEQ ID NO: 2276 - DNA, 1300 bp, Zea mays
  Clone ID: ZEAMA-23APR03-CLUSTER2783_2
gtctcccggcgcctgttccccgcggcaccgcggctacacataccctctccccatcccatttcccagatcccaccaacgcagcgcagggatcgagtagcccaccaccccaccccgcgacgctaaccgacgcaatggcgacgctcaccgttccttcctccgtcccggccgtcgccgaggactgcgagcagctccacaaggccttcgaaggttggggcaccaacgagaaactgatcatctccatcctggcccaccgcaacgccgcgcaggcccgcgcgatccgccgcggctatgccgaggcctacgggaaggagctgctccgcgctctcggcgacgagatccacggcaagttcgagagggcggtgatcctgtggacgctggaccccgcggagagggacgcggtgctggcgaacgaggaggcgaagaagagccaccccggcggccgcgcgctggtggagatcgcgtgcgcgcgcacgcccgcgcagctctttgcggtcaagcaggcgtaccatgaccggtttaagcgatcgctcgaggaggacgttgccgcgcatgtcaccggcgacttccgaaagcttttagtgcctcttgttagtgcgtaccgctatgatggcccagaggtgaacacatctttggctcattctgaagccaaaatacttcatgagaagatccataagaaggcttacagtgatgaggagatcattagaattctcaccacacggagcaaagctcagctacttgcaacattcaatagctacaaggatcagttcactcatgcaatcaacaaggatctgaaagctgaccccaaggatgagtttctttcaacactgcgggcgatcatccggtgcttcacctgccctgacagatacttcgagaaagtcattcgactggctcttggaggcatgggcactgatgaggatgacctcaccagggtcgtaactactcgcgccgaggtcgacctgaagctgataaaggaggcttatcagaagagaaacagtgtgccgctggagcgtgctgtggccaaagatacaactagagattatgaggatattatgcttgccctccttggggcggagtgaggaggcgtgcctcaactcgatctcatctgctcctacttgtttgatggggccaaaaaactgcatcgacgtggtatccacatggccgtggttttgaataataataaatttgtaacacgtagcctgcattagcagcgcgttttaaataaaggaacttcctgataaaaaaaaaaaaaaaaaaaaaaaaaaaaaaacgcccacgggggcgcggaccggtaccgacccgg

SEQ ID NO: 2277 - DNA, 1164 bp, Zea mays
  Clone ID: ZEAMA-23APR03-CLUSTER27949_2
ctgttaccacagtcttcttgcgggccagaaacgcgaatcacgatggttccaggaatcgccaccaagacggcggcgcgaccggtggcctgggcacctcagcctcggaacatgttcgtgttcggcgcaggtttcgtcggccgctacgtctcggagcgcctcctcgcgcagggctggcaggtctccgggacgtgcaccactgtcaccacgaagagggagctagagatgctgggcatgaatgcttccgttttcgatggcacagaggacagcctggaaaatattcacagtttacgacaagcaactcacttgctcatctccatcccacccatccctggagttggtgatcctctacttattaatttagatgaagatctgaggagaatactcggccatggtaatcttgaatggctatgctacctttcgtcaacaagtgtgtatggtgattgtggtggtgtattggttgatgaggatcatacagtaaacccaaagagcgagtctgccaaattaagatataacgcagaaaaaggatggctgaatcttattgatgatccaaaactgtcagcttttgtattccgtttaggtggaatatatgggcctggaagaagtgctttggacaccttagcgaagagcaaatctttgtcacggaaacagaagttgcgagaatctaagcaatatactgcacgaatccacgtggctgacatctaccaggctgtcttggctagcatgagcatcagatgtgcaaggaaaatatttaatgtggtggatgacgaccctgccccaagagctgaagtttttgcgtttgctacgagtttgatacagaggagatatcctgatatgataactgaaaccattgatgccaagcctgcaggcttagattatcaagagatgatcgtacctgcagagaaacgggtttctaatgctcggatgaagcaggaacttggtgttaatctgcttcatccaacttatagatctggtctgcagagtatccttgatgcttggcaaattcagcctccacttcccaatacaagtcaatgatgatttagttttgaaaggcatataggtgtatgtaagtgtatttgtgcttgatttggttcagatatactacctccgttctaatatttgtataaaaaagaacggagcgaataataatttagtgacgttgtagct

SEQ ID NO: 2278 - DNA, 1812 bp, Zea mays
  Clone ID: ZEAMA-23APR03-CLUSTER27960_2
aactttggttagtttaactgccgcatctaccattccaccccccatttgccctcagcagagcttccccttcctcactgtggtggcttggtggggggatccgcgcctcccccatcgctggccagctcatggcgcccccgccgccggaggatctccaatgcgccgtgaacgtcaagtgcgccgcgccgccggcgctggccgcgggggacggcgagctccggtggctgcggcggtgcgtggaggcggcagcgaagggcttcgccatcggcgcaggcctcaagggcggcctcgcgctcttctccgtcctcgtccgcatccgcagccgccgctcccccagatcgaggaaggccggagctatgaccaacgaggaggccgtggtgctcgcggtcaaggagactgtgaggtatggcttgttcttggggacctttgccggcagctacgtctccgtcgatgagtacatcgccgccgtctggggacgtaagagaacagcaaggtggacgtcatttttagctgggttgattgctggtccttctatgctcctgacaggaccaggaactcagcatactagcttggctatatacattctgatgcgtgcagcagtgcttgcatcccgttgtggaataaagagcaagcgttttggaaagatctgtaaacctttgacttggtcacatggtgatgtcttccttatgtgcctctcatctgcacaaattttgtcagcatacattttaaagcaggacagtttgccatcatcatataaatcatttctaaacaagcatggtggaaaagatcttactattttgcaaggtgtgaaggatgtagtcaaccacactgctttcagtaacttagtgggttcgagaagtactacaaatctgttggtgttgacataaagctagatccaaacatgaaagtgccttgctcaattgtgcatggtaaccagtcatgtacaggacatgtcttttcattcttgttacaagcatatggaagagcagttcctgtatatgttccagtctacttagtccctgcacttgtagttcataggcagcatctcatgaaaaggccttactcaattatagggaagagttttctaggagtagcaagatctagtctgtttctctcagtatactgtgcatctgcatgggcttggacctgcctgctttttaggatcttccggagagccaatacccctcttgtcatccttggcacgtttccaacaggtctggctttgctcgtcgagaagaagagcaggaggattgagatatccctgtactgtcttgccagagctatcgagagttttttcacatggatgaccgatgcaggactctgccctccaatacttcagataaagcgagctgatgtggttgtgttcagcatagctacctctatcattatgcactgctatgcgcaggaaagagaagtcttccggtccaagtacctgaatgtgctggactgggtatttggtgtgccgccaccacccgacagtgaggataagaactgctatctaccagatgaagccaagaaatgccagtgacatactggcttgtagagttcattgcatgatttttgtatggtcacccatgtgatcctagcgcgagactagacccattagagggtttagtgaacgaaccttgtacaggactcttcggaaaatcgggactttagtggatatagcaagatagattttttaattaattgatttgtccaaacgatgccctggtcattaaatgaccatatgtggttgtaacttatgacctttattgttgttgttgtcatgcgaatataacttatggtccttgaaattgtttaaatggaatttct

SEQ ID NO: 2279 - DNA, 2477 bp, Zea mays
  Clone ID: ZEAMA-23APR03-CLUSTER27999_1
aaacacaaatggcgtattggcgttccacagaacaatggcacggtgtctatgggtaggcaagaacgcagccgctagcggcgctggcgcggccattcccaaacctccggctccccatcccccggcaccgcgatctctgccggccgtggacgactgcccgactctcgcattcctgcggccgaagccgaccgcggtcgggtacgccaccgcgaccgtcccgctcccggcgcactgcttccccgccctccccgtcggcgaccacctcttccaccgcctccagctcgacgggcttatacctcccgtgagcacggcgacgcggccgccggagcatgcgggcgtgacggtggagcaggcgaggaaggtggcgagggcggccgagatggaggtggcgagggcgaggctgaggtcgaacgcccagagcgtcgtgtccgggtcggaattcgccgcgctctgcgtcgacattgccggcggcgtcgagggaggccagccggctggtccgtgcgctggacgagtccggcgtcgtcatcgtcctcggcgacgccgtcttcctccgccccgacatgaaatcgggatcttgcgacgataaatcggagcgaacggcgatactggaacaaacggaaagagagagagcaaaggaaagaaaaaaagaaacagcggcggcggcacgagtcgagggccgccagaacctaggcatgcgccgccgacagcaaggtagcgaaggccatcgggagcatcctccccgggaaacaaaacacaaatggcgtattggcgttccacagaacaatggcacggtgtctatgggtaggcaagaacgcagccgctagcggcgctggcgcggccattcccaaacctccggctccccatcccccggcaccgcgatctctgccggccgtggacgactgcccgactctcgcattcctgcggccgaagccgaccgcggtcgggtacgccaccgcgaccgtcccgctcccggcgcactgcttccccgccctccccgtcggcgaccacctcttccaccgcctccagctcgacgggcttatacctcccgtgagcacggcgacgcggccgccggagcatgcgggcgtgacggtggagcaggccaggaaggtggcgagggcggccgagatggaggtggcgagggggaggctgaggtccaacgcccagcgcgtcgtgtcccggccggaattcgccgggctctgcctcgacattgccgcgggccgggaggggagcccccgcgatgctccgtaagcgcgacgagtccggcgccgggatcctccgcggcgggggcgtcttgctcagacccgatatgcaatcgggctctggcggaccgacttcctaacgcccgacgaggccgtgacggccatcgagagagcgagccaagtgaggcaagaagcagccgccgccgccgcagaaatcgacgccgcgaaggacgaggacctgaggcccctgcagccgggtaacgcgggccctcacgcgcgtccgccccgggaagcggcacgtgcaggggcctcgaggctgagacgggagggaagcgagcaagcgcgagttgggggctatggcgcccagaaggcggcgtgcgacgcggacgcggccgcgcaggtgcggcgcgagcttggtgccggctgggcctgctggcgccgcgctggaggctatggaagctgagaaggcggagatcgacccggcggcggcggcgcgggtgcggcgggagctgtggtgcgggctgacgtacctggtgatccagacggccgggttcatgcggctcaccttctgggagctgtcgtgggacgtgatggagcccatctgcttctacgtcacgtccatgtacttcatggccggctacgccttcttcctccgcaccaagaaggagccgtcgttcgaaggcttcttcgagagccggttcgcggccaagcagaagcgcgtgatgcgcgcccggggcttcgacctccgcaggtacgaggagctccggagagcctgcggcgtggcggccgccgccgctccaggcccggaccccctgcgcgagcgcgggcgcggcgcgggagagcggccattgccactcctactgccattgccattgatcttggcctcgctcggttcattcctttcttttttttttctttgttgttcatgcccatttggtggggatgatgattcgtgtatccatctgatgcgcgcgcggatgcaaaaaaaaaaaagcatactgaattgaggtttaaacttggaaccagggcttaagccatgtccacaaaaaaaaaaaaaagggccaggggcaggggctcgttcccctcgccgaccccgacgcgtgtaggcacgtcagccatgtacaatagcgcgtcgctccgcccggacgaggtcgcttgggataaacgtgcgtcgcatcgtcggctcaccgtctaatcgtgaagcaatagctctctgtacagattcaggaggacgagccattgtagaagaaggctcgtcagaacggaaactatatctatact

SEQ ID NO: 2280 - DNA, 1790 bp, Zea mays
  Clone ID: ZEAMA-23APR03-CLUSTER27_8
ggggtggacgaggcgcgccaccggccgagccgaatcgagctgcagaaaccaccttggcatggcgacacaggccgctttcctcgcggggttctcgcagctcgccgcgcagccgggccgtgaccgcgccgtggcggtggcggtggcgccggcgccgggcccggcccgggtggccgttgcggcggtgggtagcgccaagttgggcgtgaaggcggggacgtccaggaccgcggcggtggcgcgcctcggggtgcggtgccgggccagcctgatcgagcccgacggcgggcggctggtggacctggtggcgcccgaggagggcgggcggcgcgcggcgcttcggcgggaggcggcggagctgccgcaccggctgcgcctcggccgcgtcgacaaggaatgggtccacgtcctcagcgaagggtgggcgagtccgctgcaagggttcatgcgcgacgatgagttcctccaaacacttcactttaatgccatccgcggccaggatggcaggatggtcaacatgtccgtccccatcgtgctctccgtaggggacgcacagcgaagggccatccaggccgacggcgccacgcgcgtcgccgtcgtcgacgaacgcgaccgccccatcgccgtcctcagcgacattgagatctataagcataataaggaagaaagaatagcacggacatgggggacaactgcacctggattaccttatgttgaggaggcaattaccaatgctggtgactggttgattggtggggacttggaggttatagaaccaatcaagtacaatgatggtctagatcagtatcgcctgtctccagcacagctgcgtgaagagtttgccaggcgcaatgctgatgcagtatttgcctttcagcttcgcaatccagtacacaatgggcatgctcttcttatgaccgacacacgcaaacgtctccttgagatgggttacaaaaaccctgttcttctgccccatccactgggaggattcacaaaagcagatgatgtgcctcttagttggagaatgaagcaacatgagaaggttcttgaggaaggtgtcctcaacccagaatcaactgttgttgcgatctttccctctccaatgcattatgctgggccaactgaggtgcagtggcatgctaaggctcgtattaatgctggtgcaaatttctatattgttggaagggatcctgctggtatgagccatcccacggagaaaagggacctctatgatgctgaccacgggaagaaggttttgagcatggctcctggcctcgagaggctcaacatccttcctttcaaggtggctgcatatgacacaaagcaaaagaaaatggatttctttgatccatcaaggaaagatgatttcctcttcatctctggcacaaagatgcgcactcttgccaagaaccgagagagtcccccagatggttttatgtgcccgggtggctggaaggtactcgttgaatactatgacagcttggtgccatctgagggcagcagcaagctgcgtgaaccaattgcagcctaaatctggaaaatccttcatataaggaatgctactatatcttagcaagcggttctttgcgacatagaaccgatgctatgtgattgtatactggctgtaagactttaaaacactaggcttgattcggatgttaatgtgtgctttgtacccggtgtaccttctctgctggcagtgttgcacatgcactggagcacatcaaacgtttggtgttaataaggacaggctatgtatcctctgccagatgtacatatatacattgtggtgt

SEQ ID NO: 2281 - DNA, 793 bp, Zea mays
  unsure (1)..(793): unsure at all n locations
  Clone ID: ZEAMA-23APR03-CLUSTER28056_2
caccacaccgcgacggccgccccgtcgtcggcgccgtccaagggcaagtcgtcggcgccgaaccctagcggcaaccacgctgcgacgccggcgccatcggggacgccttcaaagggcaagtcggcggcagcgcaggccgcggctttgggccacggttcctcctcccaccaccactctgccggcggtggcggtgatgncactaacgcgtccgccaccaccctcaagcgcaagcgcggcgtcttccagaaagacctgcaacacatgatgtatggctttggggatgatccaaatccacttccagaaaccgttgcacttgtggaagacattgttgtggaatatgtcactgacctggtgcacaaggcgcagaacgttgcctcaaagagggggaagctcctgacagaggattttctttatcttatacgcaaggatttacggaaactgcaccgtgctactgaactactgtccatgaatgaagagctcaagcaagcaaggaaagcttttgacgtggatgaagagacgctggctacgactaacatatgatgttttcctagtcgtagaatctgcgtgttactgtaaccagttgtacaatgcactgcatgtgtcggacaattgtttggtgtcgacttgtaactgttccgctacagactttatctattttcttgacagttactgcgttaatggctgtatgccctgctgagtgaagaagtcagctggttccacacattcgcaatgtaaaaatgcacagtttttttttttgcttgctttggcggaggagatatttggaagttaaatt

SEQ ID NO: 2282 - DNA, 2178 bp, Zea mays
  unsure (1)..(2178): unsure at all n locations
  Clone ID: ZEAMA-23APR03-CLUSTER28070_1
ctggcgttggcgaagggctctgctgcctccgtccacgaatcggcatccccatcccataccatcgacccacgaatgcccccgactcccgcacggccgccccccgccgtcgccgccggcgagccgtcggcgatgggctagaccagggcctgcctccccatgacgccacctggccgcagagatccgactacgacccatacgcctacgcccgccacagcgccgctgccgcctcctcctactaccagccgcccccaccgggaacggagcatgctgctcccgcggccgccttctcgtcgtggtcgtccgcagtgggatcatcggacagcgtcatagtgggcgggccaggggcggagcctttagccgtccccgcgctgtcgcagcccaccggcttcgccacctcgattgggtggtccgggggcgacgtgggacacctgccgtactacgacccgcagtaccagacggcgcagcatcccacggcggttgggggtggtataggtacactcaacggtctaaggagactgtgttttggctctaagggtgtgggagcttctttggttgagcaggaggcatatctggctggcgcgatgcagcacgtgttgcccgttcttccacaagctggtccaaccatcatggctgctgattatcctgcacaaccggtggctagcaatcggtgctgctagctatggaagacctgtaactttatcactgtgcacagccgttggggaagctgaagtgagcatgtgacaggcatgcctgtatgtgccccgcatgatgtctactgcctcacaggtttcattgcttttcggtgggggcgactggagagcaaccgaattcgtagtagaagtagtactgaacaatatgaatatcagatgaaaccataggactcgtctcccagtctgctggctcgcctgcgcttccggactcctgctatagctgacatgggtgctccatcatcttctcagttagctgaagtagaaggcccctctagttcagtacatatggtcccacctcttggttcaacaagccttagtggggagcacaaagacttggctccagaaaatgtcggagcttcagtttatggggtgcaaattactgaggtgccaggcagttcttccaagcaaaacaaaacacatcatacatcaacagttggtcacagtgttgaagcacaggtagagctgcatgtcgctgttcaagcttgtcagccttcaaatgagatgaaagatggcggtgaagccccaccaaatgcaacaggtccatcaaatgcacaactggtggaagcaaggatgggtgtcaacggcaacaacaatggctcaaagaggaaaccgacaggagctggccgtgggggaaagaagctgagagtgtctgaagccccacggcaaaggcctgagcgagtaagggagcaaccgctagtctgcaccatttgcaacgcgatttgtgatacaagagctgtatttgacatccatctggttggtaaaaagcatcaatcacgactcaagcgttctcaaggcccagacgtgttgttcggtcctttggttgggcatattcctccaaaccagtccgcagctcacatgacaggagcccctgagccactgtattttggctttaagagtatgggagcttctttggttgagcaggaggcatatctggctggcgcgatgcagcacgtgttgcccgttcttccacaagctggtccaaccatcatggctgctgattatcctgcacaaccggtggctagcaatcggtgctgctagcaatggaagacctgtaactgcatcactgtgcacagccgttggggaagctgaagtgagaatgtgacaggcatgcctgtatgtgccccgcatgatgtctactgcctcacaggtttcattgcttttcggtgggggcgactggagagcaaccgaattcgtagtagaagtagtactgaacaatctgaatatcagatgaaaccatagaactcgtctcccagtctgcaaaatgcacaaggcttccgtcgaattgctagtagtactatgatggaacaatttggttgacataggcctgggtgtatgtctgcaaaacgcttttttaaagtcggtctcaacagcgactttttatgatacattgtgttaataactgtgacaaccgaggtcntgggccttcccctggtggaggccgaggtggnagctctctgtctcctcctct

SEQ ID NO: 2283 - DNA, 1962 bp, Zea mays
  unsure (1)..(1962): unsure at all n locations
  Clone ID: ZEAMA-23APR03-CLUSTER28100_1
actgctgcttgtttgttgcggactgtgctgtgtgcacggcagcggcagaatatacaccaccagtacagcatccattccaactaccttccccatccctacccatcatcaccctcaccagtcaccactcgccaccctcgcccgcccccatggtctcgctcgctggctcccagatcccctcgccttcgccggggcagagccccttgcgcggccgcgcgcccgcagcgccgccagggacactccatgcgcaccatccgctccgctctgctgcagccggactcctccccggggtccccgtccccgcgcgatggcggcgccgacgcgggcgactcggacattgagaacctcaccgactccgtcatcgacttccacctccgcgagctcgccgccaccgcggggcccgcgcacccggcggccgtcgccaagtcctcttccgccatcaacgccgccgccacggagctgctcgacctgtcgcgggacttctccgactactccagcttcaactccgacatctccggcgagctcgagcgcctcgctgccgcggcgggggcggcgcccagatccgacgcgccggacgcggccgccgtggatctgaacgacctcgagtccatggatctgtcggcggacgcggcgccgctggagcgcgtggagccgttcgtgctggcgtgcgtgcgggcgctggggcccgacgccgggccggacgcgcggcgcgcggccgcggccaggatacgcctgcttgcgaagcaccgctccgacatccgcgagctgatcggcgtgtcgggcgccatcccggcgctcgtgccgctgctgcggagcaccgaccccgtggcgcaggagagcgcggtcaccgcgctgctcaacctctcgctcgaggagcggaaccggtccgccatcacggccgccggcgccatcaagccgctcgtctacgcgctgcgcaccggcacggcgccggccaagcagaacgccgcgtgcgcgctgctcagcctctcgggcatcgaggagaaccgcgccaccatcggcgcctgcggcgccatcgcgccgctcgtcgcgctgctctccgcgggctccacgcgcggcaagaaggacgcgctcaccacgctctaccgcctctgctccgcgcgcaggaacaaggagcgcgccgtcagcgccggcgccatcgtgccgctcgtgcacctcatcggcgagcgcggcagcgggacgtgcgagaaggccatggtggttctggggagcctcgcgggcatcgccgagggccgtgaagccgtggtggaggctggcgggatccccgccctggttgaggccatcgaggacggccctgccaaggagaaggagttcgccgtggtggcgctgctgcagatgtgctccgattccccgcataaccgtgcgcttcttgtacgcgagggcgccatcccaccgcttgtcgcgctatcgcagtctggctctgcccgtgccaagcacaaggctgagactttgcttggctacctgcgggagcagcgacaaggggttgcctgcagagctggagcagtggcagctactagcttggctaggtaaaaaggcaagagctatggtcgaaatctgctccatttattctctgtgagaggtgttgagagcagatcagcgacgccaggggggcgcatctgtaaataacagctggctctggttggtttggctatgtgtctatgtgaatacacatgtggtttgcgagtgaggatgcttggttggttactaacgtaacgtcagttaagagtcttaagagggaggagggttcaggggtcccaggttatgctattagaagatttgggtggtaatgaagatgatgctggtttgtagctgtgtacagggtgctagggtatgcttgctttgtcttttcaggttatccggaatgttggatcgcctaacaagaaattttttttttttaaaaaaaaaaaaaaaaaaagggggccgctcgcgtnctagaactagcccggg

SEQ ID NO: 2284 - DNA, 1274 bp, Zea mays
  Clone ID: ZEAMA-23APR03-CLUSTER281122_1
caaccaaaccgcatccgcgaaccgacgatccacatctacaggccacagcacagacggagagcggagcagagctggcatggcggccgcgccgtcgcacccgttcgtctacatcgacgcggcggctctccactcgctgctccccttcgcgtcgctgatcccacacctccgcgcgggcctcgcccatccggagctctccgccggcatccagtgcccgcagcgcgtctccatcccgctccccacggcgccgtccgccgcgctcctcctcatgccctcctggtgcgcgcacccgtcgctgccctacctcgcgcttaaggccgtcacctcgttcccgtccaactcgccgcgcctcccgtccgtccacgccgccgtctccctcttcagcgccgccacgggcgcgccgctcgcgtccatcgacggctccgcgctcacgctgctccgcacggccgccgtctcggcactcgccgcctcgctcctcgcctccccgtcccgcccgccctcggtcctcgcgctcgcgggggccggcgcgctcgcgccctacctcgcggaggcgcacctcgcggcgctcccctccgtctcccgggtcctcgtctggaaccgcaccagggccaagtccgcggcgctcgtcgccaagctccgcgaatcgcacccgggcctcaccgtcgaggaggtgggcagcatggacgaggccgtcgccgcggcggacgtcgttagctgcgccacggggtcgcgggagcccatcgtgcgcggggagctgctgcgccccggcgcgcacctggacctggtggggtcgttcacgccggcgatgcgggagtgcgacgacgacgcgctgcgccgcgggcgggtgttcatcgactttgaggcggcgatggaggaggccggggaattggtgggtgcggtccagcgaggcgtgcttcggagggaggacgtggccgggacgctgtcggagctggccgccgggactgtggtgggcccacggagagacgacgagatcaccgtgtttaagtccgttggcaccgccgtggtggatctcttggcggcgcagctggcctacgagactcaccttgccgcaaccaaggatgcttgagctccaccctccaccagcttctagatgatgcggtgtttctttttcttgtccaatcctccgacgagttacaacagaaataaatggatcagctcaatccttatgcattaataatagattccagtgatagtgtacgtactccacatttgttacttgttagtatatatttgtttatgcaaaaaaaaaaaaaaaa

SEQ ID NO: 2285 - DNA, 1145 bp, Zea mays
  Clone ID: ZEAMA-23APR03-CLUSTER281285_1
gcccccacctttaaccaccctgagccatcacagacaagcgtccgctgcgcacacccaggtccttttcatctattctgtgagccgtcaactctcgtacagcatacttgcgcgccgaaccagccgcccatgtcgctccatggtgtcccgagccgcgaccgcggccgcgctgcggtgccacgtccgccgccccggtcccgccttctcccgccccgcctccacgtcggcggccaccgccgagcacctcgcaaacctgaccaacctgagccatcacagagaagcgtccgctgcgcacacccaggtccttttcatctatctgtgagccgtcacaactcgtagtctcgtacagtatacttgcgcgccagccatgtcgtccatggtgtcccgagccgcggccgcggccgcgctgcggtgccacgtccgccgccccggtcccaccttctcccgccccgcctccacgtcggcggccaccgccgagcaccacgcgggccacagtagggccggcggcaggctcccccgcggcgactacgtgccggtgtacgtggcgctgggcctgatcgcgctgtcggtgacgctgggcctgcacacggcgcggcagcagcttgcgtacgcgcccaacgtctgggtggacaagaagaagcgggagacggtgccggaggtggcggcgccggagctggcgctggacgaggccgagcagttcgtggacaggtcgctcttccgcaaggtcgccaacgtgcaggacgaccgcagcctcgccgccggcgtcgctgaccccgtcgccgagtacccgacgaagaaggcggtgacgctcaaggacgtgggcgtggagacgccgggcatcgagcagggcagggagggccttctccacaagatcttcaagaagaaccacgcttagtttaagtgcagcggatgcatgtgtggattgtatatatacttagggtctgtttgggaggcatctatatgttctcggatgaaatgtttcaggttcagatgctcccaataaaaggaaacgttaacgtttgtagtatcagaaataaggtcacttctgagacaaaaaaaaaaaaaaaaatgtgtaccccccccccccccccgggggggggcccggacccatccgcccctagggggagcaattccgggctccccgtgcg

SEQ ID NO: 2286 - DNA, 1646 bp, Zea mays
  Clone ID: ZEAMA-23APR03-CLUSTER28163_1
cacacgacacaacaagtacccaaccactccttgattcccctttcctccctctcgcattcgtctccaccagccggtcggacttcttgcgctccaagaactcggcgaggatggaaatgttttttggcagctttctcagtgaatcagtatcaccgcagaacctttttggacacccagatgtcgagagatgcccattcctgaggaatatcaatggagctacaaccttttccctcgcttctgctttgccagtagctactcaaggaggcaagggtccaatttttgaggaagggtcaggctttgagtcagcattcaagcttttccatggccgagatggaatagttcccctttcagaaagatcatatgtatctgatgaaaaccacaatgagagcattgatgtcaggactgaacctgctctgccgtttaatccattggctgctagagcagccacaataagtctatcagcatttggaccatttggttttggcttcttcaacggcaagggcaaaaggcagaacaagaaacccaacaatctagatcagtcccaccagaagcccaagacaccagatcagtcttccatgaaacaaaaaggagtcaacccaccatcacatgaggcattcagcgatgagtggttggaaaatggccagtgcccacttgcgcggtcttaccgggcaatgagtggtgttttgcccctcgtcgccaaggctttacagccaccagctggtatgaagctgaagtgcccacctgctgtggttgctgtccgagctgcccttgcgcgaactgcgcttgtgaaatccctccgaccacaacccttgccctcaaagatggtagccattgcactactggggatggcagcaaacatccctcttggggtgtggcgggagcacaccaagaagttctctcctcagtggtttgcagctgtccatgccgctgttccgttcattgcaatgctgaggaagtctgttgtgatgcccaggactgcgatggcattcaccatagcagcctccattgttggccagacaattgggtcaagggctgagcgcatccgtctaaggaatcaggcggcaaatggtactggtgattcttcaacgcacactgctatgtatccaaacaagaatgggcattgcagcgacactgaaggcaaggcatgggaccctcttgcgacgaagataacaggctcaactgctaggggttctcctgcaccaaccccaaccgtgtgcttctgattgtgttaagcatgtgattcacgcacacctgtgaagagattatacatgaaccggtttatcttatagtgccatgtaattgccttgtgtgtcccagaaaactgagctgcccgtgtgcgataagtagaataagaggtgctaccccactgtttgctgtgttgctatggtcgagaatcgagattcatgtgtttactgtgttgcaatggtcgagtattgatgtattgatgctgctgcatttctttctttttgttaatgtgtggtggcgtttctcgcttctgtaaagcagctgaagctgtcacatcatttgatcagttgaagctgtatgttaccatgtgtgtgccaattaatgtatggagttatgaaacgcgcccctgggctcggccctgacatgaaccggtttatcttaaaaaaaaaaaaaaaaaccctgaa

SEQ ID NO: 2287 - DNA, 1010 bp, Zea mays
  unsure (1)..(1010): unsure at all n locations
  Clone ID: ZEAMA-23APR03-CLUSTER281697_1
ggtgaacaccactcttgctngcttngtcttcactcgattcttggaatttcttgctgatgcgcgagacgacgacgagatcgtgtttggagcgagctggtgaggtggggatcgagctgggaatgacggttttgatgactcgactgtgaacgacgcgacgacnaacgacgctaaccgcggaatcgacgacgcgattgggaattaaagctgagcgagccgagaggcctcagcaaccagcaggagcagaggacgccgagctggagctgcgcgcgcacagggctgaatccgaaccggcaacaggtagcagggcgcgacatatagattcgaactggggccaaggacacggcgagggaggtctcggcgggctcccacgaagctggggagggctcggcgagcaagaagcaaagcacacgggcgcgacgcagggtgctccggcaagctgcagagcgcgcgtccagggaagaaaccgaactaaatcgagcgcacagggagacagaccgcctggcgcggttggggaaaaggagcggcgttggagcgagcttgaagaaatctccatggcgtgcaggaagttggggtaggggcagggccgagtgccgtcctgggcgaggagccaggataccgcgacagacgtggacgccatggcagctcgtcagggaacgagaggaacattgaagagagagagcacggcagggtatttgaagagtcccagggcggcgccgtgaggagataaacaccgccagccaggatttttgtaagccaaagcggcgcagaggataacgccggcgagctggagggaggagaactattgccgacgtgcggcagaggaagacgctgagcgcagaaaaatccagggccttgggcggcggctcctctcccccgcccgacggacggcggatgagatccgccggggtcttggcctcctgttgtccccttgtcggtggctgtgtttagaaattctttccagagacagcattttctcggaatgaatagaggctggtgtggataaaatcgat

SEQ ID NO: 2288 - DNA, 1638 bp, Zea mays
  Clone ID: ZEAMA-23APR03-CLUSTER28176_3
tatctcatccgtggattggcacctcctgtatctcgagagactgaactgaacgtgctcttaccgtgtttgcagtgacgctgggctccggttcggaccggttttcacgcctccgaaggccgggcaggcaggctgcatccgcggagacgcggagcctccattccccgtctggcttcctcctctggatctagccgacgccgccctcaccctgtcacccaccgacgtcgccgtcgccacctatatcacccaccgcctctgaagaagaagacgcggatccgagggtagttaactgctgaagaagaagagccggtacggagaagacgcggagcagtacgtctccgatctggatgttggtaaggttcatcctgatttgaacggcaagctcactgataacgagttcctgggagggggaagctagacgatttctgttagaggaggaagaagaggatgatgaactcttcttagtacttgtccctgctattctctcggccatgcaagaagagaaaagagccatagtagcatctgctgttgaaccggtgcaaacatgtaccaagagagggcagcgagatcaatgttgctggaccaagtgtgggcagcgagactaatgttgatggactaatgttggatcaagaggcttgtgaagttcagtcaccaccttctgttacgtcagtatatagaagagggaaaaagcagaagaaaagtcaagttgcaagtgttctggatgactatttggagcacaagaagaagcaaacacagaagattgtggaggtgttacttgagaagaagagtcgtgaagaggagtactctatcgagaggtgtctcgacacagttgatgctatggaggagttgacggatgaggagaaggcccttgcagcagaggtgttcaagaatgaattgaatcgggagatgtttgtgatgcaaaaaaaatgtaaacgtgcgactgatttggcttcggaggaagataagtaggattgcatctacctgagagattgacaatgtgcgactgatggttctgtgcaaacataggtatgcctcatttcagtaggtatggctctgttacagctgttctgtattcttaggccctgtttggcacagctgctgcttgttgaaaaagcagcttatctaataagctggtgaaaagcagcttctgcttgttggctgcttttagtgtattctgagaagcagctgaactgataagctgctgcagaagctagctgtttggcagaacttctgcttaaatttgtaaagaagctgaaaataagctgtgccaaacagagccttaataataactgacggcatatgtgttggccttgttaaccataccagatataccttgctctccatctatagtatttatctacttaatgttgtcgcctttgctctccaagtactatttgattctatgtaaaagacagttaatgacatctattgtagctacataaggtatattatgtgcaacattaatatccattagcagaattatttgatgttgctctccaagtactatttgattctatgtaaaagacagttaatgacatctgttgtagctacataaggtctattatgtgcagcattaatatccattagcagaattcttcgcctatgcatcactcctagcagtgtatttgagattagaaagaa

SEQ ID NO: 2289 - DNA, 687 bp, Zea mays
  Clone ID: ZEAMA-23APR03-CLUSTER28193_7
gctccgtctccgcactgtcctgttgcgccggccaccacagtgcagaagaacacacagcatccgcctgcctcgccgccgcaatggccgccgtggcgagatcctttctccggtccagcggctcatcgtccctccgcagcgcggcggccagagccgcctcgcgggccggaccggttccgctgccgaggcggatacccagttctgggccccgggtactcctaagcgtgtgcctggagtccctgatgcccatgcacagcgccacggcttcggcgctcatgacgtcgctactcgctgccccggcttgcaagggattgggttggctatcagaagatggatgatttgtcattattggagacctgcagtgatggtatctggtctggattatgcaatacctcgtgaatttatagtacttggttggcgtctcagttaacatgttttgtgctctgggattccagtttgtatgaaatttacataattcttcctgagatttattttggcccactagctgtcaaaaagactttggtcttgacgaccaggctgatcatgtacatctggaatgaataagcttgattaaaggcttttcacaccttttgcgttttagtctaagcgtagtatgttcaaatgctgattgagcttcaaaattatctcaatccacatggtttcttgaaaaaaaaaaaaaaaaaagcggcc

SEQ ID NO: 2290 - DNA, 639 bp, Zea mays
  unsure (1)..(639): unsure at all n locations
  Clone ID: ZEAMA-23APR03-CLUSTER28193_8
acccggcccagcacaggcgtagggtttattggcatctgtctcctgtcgcgccggccaccacagcgcagaagaacacatcacccgcctgcctcgcngccgcaatggccgccgccgcctccgctgcgagatccttcctccggtccagcggctcatcgtctctccgcagcgcggtggccagagccgcctcgcgtgcgggaccgggaccggctccgctgccgaggcggatgcccacctctgccccccgtgtactcctaaggtcgccggtggaaatgagcagcgtgtgtctggagtccttgatgcccatgcacagcgccacggcttcagcgctcatgacgtcgcttctcgccgccccggcttgcaagggattcggttggctatcagaagatggatgatttgtcgttactggagatctgcagtgatggtatcttgtctggattatggatacctcgtgaatttaaagtacttggttggcgtctcagttaacatgttttgtgctctgggattgcagtttgtatgaaatttgcagaattgatcctgagatttattttggctggttagctgtcaaaaagactttggtcttgacgacttgcctgatcaagtagatctggaatgaataaacttaatagaagggttttctca

SEQ ID NO: 2291 - DNA, 1523 bp, Zea mays
  Clone ID: ZEAMA-23APR03-CLUSTER281_62
tgagcgttttttttttttttttttttttagattggcaatgctgttttccgatctagatcaatgaatcggcggcgaggatgccatgtcacgacctcacgagcgacggagcgaggccaagacccagcctttgggacccgtcgcctcgccgggagaggaacttgcacggcggtttggagcgcgtcaacgggcgaaccgtcgtcgctgcgcttacatgagcgcgtcaacgtgactcaaatgctcccccaccactgttccacgatccattcatgtattgccagataattgttatacaattggcaagggtcgcagacaattacaaaaaaaaaaagtgttggtcgatcgatgagacgatcacggcaggtggtacagttcggacgacggcgtgatccccgcagtgacgacgttgaagtacctgaacgccgccgcccaccggcggttcgtcttgagcgtgtgcacggcgacggtgtcgggcctgaagttgtccatgtcccagctgaggtcgtacatccggggcttgaggtcgtagcggttcctgcccctgccggcgaggttgagccacttgccgaccatgaggtcctcggggcccagggtgtcgttgcgctccaggatctcccgcgcgccggccacccaggccgccacgtcccacgacaccacgtaccccatgccgtgcatgaacggcatcggctgcccgcccatggcgtagccgtagcccaggtacacgtcgtggcggggcttgccccgcagctcgcccgccagcgccgccacgcgcaggtacgtgtcgtcgtcggccttcatcacgtagtcgtacggctccgccgcgaagaggcgcggcaccgacgacaggtacgcgtacgtcttgccgtcgttcatgttctcggcgcagccgtccagcaccaggacgtccccgtgccgcctcgcctccaccgccagcagcgccgcgtccacggggtccgtcacgcggcagaacacgaagcgcacgtccacgcgcgcgccctccgcggccggctgcagcgcgtacgccgtgcgcacgatgtcgcgccgctcccgccggcccggcacggtcagcacgcccaccagtaggctgaactccgccgcccgtgtcgtctggcccggtggcggcgccggcgcgtcggcggcgacgtcgacgaagccgccggtgcggcgggcgcagaggatgccgaggccgtcggagtcggagcctacgcgggaccaagggcggagcgacggtagcacgaagacgagcaggaggatcgcgagcggggccaggaggaggtaggaggtggcggtggacgacgcgggcggcttcattgtcgtgggctcgtggccggggctggcctggctaaacgcggaagcgtgagagcagctggtgctttattgttcgctcaaaagagaagctgcgatcctctagtggaggatttcgaagaagaatcggtcgaggtcggcactcgccagtcgccacctgtaagaagcttcgaagaaaacaacaactagctggtgtcgtcccggccggcctcgaggtaccc

SEQ ID NO: 2292 - DNA, 744 bp, Zea mays
  Clone ID: ZEAMA-23APR03-CLUSTER2822_4
gcacgagaccattacctagaacatcctaatcgaaaaattattttatcggtgctcgaggttcaggtttcacgcagtgcggcgagagctggcagccatgaagagggggagcccatggtcgctgcggctgctaatttgctgcgcggcaatggtggccatcgcgcttctcccccaacaaggaggccaggccgcttgtttcgtgccgacgccgggtccagctccggcaccgcccggctcctccgcgacgaacacgaacgactcctccgctggctcctcggccagccaagcccagcgcattcccacccccaatgtacggtggtgtcacccccggcagtctccagccacacgagtgcggcggccggtgcgcggggcggtgctcggcgacggcgtaccagaagccgtgcctcttcttctgccgcaagtgctgcgcggcgtgcctgtgcgtgccgccgggcacctacggcaacaagaacacctgcccctgctacaacaactggaagaccaagcggggaggccccaagtgcccctagtagccctccctctcggtctacttgatgagatcttctgttcaaaaaatcaaaaggtaagaatctgtttaaccatctttagatttcacaaataaaacaggtttcaatttatctttgtagtgaaacgcttgcaactcatgtgtgaatctcatccaatattagtgatagatccctagctagctgattgattactaaaaaaaaaaaaaaaaggggggggggg

SEQ ID NO: 2293 - DNA, 1939 bp, Zea mays
  Clone ID: ZEAMA-23APR03-CLUSTER2823_1
gcacgaggacaaaagggaaaagaataactgaaaaagtaaatcgctcaaaaaaaaaggaaaataaaaaaaaaatcgtagagagttcgattggcagttgctgagcccgagcgcgccctccggcgccgacaagccgggaccccacctccgccggcggcgatgggcaactcgcaggcttcgccggcgtccgcctccagctcccgcttcgtcatggcctcgagggccttcccgaaggcaggagctggacggcctccgcgagctattcgcctccctcgcagcgcagtcgcggaccggcggccgcgccatctcacgccccgtcttcctcgaatactatcaggtccgggggcgattaggagacaggctgttccagcttgtggcgaaggagagtggcgggagcgatggggtcacgttcgaggatttgatcatctccaaagcaacatatggaaggggaactcgtgatgaggtcgatgaattcatttatcaactatgtgatgtcacaggagatggcgccttaacaaggtctgatttggaatcagtcttggcgtctgttcatgaaactgtatttgcaataaagaaggaagttgtcgaagtttccaacaatagaccattcgaagaattcctcaactctgcagtgttttcaaaggatgttgaaggggtctcagggaagtctatgtcattgtcagactttaggaactggtgcactctcttgccatcattgaggaatttcttggaaatttgttgatgccccctgattcaggtagaccaggatttgaagtaccactgcttcatcatcctgaaaacatctgcactgatacgctgcttctaaacaaagagtatgcctggcatattggaggaggtttctcccaacatgaggtgcaagagtggaagcttttatatcatagttctcttcatggacaaagcttcaacactttcttgggcaaagtaacgaatggggatgctcagactgttctgattgttaaagatacagaaggatcaatttatggtggatatgcttcacagccttgggaaaggcacagtgatttttatggtgacatgaagacattcctcttcaaatgctatcctcaagcatccatttttcgtcctactggagcaaacaagaatttgcaatggtgtgctgtaaacttcagctctgagaacatacccaatggtattggatttggagggcagccacatcatttcggactctttttatcagcaaattttgaccaagggcactcatttacgtgtagcacatttaccagccctcccctttccaagacaaataggttcaggccagaagttattgaatgttggggtatacaaatgagaggagcacaagatgaaaaactggagttagtcaaggggacagtcctcgagagattcaaggaggaccggaacatgctgaagatggttggtttggcaaatgcaagtgattaagtgatagaggatcacaatgatgtacatgatggagagtctgtacagcacatgttcataaaaataatcaaatctgagaccatgtttctatattctactgttcatattttgtcactcaaaatattcatttgatccacactttgtaacaattgaccagtcattatattcatctggtccacactttgtaacaattgaccagtcgtgaaggacagccgagccaatgttgcgtttgatctcaagaatgacgtcatccaagataagatggtctcatatgagttcatcccattaactttaatgggatgactttatcctttctgttgtactaatgtgcttgtaagatgagaaagtatctagatctttagtggttttggtgattaatgccaacacaagattattgtaactaacatgtgtgtttacaaagataaattaatgttaggtcacaatgatgaaaatgatttgggcaaaaataaaataaccaaaaaaaaaaaaaaaacccacgcgtccacga

SEQ ID NO: 2294 - DNA, 1049 bp, Zea mays
  Clone ID: ZEAMA-23APR03-CLUSTER2825_3
ctcgttcagttgttcctcaacctacctacgccgctccgcgctcgaccgcctttgcctgccttcccattccccccgtctcctcttcccttccgccatggcccagcccgctttcctctcctctctccgctcccgcctcggctccgcgccgccgcccccgccgaaccatcgcctccagcccaggcgcggctaccacgtcgagcttggggctcgcgaaaaagcgctgatccgggtgcggacggggctggaggggcggttccaggagcccgggctcaagggcccgctgtgggaggaggtgagcgcgcgcatggcggcggcgggctacggccgcagcgccaagcgctgcaaggagaagtgggagaacatcaacaagtacttccgcaaggccaaggagagcggcaagaagcggccggcgcacgccaagacgtgcccctacttcgacgagctggaccgcctctactcccgcttgggccaggcaaagcaggcgagctcggagctgctggacgcggtggtcaagtaccccgacgtgagctacggtccgccggggttcgggatggacagggagcaggcctccggcggcgggggcaataataataacactaataatgaaggtggacaggacggcggcgctgaggatttcgacggagaggaggacggcattggcaaggggagggccggcgatggtcaggacgacgaggtggaaagccatggccacgaggatgagtagctagctgcattgcatgcatggcgccatggatgcgacaaccacaggacatacgatgcgagctgggcgccatctgtttaatttgttcgttcgttcgttctttctttcttcttgctactaaatcagtactactagcttttatcactaccttttgttattagctaccacctgcatgcatctgctgctgcttctagctagctgttattatgtatactactatatatgatatgatgatactactgttaatcactggtccaaggaatcattaaataatttgtacgatcaccattgcatatttatatagctcctggagcagtgttttaatttt

SEQ ID NO: 2295 - DNA, 1315 bp, Zea mays
  Clone ID: ZEAMA-23APR03-CLUSTER282_4
gcacgagaccattacctagaacatcctaatcgaaaacctgatatgtacttagttgctctttggttagtctgactgctgctcctctctctctccctctccatttgggtcccccgtctctttctcatggcggcggcgtcggtgtcgacgccgcagggagtggcggagcggcggggcatcccggcggcggccttcgttgaggacgtcgaggcctacctccgccaggtcgggctcgacgtcaactccgcgctcgcttttctccaggaaaggttgcagcagtacaaaatagtggagatgaagcttctagcacaacaaagggatcttcaggcaaagattcctgatatagagaagtgcttggatattgttgcaacattacaagctaaaaaggatttgggtgaggcactcatagctgatttcgaattgtccgaggggatctactcccgtgcgaaaattgaggatactgactcggtgtgcctgtggttgggtgcaaatgtgatgctggagtactcttgcgatgaggccaatgccctcttgaagaaaaacttggaaaatgccaaggccagcttagaagtccttgttgctgatctccatttcctgcgagaccagcaaaccatcactcaggttacaatttctcgggtattcaactgggacgtgcaccatcggagaagcaaacaggccgtaaaagaaacctgactacttacatcacgaggccgaccaatgcgactgggacatttcttttttgtaccttctgctacctctggcagattagcccgtcatagcaagcagtttgttgttgtatcggtttgttcagagttttacggtgtgggactgggaacaattaatatatccatgtggctgtgtttgccattctcttctgctacctctggcagattagcccgtcatagcaagcagtttgttgttgtatcggtttgttcagagttttacggtgtgggactgggaacattagtagaaatgtcatttcaattccttcttttccccgctggatcgcatttcacaaaatatctctaccattcttgcagagaagccttgctatcgccaaactacttggaacattttgtcccgcttcggaacttggacttttttttcgtgtttcttgcgtttttgtagtaaaaaaaacgagctggttcatgtatggttcctgcttttctaagggcccgctcatttagttcagattgtgcccagaaactgttccgatttattaaaattatacaaatttgtgaatacaaacaacggggaatgattccggagggtcgttccgaagcaaccgaacggccctaaaggggctccttttttgttt

SEQ ID NO: 2296 - DNA, 894 bp, Zea mays
  Clone ID: ZEAMA-23APR03-CLUSTER2830_23
gccagagcagcctactcggtctcggaccaagcagcggcagcaaagccacgacagcagtcgaagcgcgcggcgcgcctgcctagccatcccggccacccggggcccagggcccagggggaggggaaaccgaggcaggcggcggcggcggcgcagggcgcacgcgcttctcgtttcgtgtccccactccccagccgagggggagttggagggaaggaacgggaggcagcttcaaggaggaggctggcggccgagcgtccgtgtggcatggggagggacgagctgctgcggcggagcctcgtggcgctggcggcggccgtggcgctcacgggcttggccacggcgtcgctgcgcaaggcggcggccacgtacggcttcggcatcctcgccatcgctggcgtgctgcttccggactgggagttcttcgaccgagactactcccagtggytcacccccatgcccgcctcccgacgcacggccgcggccgcggccgccgaccgggagcacgacgtctggaaattcaagccctatcctctcagggtggccatgctgacgaccatctacgggttcggtcttcacaagtggtggacgtacgtatctagctagcggagtgggtcttcacagcatgaccgacgaacccgaaggttgaaatatcattgattaggttgtagccaagttcctcttttttttgttgttggattggaagaagcaaaatactgtgacagcgccttgtcatatatcatcagttcttcactgtgatcatgagatgagccagctgttctaatggggagcgacccccgacccaaattgatatatgtagggtaactagcgattttccattcgcgctgctgctgctctttgatcgccgtcattgcttctgaaggactattgcttctg

SEQ ID NO: 2297 - DNA, 2094 bp, Zea mays
  Clone ID: ZEAMA-23APR03-CLUSTER28311_2
taattacggttgggagtgaatatatatagtggagtgttgtgggccaaggcccattacaatggaggtatacacagagacgtaaacaacactctaacactaacatcaacgactatccttaaggcttttgtcgatcaagatacctacaccattcctacccaaacttgctcccgtgttccaacgcttgaaaccagtatcctccacctccttcgccttatagccctttcatttagtcttctggacgcatagaatatttacacgcctcttaatcgctacatccactagctcccctaacttacctgttagggaccctatgttccaactgcctacacgaaatctagttggttcgactagcttccttacccttcacacccgtcgagagagatgtgaagacccttgttcatttttcactacatcctggcgttgatgtagcacatcactaaggaaatgacgacctggtccttgctcacttaagcaagcatctattttgtattcatctgagaaaagtagaacaaaaatttcctcttgggtaaccaatggccactgagcatgtaaatcctgtgtaatcagcccatgaaatgatgatggtgaggtctacttgtgtgctcacgtaggccatagtcttgaggcacattgtgtgaaaccttgtgctcactgtgctcaaatctatctgatccaacgaggcagcaaggtcttcagacactgaagctgcaggtgcagccaagccattttccagggtttcctgtttcatttgttatgcttgggtgttgaggagggttttttttatccctggccacatttcccccctgattgcttgatgtgtattccctccttgcccagaaggaatcaagttgtacactaatccctagtttctacctaaggttagttagaaatattaaggaaagatggaagttctcaaggcattgtgttcagattgataagcatgaatgattactcctttggcatttcaaaagggatagtaacataaaactggggtagatggattatattgttttgtaaaacatgagtactacctatatgcagagtttaaatttaaatccatattatgtaaacaggtagctcaaacatggtcgtttcactgcagcctgtccactgcagtttcaaaatggttcacaatgtgggcgatgttgtgtggttacattttatctttctatgtttgacttactacgacacatctttttcacatgtaggtggtagattgccgtatctgtggtgatcctaactcagtgcttcgttttgcttttatcgagtttgctgatgacgttgctgcacaatcagcactagcacttggtggaaccgtgcttggcttttatcctgtcaaggttctgccatcaaagacagcaattttacctgtgaaccctaaatttcttcctcacactgatgatgagaaagaaatggtatccaggactgtgtattgtactaacattgacaagaagatcgcagaagatgaagtgaagcaattctttgagggaacatgtggtgaagtttctcgtctgaggctacttggtgattatgtgcactccacatgcatcgcttttgttgagtttgtccaagcagatagtgctattctcgctctgaactgcagtggcattgttcttggaacgcttcctgttagggtgagcccatcaaagacaccagtccgctcgcgatcgccccgtgtgacgtcatactgaattcggctcatctgaagccgtcgtccagggcagcaaatttctgggcaacaaagccctagtcgtgtggccttagagactgccgcatcgcggataagtaattgtcgttgagcagagttctcgttggttaaagtccagtctagtaggaggcgcagagacccgtctgtatggtcgctgggagatctatcttgacctcctttttctgttctttttggtcttagttatcgtggttggattctatagcagccttgacaggcattcgaacaacaatgtttatggttatcctatccgctttggactcttaagcatgttttcccagtctttaaatattaagagatagtttggtaactatattttttgaagggattcatattttttcaagggaaaataaactaatttctattgg

SEQ ID NO: 2298 - DNA, 1799 bp, Zea mays
  Clone ID: ZEAMA-23APR03-CLUSTER28320_1
atgacctttctgctttgttttgcagtgccgcgaacaagctgacgagagacgggagtgccagagaccagctcccctggaagtgcatgaactagtcagctacaagtttagtacatggagcagacgcgcacgggtggtgccggggagcagcccaggggggctcccggcgaggaagcggcgaagaggatcatcgttggcggagacgcgccggcgtcggggacgtctggctctggctgcttcgactgcaacatctgcctcgagtgcgccacggagccggtggtcacgctctgcggccacctctactgctggccctgcatctacgagtggctacgccccgacgtcgccgaagccggcgccaggagctcggcgaggcggcagtgccccgtgtgcaaggccgcggtgtccccggacgctctcgtgccgctctacggccgcggcgggagctccagcgccaaaaagccgctggccagcatcccgcgcccgcgccggccggccctgcgacagagcacgcaagacagcggcagcggtggccaccaccaccaccatcggcacgcagagaccggcacgccagcccggtcgctgcggcacccagcccacgcccacgccgcgcagttcgacgccctcctctccgcgccgttcggggaccgcgggatgctgcactcgacgtcgacgaccggcgggatgctcggagggatggcggtggccgtcctcccgttggtgctccgcgggcaggcgcgggtgccgggcatgtactacccgagcccgtatcatctgatgagccccaggcagagacggtggcatgtggaggtagagagatccctgcatcagatatggttcttcctctgcgtgttcgtggtgctttgcttgctcttgttctgatttctgaagcaggacaccatcctgcgcctgcgggccacgagacgtgctctgtacatagcaaagggtgcgcgatatggatatggtgcggcagtgacctatatttggtgattgcatgacgggcgttcaagatgttaaattgagaaccagctgagttctggtcctagaaaggagaaatcggtttcgaaactgcaaaggacccttgagaagattatcagaagccatcgtccacatgttcatgcgcagacagtaacacataagctactggtaatatagagcgtcagaaaaaaatgcttcagtatctaaatgtcacgctaccattttgagcgctttgatgacctgtgcagctgtgctccctccatctcggtctcggtggtcaccagcaatgcagcatttaactctaaaagtctgcaatgtgtgcgaaaaaggaatgccactcgtggcagcttacatagctccctttgccaaaagaacaacagcaccttgattcaaaacgtcacttaagattgtgttaagatctatgatcatcttctgtcaactctgctgattttgcagctgattaatccggctgaggaatgaggatgttgccggagcgcgtctcaaaatcacgaatctggatgagagcacttcacgacaggacctgctaccaccgacgtgagtgtgatttgccattgatatacagcctgatcagttgcaactccacttagtactatgatgacgagtaacagagcgtctgtgaaagggagcacggccggctacaacagcagctgaagtagcgcataagtcacaagttacagtccactacaactgatcattcgagctttgcttcttttttttttgtaacggcaacagtcgttgatgactaacataacgaacaatacatgattattatttcagtatctaaatgtcacgctaccattttgagc

SEQ ID NO: 2299 - DNA, 2181 bp, Zea mays
  Clone ID: ZEAMA-23APR03-CLUSTER28442_3
acatctgactgaggagggccgagggtttttagaggaaggaacccgtccgcgaccgatggcgatggcgttgtcgccggggacggtgcctttgggagtgctgctgcggcgggaggtcaccaaggagcggatggagcggccggacgtgctgtgcggcgaggccaacctcagccgcaagggcgaggacttcacgctgctccgcgccgacgcaggccagcgcatccccggcgacccgtccacctccttctccgtcttcgcgatttttgatgggcacaacggatcaggagctgccatatacgcaagggagaatctgttgaaaaacgtcttgcgtgccattcctacatgtttctgcagggaggagtggcttgccgtgctcccacgtgcgcttgttgcagcgttcgtcaagactgataaagattttcaggcagtggatgaaacttctggcacaactgtgacatttgtgataatagacgagtgggttgtgactgtagcatctgtcggtgattcacgttgcatactagaatctgccgatggctcaatctactttttatcagctgatcatcgctttgactccaacccagatgaggtcaagcgcgtgacagcatgtgggagcaaagttgggaaaatggatattgtcggtggaccagaggttggtcctctaagatgttggccaggtggtttgtgtctatctagatccataggggatcttgatgttggtgaatgcatcattgctgttcctcatgttaagcaagtgaagctttctaatgctggaggcagaattatcattgcaagcgatggtgtgtgggatgatttgacttgtgaaatggctcttgattgttcccgtgggttctcatcagatgtagctgccaatcgaattgttaatgaagcaacccggcctcgtggaatcagggatgatactacttgcatcgtaatcgacattctaccaccagaaaatatagtcccgagtcctcgtaagagaccccgcaggattacattcaataatgtgtttcgcaaaagacatctagacgtcccccccgaaacaaatagatcagaatatgctgaaccggatgtggtggaagaaatatttgaagatggctctccgatgctttctaaaaggctaactaccggatatacacttgagaaaacttttgcaccctccagttgtgcagtttgtctggtacggttgaaatctggacagggaatttcagtgcatgataacccattgcaatatgagaaactacaaggttggcagggtcctttcctgtgcccgagctgtcatgaaaagaaagaagcaatggaagggaaacgccggccaaaaggatcttcatcaaacgtctttggtcacatgtgctaggcctgcctaccactaaagattcttttattgattgttagctggaaataatagtcagcccataacaattcattggctagaattgaccgtttcagttgagtaagacggaatattcttgacaaacagcctggagatttattcatcagtttgagtagagcataggaaaacccatcttattttttcgaaggactacggctgtgtccgcatctaggcatttcactgtacagactcttgcttgtatagagatcttctaaatgatcattagtcttcctgtagcggggctgactgaagaaaaattgcaagagcagattgagcagagaaacgttgcaaggaagaataaacagtttgagatatctgatggaatcaggaaaaaccttgctaccaagggcatcgccctgatggatgaaccttctggtacagtgtggagaccatgcgaaccagaggggccgcacccactcaacaaatgatggtaaaatgagatttttgcctgagggcagctacacattttgaactaacaaaatcaccatctctggatgcagtattcttcactcaggggtagggggtccaggttgactcgccagtcgccagttgaaacttgcatttctggttgtgtaagaagcaatggaccccatatatatactttactccttgcgaggtttgagttttggttttggatataagacttggcaattccatttcaatgaaacagatgaaattttgcttggtactcttcgcgtgtgttagtggtttagtttgttgtgcaccggtggtgcttgagatgaagtcattgctttattttaaggtaatgaaaactgttctagcagaatttggtt

SEQ ID NO: 2300 - DNA, 800 bp, Zea mays
  Clone ID: ZEAMA-23APR03-CLUSTER2846_14
accagctcacacagctagctagctagcacctagcagtcgtacacacgggctagcagtcgatcacaaaccaatcgcggagaggcagtcacgtacgtatacgcacgggcacgtagctagttagcagtcgtagtcgtagcgtgacgatgagggttctctctgttgcggtcgctctggtcgtggtggtggccgcggcctgcctcgccgcgccgcggggcgcggacggcgcgggcggagtgcggggcgacgccgccggacacggtggcgctgaggctggcgccgtgcgcgtcggcggcggaggaccccggctccgcgccgtccggctcctgctgcagcgcggtgcacgccatcgggaagcagagccccaggtgcctctgcgccgtcatgctgtccaacaccgccaggagcgccgggatcaaggccgaggtcgccatcaccatccccaaacgctgcaacctcgccgaccgccccgttggctacaagtgcggagattacactctgccatgagcggcggtgaggtctccaggccggatttgctgcatggcatgcccgagtatcaccgaagcgcgagctcttgtgtcgagcgagtccgtgtctgtcagtcagtctctatgtgttgcccataataaacaaagacatgcgagtaccagacatgtgcaactctagtagcatggtgcgtgtatcactaggtacgcgtactcgtatagttgtgttcagttcagggtctatagagatgtagccctgcattgtcgaaataaatactgtgtccactcgttcgcaaaaaaaaaaaaaaaaaagcggcc

SEQ ID NO: 2301 - DNA, 1785 bp, Zea mays
  Clone ID: ZEAMA-23APR03-CLUSTER285800_1
aagaagcgaagcaaccaacccccgaaatcttcaacggcgccatcgccactgcgtcatgcccgtcccgcacctcctctcgccactccccctgccctcgccgccgccgcccctccaccgcaatggagcgccatggcggcgcccgacgcaactacgtgccgcactacgggtcccgcctccgcttcacctggggctcgccgcggcccgtggcgatggcgtgaggcggttcgtcgggacgctgggctcgaagagagcgcgagcggtcggtgcaattagggtttctgcgatctctggagacggcggtggcggtgctggtggtacgggaattgcggcggcagcggccgccactgtggtctttgctgtgatgaaccgggtgctctacaagctggcgctcgtgccaatgaagaattaccctttcttcctcgcccagttcgccacatttgggtatgtcctagtgtatttctcaattctcttcataagatttcgcgctgggattgtcactagagaaatgttagcgcttccgaagccacagttcatgctaattggtttactggaagcgctaggtgctgcttcaggcatggctgctgctgctatgttgcccgggccatctattccagtgttgtcacagtcctttctggtttggcaacttatcttatctgccctcatcttgggaaggaaatatagagcaaatcagatccttggctgcttgcttgttacagctggagtaattctagcagtggccggtggagccagtaatggtccgattctctttgaagtcaaattcttttggccagcagtaatgatgatttcagctgcatttcaagctgctgcttccattatcaaggagtttgttttcattgatggtgcaaaacgccttgagggaaagaagcctgatatatttgtagtcaactcttttggttctggtttccaggcactttttattttcctactccttccatttctctctaacttgaaagggattccttttgctgaactccctgcatacctaacccgtggtgctgcatgctttctgaatgtgggagggaatctgaaggattgccatggagctcctttgctaccacttctctacataactctgaacatggccttcaacatttctgtccttaatcttgtgaagatgtctacagcagtggttgcttcgctgacatcaactttagcagtacctctttccatctatatactgtcactgcctctaccatatctacccgaaggaacaaatttgagcgcatcttttttgattggtgttgctaccttagtgctcggattgcttctatacaatcttcctcaagaatcaaccaatcaagtaaaggaagattaatctaaacccatatcagatataaggttaacaggaagctattggtgctccactaagaaaatagccgcattttgttgacagtggcttcacagtttggtacataactcatgaagagcagtgttcttctgccacaaacatttgcggtgcaaacatttgaggcaccagctgacttcaaagtttagaaacagcaagttcttgtttcatctgttaacaaaatcctaatggattatgcagctatatataagctctacctgagcggatgtaactactaactactttcagatgagtaagggctttacaaattcattggttgtataattgttctcaccattttttggtcaattcaagactaacataccagactccgtgggatttattatgtaaataagtaatgattgtaaccattataaatcttgaaagtatggccaaccatttcaagtgaatgctagata

SEQ ID NO: 2302 - DNA, 1636 bp, Zea mays
  Clone ID: ZEAMA-23APR03-CLUSTER28599_1
ccaaactcctacccccgcctcaagaatctctcttcgctccgagcgccggggccgatacggccatacccactgcaatgctccgcgttccacggccatggccttcctcaagaccctaaaccctctaatacgcaggcaggccaccccgatcgctatccccaggctgctcctctccctccacactgtcctcgattcatcctcccccaccactaccgccgccgccaccccgtttgccaacgctgtgcacacccatgtccccatccggtccggcggtccgctgttcctctcgtcggccccatggatgctgtcgcagtcggcgacaccgctcacggccgcggctgccgcccttggcgccaagctccacagggcccaggccctccccggcggccgcgcgctggccgtcgcggccgcagtggggtgggagcacatgcggatctccaggggtgaagcggaggttgcgacgtcttcgggaattgtgggatatggaggtgagaggtttctgaatgcgcccaatttagtgtcgattggacggatggtgtcagggccggtcattggatggatgatcgtgaatgaatggtatcttcctgcctttgccacattggctatctcgggtgcaagtgattggttggatggctttttagctagaaagatgggcatcaattctgtatttggatcatatttggaccctctggctgacaaggttttgattggctgtgttgctgtagccatggttgaaaaagaccttttacatcctggtcttgttggcctcgttgtcgtaagagacttgctccttgtgggtggtgctttctacaagcgggcttctagtctgggatggaagtggaatagttggtcagaatttgttaacctagatgttattcatcgtgaaaaggttgaacctctgttcatcagcaaggtaaacacagtcttccaattaatgttggttgccgctgcacttcttcagccagaatttggcacagaggagactcagaattatattgcacttctgagttggcttgtggctactacgacaatcacttccacaataggttatggtgtgaagcactaccgaatcaaaccaaggagtcggtgactgttgctgcaggctattcatggattaatttgctgctgctgatgacatacatcaagtgacttactgacttgtatcaagcatgctgttgtttcttaagcttcgtcaacttcccaatttgcagctgcacaactataggtcttgttgcccccctttgtcctcatggatttccttaacggcaaaattttgggcaatattggagaaaggagtgaagaacggtctcatgaattgaatgtaatcggtgcatgatttgtgcggtaggcctctggccgtcctcctgtagctgttaagtcgtggtgactacttttgcctagttttggcctaaagtgtccatcaatttgtcagagatcaaactagccgaacctttgccttttgctttgtccagacacattagctatattgcaggtgtacatatgtacttcagaatacttgaacttggcaaatggcgatcgctaggtgatatcacgcttccagatgtctgcaggttaaatgcatttacaactatgttcatgcatcaatgcaactgtatagcagggcttttttatgagccgg

SEQ ID NO: 2303 - DNA, 1488 bp, Zea mays
  Clone ID: ZEAMA-23APR03-CLUSTER285_30
aaaaaacctcatcttctctccttttgctcggaacgcacacaccgcccggtctccgatctccgatccccgatcccctcgtcgatccaagatgcagatcttcgtcaagactctcactggaaagactatcaccctcgaggtggagtcctctgacaccattgacaacgtcaaggccaagatccaggacaaggaaggcattcccccggaccagcagcggctcatcttcgctggcaagcagctcgaggacgggcgcacacttgccgactacaacatccagaaggagagcaccctccaccttgttctccgcctcaggggaggcatgcagatcttcgtcaagaccctcactggaaagactatcaccctcgaggtggagtcttctgacaccatcgacaacgtcaaggccaagatccaggacaaggaggggattcctccggaccagcagcgcctgatctttgctggcaagcagctcgaggacgggcgcacgctggccgactacaacattcagaaggagagcaccctccacttggtgttgcgtctcaggggcggcatgcagatcttcgtgaagactctgactggcaagactatcacccttgaggtcgagtcttctgataccattgacaatgtcaaggccaagatccaggacaaggagggcatccctccggaccagcagcggctcatttttgccggcaagcagctcgaggacgggcgcacgcttgccgactacaacattcagaaggagagcaccctccacttggtgctgcgtctcaggggtggcatgcagatcttcgtgaagacacttactggcaagacgatcacccttgaggtggagtcctcggacaccatcgacaatgtcaaggccaagatccaggacaaggagggcattccaccggaccagcagcgcctgatctttgctggcaagcagctggaggatggccgtaccctcgccgactacaacatccagaaggagagcaccctccacctggtcgtccgcttgcgaggtggtatgcagatctttgtgaagaccttgactggcaagaccataaccctggaggttgagagctccgacaccatcgacaacgtgaaggcgaagatccaggacaaagagggcatccctccagaccagcagcgtctgatctttgccggcaagcagctggaggatggccgcaccctagcagactacaacatccagaaggagagcactctccacctggtgctccgcctccgcggtggtcagtaagccatggttcatttaagctgctgctgtacctgggtatctgcgtcgtctggtgccctctggtgtacctctatatggatgtcgtcgtctaataaacatctgtggtttgtgtgtcatgaatcgtggttgtggcttcgttggtttaatggacctgttgtgtcctctgtgttgtacccaaaactcttctgcagcagtatggcttgaatccttatgaagtttgatatttgaaccaaaaaaaaaaaaaaaaatttgcggcc

SEQ ID NO: 2304 - DNA, 606 bp, Zea mays
  Clone ID: ZEAMA-23APR03-CLUSTER286932_1
ttttcacagatggcgccgaaagcgaagaaggaagctcctgcccctcctaaagctgaagccaaagcgaaggctttaaaggccaagaaggcagtgttgaaaggtgtccacagccacaaaaagaagaagatccgcacgtcacccaccttccggcggccgaagacactgcgactccggagacagcccaaatatcctcggaagagcgctcccaggagaaacaagcttgaccactatgctatcatcaagtttccgctgaccactgagtctgccatgaagaagatagaagacaacaacacacttgtgttcattgtggatgttaaagccaacaagcaccagattaaacaggctgtgaagaagctgtatgacattgatgtggccaaggtcaacaccctgattcggcctgatggagagaagaaggcatatgttcgactggctcctgattacgatgctttggatgttgccaacaaaattgggatcatctaaactggagtcagctgcctaattctgaatatatatatatatatatcttttcaccataaaaccaaaaaaaaaaaaaaaaatgcgaaaagcttatcgaaccgtccaacctccgaggggggggcccggtac

SEQ ID NO: 2305 - DNA, 1005 bp, Zea mays
  Clone ID: ZEAMA-23APR03-CLUSTER286_2
gtcgtggatgattctgccttttcttctccttccctcacctgctctctctctctctccctttctttcccgcggcgacggtgacgacgaccgcgcgagcgccgccgactccctactgcatcaggtgcctcggccttcgtcgtgctctccgccggcaacgagtatagacgggcgcgcatggccaccttcgagctgtaccggaggtccaccatcggcatgtgcctcaccgagacgctcgacgagatggtctccaacggcaccctcagcccggagctcgctatccaggtcctcgtccagttcgacaaggtggagatgcctcgtgccccccctttttttccttgtctcggactgtggggaaatctggtcattgattgttttgcccctctgtgttgttcgtctagtccatgacggatgctctggagaaccaagtgaagagcaaggttactgtcaagggtcacctgcacacctacaggttctgtgacaacgtgtggaccttcatcttgacagacgcaagcttcaagaatgaggaggccacggagcaggtgggcaaggtgaagattgtggcatgtgattccaaattgctcggacaataggcctgtgtaccctcgaggtcaaggaaggaagcttttaagtgcggcgaggcggggtctgtctgcgcgtcagctgtacacgcctaggctaccgcgaggcggggtctgtctgcgtcagctgtacacgcctaggctaccgcccgaacggcatttcatttgccttcttcgtactgtatgtgtatcttcttttttccccttgtatacaatctgctgcagctataccggccaagagtatggcatggtatggcggcaggcagccgcaaacttgtttttacctacttggtgtagcgcctgtgtaacagttttcgatcgctcttgcttgttgtgttgtcgatgctaataccgcagtgtaattgacgaaatgactaaaatgaagagtagtgtagtagatgacaaaaaaaaaaaaaaaaaagcggcc

SEQ ID NO: 2306 - DNA, 1394 bp, Zea mays
  unsure (1)..(1394): unsure at all n locations
  Clone ID: ZEAMA-23APR03-CLUSTER28720_1
aatacaaagccgcgcgctgccacctcccctcttccctctcctcacctcccttccattccagtcttccaccttgcttctcgcaggcagctgaagcaatcggagcaagcagagagaggccggctcctcccacccccaggcagccatggacgcccccgaggcgaggagtagcgcgtcctcctccccggagttcgagttctggccgctctaccccaaccccgccgcctcgccctcctgcgccgacgagctcttcgccggcggggtgctcctcccgcttcccatcctcccaccgaagccggagtccaggaacaaaggcagcggcatcagccaatgcgtgcccgtcgcagagccggagccggagtcgcagctaggggaagcgtcccttcttgcgaccgccgcggcgcctacggcctcgatgacttcccaggcgccgtccaccggtagcggaggaggagggtcgaagcgctggaccgacatcttttccaagaagccggcgccgggaggcgaggagaaggaccgggagaaggacaaggagaagcgcaaggatggggcctgtagccggaaaaacagggcagcgggcacaccggcggcgcgggctcggagctgaacatcaacatctggcccttctcgcggagccgctcggccggcggcgggtccggctcatccaagccgcggccgcccacgaggaaggtgagcagcgcgccgtgctcgcgcagcaactcccgcggctgaggccggcgcccctccgctccggcggtgggcggcgagcccgggccgctccggcggcggcgtgccggtgggccggtccagcccggtctggcagatccggcgaccggcaggcaagcccgcgcccgcccccgctccaggccctgccccttcggcctcagagctgttctccgacaggcgggcaccgccgcggcagcacaaggacaaacccgccggcgttgccaacggccggaagcccggcctgagtggcggcgtccggggcctgaacctgagcgtgaactcgtgcattgggtaccggcaccaggtcagctgccggcgggtggaagtcggcgccgcccgcggccctggccccggcgggctgttcggtatcaaggggctcttctccaagaaggtgcattgagtgagcctgttttgtgttcaccctcgggctctctgatcactcgtgtagtaactccttttttaccctttcttttactagtactttttttaaccttgtgggttatatatataaatggtacgatgagatgtgtgttcgtgagcgaggttgttaattacatgtaaaaaattgcatggttagccagtaaccggtttttgtaaggctaatgcttgcttggtgacatctactgtaaaaagttcgccaacgttaacaacctctgtttatgatgtgagcn

SEQ ID NO: 2307 - DNA, 1877 bp, Zea mays
  Clone ID: ZEAMA-23APR03-CLUSTER28771_2
gcacgagaccattacctagaacatcctaatcgaaaaacactctgcgactgctcacgccaccacctttgtttgtttgaggaaattctaagcaccacctggccaggctgaaactctagcgcgactggctttttccacggcccggcccgtcaaatccatgtactgtactcgttgtccggagaacgcgcccctgccacctccgcgcgggcacggcacgtcgtagtaaaaccctagaaaaacagtagcccaccgcgccggcgagccgaagcgagcgcggagctaaggatgccgcggaccaccgtggtagagagctccggctgcccgccgctccgcgccctcaccaccgacatcctcggcctcgtcaaagtcgtcgaggcccacgcgaggccggcgggcgccgccaaggtcgtcgagacgtggggcgcgcctgacgcttcccgtgccatcgttgctgcctccctcgccgatcgtgccgccgaccccgtcttggctgtggcgaggaggaacggcgtggttgagctgctgaatcccttgaatggaagtgctctggctgctgtcaagaccggggtcagcgccaaatgacagtggcgctgaaggtgatcccctcgccgcactgcatcttttcgcaagacagacttcggactcgatcttaggcacatttcttgcctgcacggagaaggggaaagcttctatcaggtccatcacgaaagaaaatgcagattcgggttcggatgttgggccatcagccacatgggatgtgtgcaatggggccaatgtgcaattttgctcagtagatcatggcgaaagctatgtgatatttggagggaaaggcatagaagtgaacttgtgggatatcacatctagtagtaagacatggtctgctaaatctccccgagcaaatagtcttggcatattcactcgaccttggttcactgctggaaccttcttgtgcaagaatgatcatcgtaaaattgttgcctgcacaaataatcatcaggtccgcttatatgatactgcattgcaaagaagacctgccgtctctgttgattttagggagtcaccaatcaaggcagttgctgctgatccaaatgggcatgatgtctatattggcacaggaacaggggaccttgcttctttcgacatgagaacagggaaattgctgggatgctatattggcaaatgcagtggaagtattagatctattgttaggcatccagagctacctttgatagcatcttgcggactggatagctacttacgtatctgggacacaaacacaagacagttgctatctgctgtctttctgaagcagcaccttacaacggtggtccttgattcacatttttctgttgaagagcctggagagatgaaattcaagcaattggagtctttagtggaggcggaggctgaagtccgaaaagaaaagaagaaaaagaagagcagaccaactgaagaggacgaagaacaagttggagtggtcgaccatagtgataataatggtgaaatgtatgctagaaaagaaaaaaagaaaaaaaagaaaaagaagagtagaactattgaacgggacgaggagccagacaacgatggtgaaatgtgcagtcccaagagaagaaaatctgtagaaagaagcaaatgcctgaagaagagcaagaaacagcaggtcgcatagaacatagaacaagtaccatttatctcagtatttgcattcgcttgattttgcagaattacacaattttgtgctgtagttgttttgaacagtatattccttttgaaactatgcaagggaatttcgccgtccattctacgagatacttttttttatggctgcaaaaaaaaaaaaaaaaaaaaaaaaaaaaaactcgaaagagggcgccggtacc

SEQ ID NO: 2308 - DNA, 2488 bp, Zea mays
  Clone ID: ZEAMA-23APR03-CLUSTER2878_1
tacgccaagcgcgcaattaaccctcactaaagggaacaaaagctggagctccaccgcggtggcggccgctctagaactagtggatcccccgggctgcaggaattcgcacgagaccattacctagaacatcctaatcaaaaactagtgtgcagaaacatggcgcgaagcagcagcccagctaggatggccatgttgctgctcttgctctcggccctcgcagtgctcttcccacccgccgtggccgacgacctgctctccgtggacttccacgccgcgtcgtgcccgcagctggaccgcatcgtgcgcaccgccgtgcaggccgccctccggagggagatcgcgctcgccgcgggcctcctccgcatcttcttccacgactgcttcccgcagggctgcgacgcgtccgtgctcctcaagggcaacgccacggagcagaccatggggcccaacaccacgctgcagccgcgggcgctgcagctcatcgacgacatccgcgccaaggtgcacgccgcctgcgggcccaccgtgtcctgcgccgacgtcacggcgctcgccacccgcgccgccgtcgtcgcgtcggggggaccctcctaccccgtgcccctgggccagcgcgacagcctcgccccggcgcccgaggacgacgtcaacgcgctcccgtcgcccaccaccgccagcgtcccggagctcctggcggcgttccggggcaggggcatccgcgacgtggccgcaacctttggttagccggctggctacaaccgaattcataccacttccacccccgtctcctccgatcggacggacccaccgggccagcagcggggcggatcgcgtcagcagcacggcggtgaaggcctaccccacggtgaacgaggactacctcaaggcggtcgacaaggccaagcgtaagctccgcggcctcatcgccgagaagaattgcgcccctcctcatggctccgcctcgcatggcactccgcgggcaccttcgatgtggccaccaaaaccgggggccccttcggcaaccatgaagaaccccgccgagcaggcgcacggcgccaacgccggactgcaaattgccatcaggcgcccagcaaggagcaattccccatcctatcctccgccgaatgctaacatcttcctggctttgctgcagtcgcggctacccgctggaccggacggtcctggccagtcgaggtaacccggcgggcacctgatgtccccttccaccccgggcaggcaggaccaagcctgagcctccaccggaaggccgccttcctgatgccacccaaggttctgatcacctcaggcaggttttctccacacagatgggtttgagcgaccaggacattgttgcgctttctggtggtcacaccctgggaagatgccacaaggacaggtctggatttgagggagcctggacgtccaaccctttgatctttgacaactcttacttcaaggagcttctgagcggagagaaggaaggccttctgcagctaccaagtgacaaagccctcctctctgatccatccttccgcccacttgttgacaaatacgcagcggacgaggacgctttctttgctgactacgccgaggcccacctgaagctttcagaattgggatttgctgaggcgtaacgaaccagaagagtgtggtggctgtcgtcggccggccggccttgtgtttttgttgtctgcttttctcttgaatgaagatgtgatgaactcagctgaagatgtagtgtgtatgttgtcatggtttatttttctattttatttatctatctataatatctatcggagaaggtttgatatgaagcggaacactgattaacgatgccaatgcctccacatccaaaggccatctgccccttcttccaggaccgcgccgacagccaggaggatgacttcgccaggcagctcaaggccgactgcgccagggaccccaaccggctgcagcagctggacgtcgtcacgcccgatgccttcgacaacgtctactacaagaacctcaacgccagccggggcgtcttcacgtccgacatggcgctcatcagggaccctacaacggcgccgatcgtcaggtgcttcgcggggagcaaggacgccttcttcgcccagttcgccacctccatggtcaagctcagcaaggtgcccaggaagccccccgggaacgtcggcgagatccgccgccgcagctgcttcaggaccaataacgccaagatgagcatccttgacgtcgacgatgccgtgggcagcttggcggcggcgtctgcccgttgaccaacaccaactattatattacctgctggctgtggctgctgtacgcctgtactgtactaggcgtcgtcggcgccttacgtgtatgtcctgtacgactgttatcttgctttggttggtggctgcatgtctgcatgctaagtttaagtacccacgcacgccacgatggcttcttgcttgttcaatcttatctatatatatatgttatgacc

SEQ ID NO: 2309 - DNA, 1250 bp, Zea mays
  unsure (1)..(1250): unsure at all n locations
  Clone ID: ZEAMA-23APR03-CLUSTER2878_7
caacctttggttaaccttcctgttatatttggcaacaaagctatttcacacagcatcctccagcaatgttgttccccttcggttcggaccattgtcccgcgccgccgcccaacgaagcagtataggtacgccaatccatccaatcttacggtctgagcctgacaccttaccttgaagcaagcagggggaccagaccccatgacggcgatgctcgactcattcatcaagcaatgcacgacgtcactggacgacctcgccggccaggagctttacaccattttcggcatcggggacgacattaggggcctcctggccacactgtctcgcatcaacgccatcatctcccatgacccatcccctcactcgatctacatcctaccctaccctacccgtgacacatgaggatttatatgaagtcattttttaagacaagcctgagcctccactggaaggccgccttcctgatgccacccaaggttctgatcacctcaggcaggttttctcgacacggatgggtttgagcgaccaggacattgttgcgctttctggtggtcacaccctgggaagatgccacaaggataggtctaggtttgagggagcctggacgtctaaccctttgatctttgacaactcttacttcaaggagcttctgagcggagagaaggaaggccttctgcagctaccaagtgataaagccctcctctctgatccatccttccgcccacttgttgacaaatacgcaacggacaaggacactttctttgctgactacgccgaggcccacctgaagctttcagaattgggatttgctgaggcgtaacgaaccagaagagtgtggtggctgtcgtcggccggccggccttgtgtttttattgtctacttctcttgaatgaagatgtgatgaactcagctgaagatgtagtagaagagtgtggtggctgtcgtcggccggccggccttgtgtttttgttgtctgcttttctcttgaatgaagatgtgatgaactcagctgaagatgtagtgtgtatgttgtcatggttcatttttctattttatttatctatctataatatctatcggagaagctttgatatgaagcggaacactgattaacgatgccaatgcctccacatccaaacccgttatgtttttgcatgcaggtgggtttcaagcaactcttataacaagtgtttgaaacatacaccagggtcctttctaatattaattatatatgccacataattgnaccc

SEQ ID NO: 2310 - DNA, 1699 bp, Zea mays
  Clone ID: ZEAMA-23APR03-CLUSTER28850_1
agaacaaccgggaccgggcaattcgtccagcagcatggacgcgcctccgccctcacagccggacgatgctgctccggcgcccgtcctcgaccttggcttctgctccctctccggcgccaacatccaacccacccacttccgccgccgccgccgcacccgccccggactccgccatcgccaaccctaacccgaacctaggtaccgtcgcaaaccctgctcaaaccctagaggctcctggccccagctccgccgccgcgcggccgccgccgccgcgaatgagaacgccttacacgcacctggccgcgcccatcacgatgtcgtcctcctcctctgctgccacagccgcggcctcctcggcatccgttccggccgcatcctcctcggctcctcctataccacgcggaggggttgtcctgggggtgcccgcgccgcgttcctcacagacgcccgctggttacactgggttcgttccgccgcctccgcttgctcaccagtttggatcgatgcatcgaggccccgaccagcccccaccttcatcttcacagagacccccatctcagtctttaatgaggccgatgactgtgagttctccttcgctggcttcacaacaaactccacaaagttcgtcttcaacatttaggccccaacagaggccacaagtttcacaaccaagaccacaacaatctcaacttgttactccacctcaacagaacacaattttaacacagcagcagcagcagcagaaacaacaacagagtgcctcacatcaaaatcaacaaattgctgcccctaaaaatcagccacagctttctcagcatccaactgctcgtactccaatatcaatgacaccaaagcctgatttgcctgctatacaaaatgttgctgttttacaatctgtggatacagctgcaactgatgcaaatgctagtgaaactggtactcgattactcaccaagagaagtatacatgaattagttgcacagattgatcctaatgaaaagctggatcctgaagttgaagatgttcttattgacatcgcagaagattttgttgagtctgtcacaacttttgcttgttctttagcaaagcataggaagtcaagcacattagaagcaaaagatgtactcctacatgcagaaagaagctggaatatcaccttgccaggcttcagtggtgatgaaatcaaactgtacaagaaacagcacataaatgatattcacagggagaggcttgctctgataaagaagtccatggcgactgacacgagaaactctgctgcccaagctgcagctaaccagaaaaatcagactccgaaaccacctgccccagcttccccgtgaaacatgtccacaggccctgcaaacacagtatcagtgtaccacgcatcacatctgtggtgttcggacagttgtcggttgtatgttggtagtgttgcaatgagtacatgtatagattattctgtcgttactcgttactaggatctggttagaatgttgtttagttaatccaatgcatggtttctattattgtatatcacttctgttctaaactataaatcatttagggctagtctaggagccacaaaacctgagtggattgaaggggctaaaatcccctcatttaattttaaataagaagggaaaatatcatatttttacaccaaaatgagtgattgcacaggatatgtcctcaagaaggg

SEQ ID NO: 2311 - DNA, 1469 bp, Zea mays
  Clone ID: ZEAMA-23APR03-CLUSTER289709_1
gtcatacatcatccacattccacacacttgcatagttgcattatatgcaagcaggcatgcaccacgcaccagggcagcgtgcaagcaattaccagcagacacatcacacagaagctagagcacatcacgggcgggcgccggcgatgtcgtcgtcaacaccgagagagcgaggcggcgggaggcagttcccggtggggcggcgccggtacgccccggtggccgacgcggggtgcggcgggtgccgcccgacgacgtcgaggctgctccgcctgccgtccttcctcaagccctgcagccagctgttgggtgggggtggtaatagcaaagctgccgcgacgacgacgacaaggaggaggagtggtggcggcgccgccgccgtcggtgagcattactcctgcgcctccacctctaccacggcttccttctcctcgtactcctcctcgtcgtcggccgccacgcgcagcacgggcggctacgcggcgtcgtcggcggcctactcctcctccgactgctgctactactaccactgccacccgtcgcgcgtcgtcgtgtacggagctggacccaccgcccccatgcaacagtaccaagacccagcgtcgtcgtcgctccacaagcagcagcagcaggagcaggcgtcaccagctcgcgcggcgccgtcggcagtcggccataataataagaagaagaagatgaggaggagggcggcggaggacggcgtgggcgtgggcgtggcggtggagaaggagtcgtcggacccgcgcgcggacttccgcgacagcatggtgcagatggtgctggagacggggctgtgcgactgggacggcctccgcggcatgctccgccgcctgctcgccctcaacgcgccgcgccaccacgccgccatcctcaccgccttcgccgaggtctgcgcgcagctcgccgccgctcctcctcctcctgcgccgtcgtgccagtaccggcgctgcctgatggcacatggcagcgtccacccaccaccctaccccgctcgtgccgtctgctagctgtaacggacggacggacctgatggcgacaacagggctatgcgcttacaaagtgcagatttttaactgtggttattagtcaggagattaagctaaatcaaggacagataataaagtggcgtggcagcagcgttattaggctaccaccatgcatgcatgttcttgagatcccaggtagtagtagttgccccgatcttttggtttgttattttcagtcgatctcgcagttagaattgtgtgtgtgaggttgtgcagtgcagtgcagtgcacttgtgcttgcttgtgctgtgtgtatactatgggacgacatggcctttccaaaagcatgaagaggccacccatgtgtatcatccataatctgtacacgtatgcatgttgtgacttgttgaattgtacgtacgcttgtgtttatgtagtatgtttgcgctaaaaaaaaaaaaaaaa

SEQ ID NO: 2312 - DNA, 1993 bp, Zea mays
  unsure (1)..(1993): unsure at all n locations
  Clone ID: ZEAMA-23APR03-CLUSTER28_4
aacctgaggtggagagatcgcacgcgccctctgccgcttgttcgttcctcgcgctcgccaccaggcaccaccacacacatcccaatctcgcgagggcaagcagcagggtctgcggcggcggcggcggccgcgcttccggctccccttcccattggcctccacgatggcgctccgcctcaangacgtcgcgctntgcctctcnccgccgctnnncgcccgccgccgccgccgcagcagcggcaggttcgtcgccgtcgcctccatgacgtccgccgtctccaccaaggtcgagaataagaagccatttgctcctccaagggaggtacatgtccaggttacacattcaatgccacctcacaagattgaaattttcaagtcgcttgatgattgggctagagataatatcttgacgcatctcaagccagtcgagaagtgttggcagccacaggatttcctcccggacccagcatctgaaggatttcatgatgaagttaaggagctcagagaacgtgccaaggaaatccctgatgattattttgtttgtttggtgggagacatgattaccgaggaagctctaccaacataccagactatgcttaacaccctcgacggtgtcagagatgagacaggtgcaagccccactgcctgggctgtttggacgagggcatggactgctgaggagaacaggcatggtgatctgctcaacaagtatatgtacctcactgggagggtggatatgaggcagattgagaagacaattcagtatcttattggctctggaatggatcctaggactgagaataatccttatcttggtttcatctacacctccttccaagagcgggcgaccttcatctcacacgggaacactgctcgtcacgccaaggactttggcgacttaaagcttgcacaaatctgcggcatcatcgcctcagatgagaagcgacatgaaactgcgtacaccaagatcgtggagaagctgtttgagatcgaccctgatggtaccgtggtcgctctggctgacatgatgaggaagaagatctcaatgcctgcccacctgatgtttgacgggcaggacgacaagctgttcgagcacttctccatggtcgcgcagaggcttggcgtttacaccgccagggactacgccgacatcctcgagttcctcgtcgacaggtggaaggtggcgagcctgactggtctgtcgggtgaagggaacaaggcgcaggactacctttgcacccttgcttcaagaatcaggaggctggaggagagggcccagagcagagccaagaaagccggcacgctgcctttcagctgggtatacggtagggacgtccaactgtgagatcggaaacctgctgcggactgcttagacaagacctgctgtgtctgcgttacataggtctccaggttttgatcaaatggtcccgtgtcgtcttatagagcgataggagaacgtgttggtctgtggtgtagctttgtttttattttgtatttttctgctttgatgtacaacctgtggccgcatgaactggggcgtggagatgggagcgaccatgccgtactttgtctgtcgctggcggtgtgtttcggtatgttatttgagttgctcagatctggctctgcttttcagctgggtatatggtagggaagtccacctgtgaaatggggaacccattgcgactgcttgagttggagcatagtttatcatgcgccctatgacgcatcgtgaccccaagacatggtgtgtcgcgttacatagttgttcaggttttgaccgcatggtctggaagcatttgttttgccttgtacggtctcatagagcgttaggatagtgtacgtctgtgttctagctttgttttgtctggtgctttgatgtaccacttggggccattaggctggacatggagtgaacatgttgtacattgtcgctggcggtatgtttcggtatgttatttcagttgtttagatctgttaatttttttgtgtagct

SEQ ID NO: 2313 - DNA, 1816 bp, Zea mays
  Clone ID: ZEAMA-23APR03-CLUSTER2910_2
gagttaaaaaacatttaatttttcgaaaagtgacagccacaactagcacatatacaggaaccattattgcatctgactcttgatctaacggacacccgacgctgatagtatagtacagttgttgccagaaaccagatacgtatccactgacgtaaatggtattccgtaccttctgacgatactgtgcgatgaagtaacctccttttaccactggatccttggcgcttcctcgtcacgttcccagacctcgaaagactattcccctcaaccctccaaaagaagagaggactgttgaaacttggatgccatggcatacgtccacacgccaccgtaccagtcgagatcaagacggcaataatagacaagaacaaggtgcgtggcagtgcactcgacgatattaatggagctgctttgcacgggcggcagacagccgtagacagagcagtgacggtcgtcgtacacagatcacgatgctgctcccacactcttcgtcagcctctgcaactgctaccactcgtgggctagcactagcagcagcagcagcagcaccgccgcgtccgaccgctcgcccccggcgcgcgcgcctcctgcctccacgcgcgcgggccgagacgcatgcgacgggcgttggcgccgaccgcgcggccgaggcgcttctccaaagcgggctgcgccgtgagtcgctgccgcggcacgtcgcggtggtgatggacgggaactcgcggtgggcgcgcgagcgggggctgacgcccgcggacggccacaaggccggcggccgcaacctggagcgggtcgttgcgctgtcgcgcgcctggggcatccgcgcgctcaccgccttcgtctgctcccgcgagaacttgagccgccccaaggcacggccctcgatccctgcttttcaataaactcgcgtacacatcggacgacgaccctgacacgcactggtgcgttcttgtcttcccgctcatcgtatctgcaggccgaggtcgactacatgatgggcttgtccgagtggctgataggcgacaacatcgacaagctctcgaggtcgtcgtcgtcggctaaaaaaaacctgcagtgatcttgcatagcacagcgccacagtataccgtttgaattttttttacatgttctgcttccgcgttcaggcaggggatccggctgcaggtgatcggcggacgccgccgaagatgccagcctctctgcggagcgcagcggcgcaggccgacgaggccacgaggcacaactcgcagctgcacgtgatgctggccatctgctacagcgggcgatgggacatggtccaggcgtgccgggagctggcccgggaggcgcaggcgaaccggctcagtccggacgacatcgacgagtcggtcatcgccggcaagctcgcgacgagcgccgccggcgagttctcctgtcccgacctggtcatcagaaccagcggcgagatgaggctcagcaacttcttgctgtggcagtcggcgtactcggagttgttcttcaccggcaagatgtggcctgactttggggaggctgagtacctggaagcgttgcgctccttccagggcagagaccgccgcttcggccaatcaaaattactctaacgcctcgtttggtttaacgtttggtgtccctctattttagttttatttagttcctaaattgtcaaacagtaggattaaaacagagactaaactgatttagtctctagtctctcaagatatggttaaaaagactaaatcatattaattttacatttgcccttcatttagttcaattgtactaatagcaggagaatattaaaggctattttctgttt

SEQ ID NO: 2314 - DNA, 1892 bp, Zea mays
  Clone ID: ZEAMA-23APR03-CLUSTER2916_1
cttgccagctcagctgagcagcaggatgaccaccatcaggaatcggcggcggcacggcgcaggtcgccgccagcctccccacatcccgaactttacgagccggcgtctgcgtcgctggcgcagctgtgggacccaccgccacttccgcaccttgcttttgctcccgctgcggatgagagctcttcgtcctccagcttacggcggcgtgccagtgcgccgctgccccgagcggatgaagactttgtggtgccatcgagcgcttactcgcgtccaacagtgggggtggctcatacacactctgtgtcagcaccaccactgagggcaatcgagacgcgggcggtgccatctaggctggtgacagccgggggtaagcggccaaggctggagaggaagtactccaagattgttgaccagtaccgatccttggatgaggttattgaagcattagcacaggctggtcttgagtcttctaatttgatcataggaattgatttcacaaagagtaatgaatggacaggaaagaattgcttcaatggtatcagcctgcataatatcagtgacaacccaaatccttatgaacaggcaatatccatcattgggaaaaccttatctgcttttgatgaggataatttaattccttgctttggttttggagacgcatctactcatgaccaagatgtatttgccttctatcctgatgaaagaccatgcaatggttttcaagaagctttagctcgatacagagagattgtacctcatcttcgcctttcgggtcctacgtcattcgccccaataattgacatggccacaaccattgtggagcaaagtggtggccaataccatgttttagtaattattgctgacgggcaggtcacaagaagtgtagatactgaatttggtcagttaagcacccaggagcaaatgacagttgatgctattgtacaagcaagccaattcccattgtctataattcttgttggagttggagatggtccatgggatatgatgaaggaatttgatgacaatataccagctaggtcttttgacaatttccagtttgtcaacttcactgcgatcatgtcaaaaaagataagtcaaagcaaaaaggagacagagttcgccctttcagcactaatggaaattccattgcaatacaaggcaacattagagcttggaattttaggacgtcgaattggagagtcacctgagcggattccacttcctcctccttttgcaagttatagcacagtttcaagagcagaaccatctcgggcaaatagttatcgaagtgtgccttcacatccaagggaggagccagctgtaaattcaactatcacagcatcagttacatccccatcagctgccgaaagtagagttttagaaccccagatgtgcccagtttgcctttccaaaccccgggacatggcatttggttgtggccaccagacatgttcagaatgtggaccgcaagtcacagattgccccatctgtcgaaggcccattgacacgagagtaaaattgtactaattatttttgggtggaactaggtttaactgaagcacatgccaggagtagaatccactaaaataaatctctatttgactgttaacgatgtagtgtgaattaatttaataaatcagacgtagagaaaaggaggatacttgttctttgcttgtatcctgttcctacattgtgcgttgatagatgtgaggctacttccattatctgatactggacaggcgccctacttcgctgcggcgattacatataatgttgaagtatggttatggtttgtctgtaaactggatggtatttggcttgttagtatggataacctagcttgtatataaagagacaatcattagtaagtgatgtggtttggtaatatgaat

SEQ ID NO: 2315 - DNA, 1539 bp, Zea mays
  Clone ID: ZEAMA-23APR03-CLUSTER291_5
atttattaaactttcgcaagcgcaggtatctccccacagggcagcgcgtgcggaaaccctagtcgccgccgatgtcggaccctttctacccgtactaccgcggagccttcccgggcggcgacggtgcgcagccgccgccacgttactcggattttgaggtcgacctcatcgcggcccgttacgccggcaccctattgccttatccatcctctgccgacgtcggcgccttcgactcgtatgtcggcgcgagacgatccgcggaaggccccgaatgttgaagattcttatcctgagcgaccaggggaaccagattgtccttatttattgaataatagatgtaagtttaaatctaaatgcaagttcaaccatccgaaggatatggtgaatgcattaggaacaggaacaaacaatgaatctctaattgctgatagcgctgtcttaccagtgaggccttctgaacccatttgtgtgttctatgcaaaaacaggcaaatgcaaatttggtgccatttgcaagttcaatcatccaaaagatattaagacatcacctttgattgcaaaggaaaccatatatacagcaacaactgatgcagcagatgccccgaccgaggcgtgtaacgcaaaggggcttcctataagacaaggtgaagtggattgctcgttttatatgaagacagctgcaaatatggttctatttgtcgcttcaaccatcctgatcggccagggccagctgcggatatagcttttatggttccactggttcaagctactcttccttcatcagcacccattgtccctgcagtggttgaacctttttcaatgatctatcctcaaaggccaggagaaactgtttgtgatttttacatgaagacaggatcttgcaagtattctcagaaatgcaagtttcaccaccccatcagtcgttttgccccgcattccaaagaaaacggggatcctcaacagcctgcgacacttgctagcctgccaaggagagaggacgctgaggcttgtgccttctacatgaggtctggcatgtgcaggttcggtgcgcactgcaagttcgaccaccctcctcgcgaggaggctatttccgagctgcaggcagccggaaaggaaggaatagaagggccgagcctcgtccagcgcgaccatgatgtctaatactgtatcctgcttcagtatgtaataccatgtgaatcgcactgttagttaatgcttggtgctgtcagtcttgttgggagtctgactcgtaaagctcattatcatcggaagtgtttgtcggaggagtgctggcactaactatttatcttcagttggttgtcgtgttgccaacttgcgatgtcaaggtgcatatttcagttttttagagtaaaaatgcactttacatcctgccgccaaacttaactatgggcctgtttatggccctgtttggtttagcttttttttaccagcttttctaaaaatctggttgtggaaagaatttgagtatcgtgaagattacatgtggagaagatgaagtggtccaaagggtccatgatct

SEQ ID NO: 2316 - DNA, 1292 bp, Zea mays
  Clone ID: ZEAMA-23APR03-CLUSTER2920_29
ctcactgccaaccacacgttcccaagccagccttctgacgaaggcagcttgagatacagcaggctagcttcggagttcggggcactcagcgatggccattgccggcgctctcctcctcctgctcggactcctcgcgcgggaggccgctgccggcggggtggcagagcgcgcacgccacgttctacggcggcggggacgcgtccggcacaatgggcggcgcttgcgggtacggcaacctgtacagcacggggtacggcacgagcacggcggcgctgagcacggcgctgttcaacgacggcgcggcgtgcgggtcctgctacgagctgcggtgcgacaacgacgggcggtggtgcctgccgggcacatcaccgtcacgccaccaacttctgcccgcccaactacggcctccccagcgacgacggcggctggtgcaacccgccgcgcccgcacttcgacatggcccagccggccttcctccagatcgcgcagtaccgcgccggcatcgtgcccgtcgcctacaggagggtgccgtgcgtgaagaagggcgggatcaggttcaccatcaacggccactcccacttcaacctggtgctggtgaccaacgtggccggcgccggggacgtgcagtccgtgtccatcaagggctccagcaccgggtggcagcccatgtcccgcaactggggccagaactggcagagcaactcgctcctcgacggccagagcctgtccttccaggtcaccgccagcgacggccgcaccgtcaccagcaacggcgtcgctccggcgggctggcagttcggccagaccttcgagggcgcccagttctagctacgactactccatcgacgagtgtgactgtcagagcaagagagaaggagaaaccttcttcgctgtagtaaagaagaggctcccgccattccgaggctgcttattattagcacccgcttaggcatttccttctcttattattaccataggattgagctgtttattttctgcaccagtgattgtagcaatgggttaagcaaaacaaaaacctgcaaggctatttattgtagggctgcaggggagtggtgtcgtgcaacttattgtgttgttacgctgtactagtagcaacccccgaatctggccacatggtggtgggagatgtttgtggggattgcaccttttgggaccgtgaacatcaatgcttgtttatggtctattacatgcagtatatatgatatatatatatatgctcgtggtttgatcctcggtttgcaaaaaaaaaaaaaaaaaaggcccctagggcc

SEQ ID NO: 2317 - DNA, 1374 bp, Zea mays
  Clone ID: ZEAMA-23APR03-CLUSTER2920_34
atctcctcacttcacaccactcccgccattgtsctgcgcctttctgcaccgccacacacaccccgctccaatccaatggcgcctcgccaagccgtcctcgcggtcgtggtcctcgccgcgctgctcccgttcgccctctctcgcgggctgcggcttggccaccaccgcgcccagccgcacccgaggccgcacggccacgcaccgctcggaggtggcgcgtggtcctcggctcacgccaccttctacggcggcggcgatgcgtccggcaccatgggcggggcgtgtgggtacggcaacctctacagccaggggtacggcaccaacacggcggcgctgagcacggcgctcttcaacaacggcctcagctgcggcgcctgcttcgaggtgcggtgcgacgcggcggggggcggcggccgctcgtgtctgccgggctccgtcgtggtgacggccaccaacttctgcccgcccaacaacgcgctcccstccgacgacggcggctggtgcaacccgccgcgcgcccacttcgacatgtcgcagcccgtgttccagcgcatcgcgctctacagggccggcattgttcccgtctcctaccgcagggttgcgtgcaacaagaagggcggcatacgtttcaccatcaacggccactcctacttcaacctggtactggtgaccaacgtgggaggcgccggcgacgtgcacgcggttgccgtgaaggccgagcgctcccccgggtggcaggccctgtcgcgcaactggggccagaactggcagagcaacacgctcctggacgggcaggccctgtccttccgcgtcaccaccagcgacggccgctccgtgctctccaacaacgccgccccccgcggctggtctttcggccagactttcagcggtgcccagttcaactgaacacacccccaccgttcatgcagcgtcgacgcagtggcactagtactagttgttccgtccaccccgattggagcctgccgagaggcgccatggttttatgaatggtctgcacctcgcatttgctcctgggaattaccagtagtttaggcctagtaatagcgcgggttttatcgtgcttgcgttagcatggtgttttagtgttccttggttgtatccggcttggaaattggaggtggtggtaaggctggtctgcagataaacggaggcaggctgccttgtatcacccgccaattatgcgtttagggcctcatggtgatggctccttcgagatgagatgttttctgagttattcaagtgtgttagttgtaatgaatcttatcaagttactatttcctaatatattatccttcggaaaaaaaaaaaaaaaaaaaaaaaaaaaaaaaagtactctgcgttgttaccactgct

SEQ ID NO: 2318 - DNA, 1340 bp, Zea mays
  Clone ID: ZEAMA-23APR03-CLUSTER2920_42
acaccccgctccaatccaatggcgcctcgccaagccgtcctcgcggtcgtggtcctcagccgcgctgctcccgctcgccctctctcgcgggctgcggcttggccaccaccgcccagccgcacccgaggccgcacggtcacgcaccgctcggaggtggcgcgtggtcctcggcccacgccaccttctacggcggcggcgacgcgtccggcaccatgggcggagcgtgtgggtacggcaacctttacagccaggggtacggcaccaacacggcggcgctgagcacggcgctcttcaacaacggcctcagctgcggcgcctgcttcgaggtgcggtgcgacgcggcggggggcggcggccgctcgtgcctgccgggctccgtcgtggtgacggccaccaacttctgcccgcccaacaacgcgctcccgtccgacgacggcggctggtgcaacccgccgcgcgcccacttcgacatgtcgcagcccgtgttccagcgcatcgcgctctacagggctggcattgtccccgtctcctaccgcagggtcgcgtgcaacaagaagggcggcatccggttcaccatcaacggccactcctacttcaacctggtgctggtgaccaacgtgggcggcgccggcgacgtgcacgcggtggccgtgaagggcgaccgttccgcggggtggcaggccctgtcgcgcaactggggccagaactggcagagcaacacgctcctggacgggcaggccctctccttccgcgtcaccaccagcgacggccgctccgtggtctccagcaacgctgccccgcgcggctggggcttcggccagaccttcagcggggcccagttcaactgaacaccctccatcgttcccgcagcgtcgtctcgtccgtcgtcgacgcggtgccacaagtagtagttttccgttggtcgtggtagagtcgtccaccctcactcggagcttgccgagaggcgccatggttttatgaatggtgcatctcgctttggatctggggaattaccagtagtttaggcctagtattagcgcgggttttgtcgtgctggtgttagcctggttggtgtggtagcgttttgcttggttgttttggaattggaagtggtggtaaggctggcttgcagattaacggaggtaggccgccttttatcacccgccaattaagcatttgtggggtctcatcgtgatggcctctttcggatgagatgttttgcgtgttacccaagtgtgttggttgtaatgaaccctattaagtttgtgctggaacttcagtatgcatagtcatttggttcgctaaaaaaaaaaaaaaaaaactcgagagtacttctagaa

SEQ ID NO: 2319 - DNA, 1280 bp, Zea mays
  Clone ID: ZEAMA-23APR03-CLUSTER29236_1
attaattatcgcctcaaaaaatgtattaatttaagtggcataacaaaactgaatgctaccgagattctacatcagtttccagctaactaatgtcacactacatacatctaacacaggaactaacagtaattcgagttcagggcacaaaagcacatacactgtctaagaaataatgtgtatatataatgtactactatcaaagtgtccagacagtcaaatataatgttgctaggaataacactggtaacaaccttctaaagaatgaactacttgcggagctgtgatggtgtcgagccagtagcaaggtcaaatccaggaggaataaatacaacatcatcccattttgaggaggagctatccttcatagatttaatgatatcttccaaagaagaaacctgagtgtcaccaaacctaacagcaggattaggtttttgctgatcacgggaggtccggtgcagtgagttatccaagtcctcctttctgaaaaaaactggacgatatctcttgttgtcactcatcaagaccaggctccttgactgaaaaactggcactcctggaaatccctctccggcatacagtccttcatcttgcatcaacttaattgcattagccacctgagatgaatcagggaggaatctaaacgccacaccatccgacttcatttggataaccttgttcagcgcgacaggaacgacaccagagccggcgcgcatatcgccatccatctgctccagcagcgcgtcagcatcttccttccggaagcagagcagcccgagcgcctgcgttggactcacgctctcgcccccttgccctcccacgcgtgtggacgacacaagcacgaactcctgggcggcgttggcgagcgcgtacacgggcaccccggcgagccgctcctcgatctcagaggtaggtagggccccggaggtggaggctggcgaggtgatgcgcgcccagggcggcggcggcgggagcgcccgggggaaggaggagaggaaggaggtgacatgggcttggatagggaggaaggggttggggaagcgggggctagggttagtgtctatgttggaggtgccgccgtttgtagttgggttcttgagccatgggaactggaatcgaaaaggcatggcggcgacggtggcggccggtggccggtggccggtgggagagccggagaggagagaggcagggccgcaacccgcaagcacggcggctgcacgcgcacaaggaagaagatacgagcgcaatagttcaggttttttgattaggatgttctaggtaag

SEQ ID NO: 2320 - DNA, 1384 bp, Zea mays
  Clone ID: ZEAMA-23APR03-CLUSTER292717_1
aaaaagggcagtatggtaaaataaagtcgggtctcctaggccagtcatacatacaaacaccatcaaacggcagcccatcggccgtagtatcttgctcctcgccctccatccgaacaacagcaggagcccgagcccgaacccgatattccgcattcctacccagcaatggtggcccttgtctaggtggacgcggtgcaagaggcgaagcgggggccgatggatgaggaggggcagcgaacgccgcagccgatggtggtcgcgcggaagcgccgccaagccacgccggatcacccaccctactgctggatgatcggcgaggcaaccgacgcgctggccgaggacggcggctcggaggaggactccatctctgcctttatccgcgccaggcaccccggcgtgccccccgcgcacgacaggctcctccggcactacctcggcaagcacgtcgccgagggcttcttcgtgcgaactgccacggggcggttcgagcgcagcccccaggagaacgctgatgaggaggagctcccggtggagcaggctgatcaggccggctcgtgcaagccggcgtccgttgggtcttcggtggtactggtagaggccaagcccaagcgtggccgaggcaggccgcggaaggatggctctccttcgacactggccgttgctgcaatgtcatcggttgctgttgccggcaaggacgaaatccatgcaccgtccttgaagcccaagcgccgtggccggcctcgcaggcaggcaggggcggaccacagggacaaggagcatgagcctccgcgtgagctggcactggtgatcctcggtgatagctctgccgcaccgatcatggacaagccatgcacaaccttggtccctccaaccacgccgcctgtggacggtggccagcctatcgacctggctctggcgaccaccacagaggtgcctgtgcctgaacctgcggcaacgcccgccatggacaaggacggtgccgatgccgatgcttcttcaatcgaatgacagcatttgcacagcgcccacttcgccagagcctggcagctgggcttgcaagctggcactcgtgcctgctgctaatggtttttgattgctgacaagaaggatggccttacggaggctccatctctgcaacctacaaggatgttcatcagcatcacaaggccggcactgctccaacactcaactctggcggcaagccggcaagggccgcaaatcagcggtggtggctagtggtgaccgtaattgactttagtgtgtcctcttctactgaattattaggtggcttagcgcttacgagaaactcagtcacaacatcgatttaaactgtggatgataactggcttattaaaaaaaaaaatgcaacttttgcggataattt

SEQ ID NO: 2321 - DNA, 1954 bp, Zea mays
  Clone ID: ZEAMA-23APR03-CLUSTER2928_3
gcacgagaccattacctagaacatcctaatcaaaaaataatggcaaatttctcgtccccagcaaagtccctccattcggtctcatctcccatctctcttctctctctcccgcgacatcagcggcggcagcggtggggtggggggacggcattgcgagctcacagtctcacaccacccgccgcgtggtgattccgagaggttgctgtgccgctggctatgtagtgatgtggaccgtgatctcgacggctatccgcggctgagcgggcggcggcgatgaacgaagcgagcgccagcgctggcgtcgggaccggctctggcggggaggtgccgctggtatacaaggcctggaaggggaacaatgtgtttttactgaaggggagattcatatttggtcctgatgcaagatccttgtttgtcaccatgttccttattgttgcgccagtatcaatcttctgtccattagttgcgaaggaattgatggataaattctcttatggtctgggattaccggttatgattgcagcagttctattcacagcatatgatctgagtcttctgcttctaacttctgggagagatccggggatcatacctcgcaatgcacatcctccagaacctgaagggtttgatgacaatgcagaggttggggctaaccagactccacctgtgcgtttgccccgagtgaaagatgttgttgtcaatggaattactgtgaagataaaatactgtgacacttgcatgttgtacaggcctcctcgttgctcccattgctctatctgcaacaactgcgtggagcgttttgaccatcactgcccatgggttggacaatgcatagggcttaggaattacaggttcttctacatgtttgtattctcaacaactctgctctgcctgtacgtctttgggttctgctgggtgttcgttgttaagatcagaaatgcagaacagataacaatttggaaggcaatgacaaagacccctgcatctgttgctttaatcatctacacattcattgcggtttggtttgttggtggcctctctgtgttccatttgtatctcatgagcacaaatcaggtaaaaaactgttcccaactcccacgaaggatgtattcatatccttgactgatgaagtatgctgcgccaattgctaatcagttgccctacctcggccttgtagacaacatatgagaacttcaggtatcgctatgatcaacgagccaacccatacaacaggggaatcatggtaaacatcaaacagatcttatttaccacgatccctccttccaagaacaacttctgtggtagggtccaacaggagcatggtctaaggcctcgtccaacaaatggtttcatgagtccaaacatggggagagctgttggtgacatcgagatgggtagaaaaccagtggcttgggatgagcctaggatggcagctgagattggtgatttaggagcaggtctgagcaacctgctggaggacaaggatggcaggtttcgtagcgcatctccagatctcagccgcgacgcccttgcagttggaggaggcttagaagaggaaggctcctcggcgatgaacgctgggcgttcaagctggggagttgaagcaggtcgatgatggcattgaccgtgtaagcggctgtagtgagacgctctgggttgttagtgccagttcgctgctaatctgttgttttgtttgagatttgaggtcactaatgttattagactcatgacctgtatggcggttgtttctggactttcttttcttctttctcttaatttgagatggtctttcgtgtctattatttgaaccagttggtttgtgacgtctcccggtttggcaagttatgttttgtctgtatataatcggacagtaagcctaaaataggatccagctgcttggatttggatggtaatggttgtgaataatgcgctaccttttgcattgcagtaactg

SEQ ID NO: 2322 - DNA, 1269 bp, Zea mays
  Clone ID: ZEAMA-23APR03-CLUSTER2930_1
gcagttcatcccctcacctcatctaaccaacctcccgagagcagagagctgagagagggagagaaaaagtaatccgacggaaacgacaagggcgcggcgagggcggggacgggaaggccctgggcgcggaggcaaaaagcacatggcatcgtcgagggtgataccgtcgtcctcgccgtcgcacacggcctcggatctcgcgcgcctacggcaagccgccagcaggcccgggcggcggggggcagcgggccgggtctccatgaacgtctgaggagctcctcctgcggccatctacagcgacatgcccaccccgggcgccgcccgcgtcggaacccggactgccgaagcccccgccccccgcctccagggacatgcccaccccgacggcggaggaggtgtggaaggagatcactggcggaggtggcagtggggaagccgtggctcccgtggcggctcaggctgtcgctcccgatggtggcgctggcacaggtggccctgaggaaaccgtggcgcccgtggcggctcaggctgccgtgcccgctggtggcgccggcggcccggagatgacgctggaggacttcctggctagggaggagggcgcggtgaaggaggatggggttagggtttcgggcccctctgcgccggccatggggttcctgggcggagcggagggcgtgggtgtgcctggcggcggaggcgggaggggaaggaagcggcagctcatggatccagtggatcgcgccgcgatgcagcgacagaaacgaatgatcaaaaaccgcgagtctgctgcccggtcacgggagaggaagcaggcttatatcgccgagctagaatcgctggtaacgcacctcgaggaggagaatgccgagttgttgagagaacaggaagagcggcaccagaagcggcttaaagagctcttggaacgggtgacgccagtcattctgaggaaaaaaccatcaggagatcttagaagaacgaactcaatgcagtggtagattggagccaagctcagtcgccgtctctttacagttataacatagaatttgcccctgtatgtcatttttctatttatatatgcgccaactaagttgtagtatcttagctgaaatagcatgggcaattagccgacacaaaggttaaacgaaatcatattatgtaggagtgctcatgaccaagaaaggttgctgttcctgcctgctcgtgtgttcattccgccctggtttatttttaagaaaaaccacacccccaaggggggtgttttagaggtcc

SEQ ID NO: 2323 - DNA, 1299 bp, Zea mays
  Clone ID: ZEAMA-23APR03-CLUSTER29408_1
aaaacaacaaaaaaacccagcctagcagctgctagctattgctactacctcccttctccatccgctccaagttgccatgcgcgctggctacggatgatgactactacaacaagtcgatcccagcagtagaagctagctagcatcgagatctgctggctccggcatatcatcgatccccggccggcccgctgtagagcaagcaaatggccaagtactactggggtatgctgggcgccgcaaccaccacgacccgcgctggtactggtagcagcctcatcaggtccacctggccacctccggcagcgcatggcggcggccgcagcggcgagccgtcgtgggaggagctggccttcgcccaggacgcggcggggcaactcggcggctgcgtctggccgccgcgctcctacacgtgcaccttctgccgccgagagttccggtccgcgcaggcgctgggcggccatatgaacgtgcaccgccgcgaccgggctcgcctccggcagtgcgccccgccggatcatgaccaggagccgatcgccgcgcctcttccagcgccggaattggcggatcaccagcagcagcttctgcaactgcatggatctcccatgaccaaggcggcagtattattctctggccgccctgctgctgcttgctgtactcatcagcaaacttattgcaataacaacagggagggggagggggaggattctcctgctcggtacatatcaacgacgacgaccatcatcaaggagagcaagagcaaggtactcatctccatacctgcagcaacgacagcagcggggagcaaaaaagccgctactactatagcaatcatcggtgaggaggaggaggaggaagaagaagaggaagagatcatggtgacggggcggaggacgaaacgaaggcggctagtccatcagccgttctacgacctgcggcggcttccgccggcatcatcatcacccaataaaggaggagttgaagatgatgatgcaaaggtacccaaattaagcagccctataagcctcagtcatcatcttgcaggccggcaagaagaagtggatctggagctcaggcttggcactagctgctagctagtcgcgatcggccgtccgatccctaaattaagttgcgtgaatggatccatatatctctcttttcacttcaccataactaagatcgagtgtgtgcgtgcacaactgaatcatatatatcatctgctgctgcttgcttcattcatatatcatatatatatagtatgctcctcgtgataaaaaaaaaaaaaaaaaggcccctagggcc

SEQ ID NO: 2324 - DNA, 2211 bp, Zea mays
  Clone ID: ZEAMA-23APR03-CLUSTER29442_2
gcacgagaccattacctagaacatcctaatcgaaaaaactacaactgttggagtaggcccgggttggccacggccgccacactgctccgctctgctctgctctctgaaggcattgcctgcccggttccttcccccgccggcgtcgtcggtccgcgagttgttggcatggccgccgcagggacgcagctaggccggcttctgggcggcctctggttcctggccgcgttgctaggacgaccgggcgctacggcggcggcaccagctgtggccgccgtcgacgggcggcgcgccgtcgcggcgaccggggaggacttcgtgtgcgcgacgttggactggtggccgccggacaagtgcgactacggcacctgcgcctggggccgcgccggcctgctcaacctggatctctccaacaaggtcctgctcaatgccgtcagagccttctcgccgccgctgctgctccgcctgggagggtcgctgcaggacaaggtggtgtacgggtacggcgccggtcggccgtgcgcgccgttcgtcaggaacgcgtcggagatgcacggcttctcgcagggctgcctgcccctgcgcaggtgggacgacctcaacgccttcttccggagatccggtgccaaggtcgtgttcgggctcaacgcgctgaacggccgcgtcccgttgccggacgggtccatgggagggccgtgggactacaccaacgcggcgtcgctgatccggtacaccgcgaacaagggctaccgaatccatggatgggagcttgggaacgaactgagcggcactggagtgggagctcgggttggcgcggaccagtacgccgcagacgtgatcgccctgaaagcgctagtcgacgacgtgtaccggagcgagccatcgaagccgctggtgcttgctcccggaggattcttcgaccaagcctggttcactgagcttgtcgtcaagaccgggccggatctactgagcgtggtcacgcaccacgtctacaatctaggaccaggaagggacacgcatctgatcgacaagatcctcgacccgtcaaccctcgacgggatggtcagcacgttcagcgacctccagcggctgctcaagtccacggggacgtcggctgtcgcgtgggtcggggaagccggaggcgcctacaacagcggccgccacctcgtcacggacgcgttcgtgttcagcttctggtttttagatcagcttgggatggcagcgaggttcgacaccaagagctactgcaggcagagtttggtcggcggcaactacggcctgctaaacaccacgacgttccagcctaaccctgattattacagtgctctactgtggcatcgcctcatggggaccgaagttctagcagtaacattcagcggcacgaacaagatccgcgcgtacgcgcactgcgcgagagattcaccaggaatcactctgctgctgatcaacctgagcggcaacgccaccgcgcgggtctcggtgacggcccaaggggctgccgcggcgcacgcgcacaggcacggcgcgaggaagcacggcggcggcaggaagttccggcacgtgcacgtccccggcttcgccggcgccggcgaggcggcagcgggcgccgtgcgacacgagtaccacctcacccccaaggacggcgacctgacgagccaggtcgtgatgctgaacggcagggcgttggccaccgacgcggcggggaacatccccgccctggaggcggtcgaggtggacgcggcgcggcccatcgccgtcacgccctactccatcgtgttcgctcgcgttccgcatttcagtgccccggcgtgtagggtagaccggtagagtagcggtttagatgggtagattcataatgggtttggcgtgattggtgatgatggacagctaagctttccatctggtgagatgaggtgaagtgagctgcaaggcatctgtcgaaagaaaagggatgcaatgcaatgggggtgagtttgttttctttttactacttggaattgtaaaaggtcgaagaaatttatgatgatcagcggtgggaagggggaaaaaactcgttcccgtttgtctctcgaaaaaaaaaaaaaaaaaaaaaaaaaaaaaaaaaaaaaaaaaaaaaaaaaaaaaaaaaagaaaaaaaattttaaaaaacaaagtgtttcttatgggtaaaaaaaaaaaaaaaaaaaaaaaaagggggccccttttaaaggatcc

SEQ ID NO: 2325 - DNA, 1171 bp, Zea mays
  unsure (1)..(1171): unsure at all n locations
  Clone ID: ZEAMA-23APR03-CLUSTER2957_3
gccggccggngaggaaaagaaacagaaatctagcttaagcatccggctcgcacgcaccgacgcgcgacgcacgagaccgaccaccttcctccgccccaccactccccccgcgcgcgccgtgcgatcaccgccggcccccgccctcaccctggccgccttgaggaaaagcaaggccaacgccttctcctcctcctcctcctctccaccgaggtcgcgccgcgcgattgccgtcacgatggccgcgtcgctgctcgtgctcgccgtggcgttcctggttggcgctggccacggcggcatcgatgggggtgcagcagctcacatggaggtagagggctctgaggtgacctacgggagtgtgattaagctgttgcatgagaagacaaagcaccgtctgcactcacatgatgtgccgtacggctcaggcagcggtcagcagtctgtcaccggctttcctgaaggcgatgactcaaatagctactggatcataaagcctactccagattcatcgtctaagcaaggtgattccattcaaactggtggcatcatcaagttgcaacacatgaagactcggaggtggttgcacagtcacctgcacgcttcaccgttatctggtaaccttgaggttagctgttttggtggggatgaattgtcagatactggtgactattggaggctagaaattgaaggaagtggaaaagtatggaaaagagaccaaaaggtacgacttagacatgttgacactggaggttatctgcatagtcacagcaagaagtacaaccgccttggtggtgggcagcaagaggtctgcggtgtccgagagaagcgagctgagaacatttggttggcagcagagggtgtttatctcccggttaacggaagcaagtgaaaaagcactttcagtatttaccagttttaatgttaattagcataggatcagatattttactcgctttcattcgttcttgtttttcttaagataaatgaacatgggacatgacccctagtgatatgaaattggaatgttgggcatcgaaggtgtcgtacatgcttgtaattggatatttgtgatacatgtgtgaccgtgtagagactcagagatgcaagtgacactttgttcacaagtagagatgctgacatcttctagatgtgacgcagaaaagacagtcgtggc

SEQ ID NO: 2326 - DNA, 3035 bp, Zea mays
  Clone ID: ZEAMA-23APR03-CLUSTER295_28
aatcccttaccgatccccaccccaatggccaccgccaccgaatccggcagtgcgccgccggtcgacggcgaagtgagacagcgcggccgtccccgcgggagcgggcgtgggcgtgggcgtgggcgtgggcgtgggcgcgagcgctcgcagagcgcgaggcggagcaaacgcccgcggaagccccggccgtggcggtccgcgtcgccccccgcgctggagccgctagtgcccttgcctccaggcaccgaagtcgaggtccgcattgatgacgacggtttccacgggacctggttcgaggccaccgtcctcgacttcgcgcccgcgcgcggctaccgcaaccccgcgcgctacacagtcaagtacgtgcacctcctcgccgacgacgagggcgcgctctcggagcccttcgcgccgtcccaaatccgcccgcggccgccgcctctgtcgtccccgccgcgcttccaactccacgacatcgtcgaggctttccacaacgaggggtggtggtcgggcatcgtcgtgtccgcccccgacgccaccggcgccggggtcaccgtctcgttccccatcacccgcgaggtcatcgagttcccgtccagcctcgtccgcccccgccgcgactacgtcgccggtgactggattccctcccgggccgcgatggttctccgccccaaccgcgcggtcaaggtctatgaggtcggagagaaggtcgaggtgctgaggaaccgggacgtgtacggcaactcctggttccccgccacggtgagggttgtcatcgacgatctcagctacgtgcgtcgagtacttcgatctggaggaggggaagggcggatcggagaaggccaccgagtacctgcattggtggttcatcaggccagctgttgagcattcgccaagcaagcgtgagttccagctccggcctggtgctgccgtggaggcctactgtgatggggcatggtcacttggagtggtgacgagggtcgtcggagaggatgaatatgaggtcggtattattggcaagaagacgagactgctggtgaccaaggttgtggaattgctcaagccacagtatatttggaatggcaaccaatggaggattacaacagctaagggacaaactaagttgaggcggccatctaagtctggagaaagtccaagcgcaccagttaatttgatatccagtggtgaagaacaaagtcatgatcctgattcttcttccaccaaaaagtctaggaaagaactgaagcagctagaccccacattagctaaaaattctgaacatgcttcagtctctgaggtggacattcctttgttagggcattcagcaccagtgaacaaccaagaactcctgtctgaaatgggtgttttcgatggtgagcttcaaggatctgtatctggaagaagtgttgatgcccatgatatgctctgcattgctgaactaagaaagaaaacggcttcagttcgcagaaatagtgctgtccgacacacagaggaacaacttgttaaatcactcggagtgaagaaatgtatatcgaacagtaaagaggggaaaacaagccctattcaagaacttcagggaaaattgaagggaaacaacaatttctctaggaatattgttttagctttgagtgtctctagggatggccagactaatttatctccagatagactggtgtcaataggaacaaaaaggggttcaagtacaaaggttcttgcctgtaagaaattggctaagaggagaagatccaaggaactgtgcaatctaaatagttcattggatgtgactaggactgaccagcagagaggaagaaaggaagcggcagagccaatgaaagatcaccccttagcattggagtgttcgaaatctgatgctcaagggcagcttgacagaactttggaggatgcacagaacataactgaattatcaaatcaggagaacctgttacccacggtgtctcctggctttatatcaacgtctaatgggaaaggtactaacatacatgatactcaatttgaggaagagccgacagctaccctacctattgatgggagttcacagtgcatcattgacatttctccattgaggagctgctctgctttggagagatctttgccttcaccaccgcaggcttcgttcgtcaagaggtcacctgtgtggcgtgtagttgacgcaaaacatgtgtttaaggagttacctcaacaaccacatttccttccactccaaaaataccccccaacactgcgtgaaggaatagcattaggtatgatggtgtcattctcggaattggtgaagtttacaatggaagcaagcatagacgacagcatggaatggttcgaggacaaggtcaggacagtctcccttctggaggcaaatggattcagtgtgcaatctatacagagcgtcttgaccgaactgatcgagatcaaatctgagcgcgcccgttaccatggagagatcggcaagctgagttcaaagctagcggagaacacggcttcctcctcccgagtcggtgcactgctcgatgaaaaagatggagcggcagctcagctcgagcaagaactcgggcgcatccgccaggaaagccagaagatggcacaggagaaggagaaaatagatgcagagggcgtgagtatcaagacagcatgcagcgggtacgaggatttgtgcagcgacgcggaacgcaagttcaaagaagtcttggctcagctgcggcggaagagcgccaggtgatgcacaagctttgggtatcgtttcgctgcttctaactctgacacctgtttatgctgtagggctgtagttttatctatgtatcgcagtgggctcagatcgatgtgctgtggttacttttgtgcaagccgttcggtatcgtttatgtatctgtaggtatccatctatggcttaggaagcctgatgaagtctcgactctttataattgctactcctatattaattgccagctagttggaccgtacttagttgcttgtagcatatttagggtgcgtttggacacttgaatcagttctgtttatcatct

SEQ ID NO: 2327 - DNA, 1716 bp, Zea mays
  Clone ID: ZEAMA-23APR03-CLUSTER297395_1
ttctcttttttttttttttttttttttgataagtagctagattgccatgcgcttacgcaagtacactagtagtggtgctatatagctgtcattattgaagcatgcatgcatcgagaatttgcatccatgcatgtgtagtagtgcaggggggagctgacacatgagatcagcaggaacagtgaggatcgtccgactccccggcgtggagctcgtcatcgatcgtcgctcagctagtatatatggcaagcaggacgacaggcggcgcatggtcgatggaggcggtgacgctgccggcgagcatggtgctggtgcaggtcttcaccatggtcgccgtgctcctctccaagctggcgctgaacgtggggatggagcccttcgtcctcctcgcctaccgcaacctcatcggcgccatcatcgtcgctcccttggccttctactttgacagggcgatggtgcgaaaggtgaccctcaaggcctttgggtggatgtccatcagcgcgctcctcgggatcgttctcgccatgggtctctactactacggcctccgcgccaccaacgccgccatctccatcaacttcctcaacctcatccccgtcgtcaccttcctcatggccgtgctgctccgcgtcgagaagctggcggcagggacgcgggcgggccgtgccaagctggccggcacggccgtgtgcgtggggggcaccatggtggccagcctctacaggggcccgctgctgcacccgtggccgacgcacctgctccaccacgccgccgccacggccccgcaccaccaccgcaacatgccgctcggcaccgtcttcctgtgcgccagctgcctggcctacgcgctctggttcatcgtgcaggcccgcgtcggcagggagttcccctgcaagtacatgtccacgctgctggcctgcgtctccggcaccgtccaggcgctcgccatcgcggccgtcatccgcgggggcgaccgggactcgtggctcctctcctgggacctgcgcctcctcaccgtcgtctactcgggggtcttcaacaccgccgccaccttctgcctcatctcctgggccatcgccaggcgagggcccatctacccctccatgttcaactccctctcgctcgtcgccaccaccgtgctcgactcgctgctgctcggcaccgacgtgtccgtcggcagcctgctaggcgccctgctcatcgtactcggactctacgccttcctctggggcaaaagcacagagatgaggcacctcaaacagcagcagcagcagcagcccaacgccaacgggacgacgaccacgacgaccaacgccgccgaagaccacgtctagcaactaaatgcatgcagtatgcatggtaaataaatcaaattgagcagctagctagaactagctagatcgaaggagtaaattcgatcgatcgatcggccgatctcatcatgcatgtactcctacgtagacagacacacacaaattaagagacacacagggatcggagagagagacgcaaatgtcaatctcgtaagccagaaaatgaaacactagtcacccctatcctatcctatcatatcaggtttcataggtcaagcatagactgtattaattactttattgtcttctagaaagaggtattcttgttgggaattgtattaagatatcatgtgttgtagacttatagtatactagtacttgttagtattcaaaaaaaaaaaaaaaa

SEQ ID NO: 2328 - DNA, 2194 bp, Zea mays
  Clone ID: ZEAMA-23APR03-CLUSTER297915_1
gcacgagaccattactagaacatcctaatcgaaaacactggtaatgctgctgctgattcttctgctcactctggcactgttggatccagggatggactcctttttgcagactctttgtttacatcggctgattacccaacaaatctgccacatcagccagcgtttggtcaagatgagtttgtgccttcatattatacggtccacaatgctggacacatgaaaacaaagtttggtgcacaaaatcctccaatgtacacagggatgcatggcacagataatgcgtttgtgactagaaccaatttaccgcaagctttgtctttccagcaacatcatattattgatacgcagccacagacatatgcaccttgttatcagcagatggactataaatttaagcggcatgatatcgatgccgagacgaattttttcatgcagccacagtatccttatcagcaatatccacaggctgctgatgttcattggatcaatagcaatcagtatggtgttatcaactcatcagacaagtatgcagctgcgcctcaccgtggagtgcctactgttcgtcatctgggacatggcagtcctgatatctacaggaatggtgctgtaattcctaatggaagtaaccgacggggtttgacacatgtgaataactgtccttttataagttatcctgactgcttatgtgaaacctgtgaatattgtcagattcatctatctgaaaatctcaaacgttcatttgcgctcagacatacacccaaatgttcatcagacgattgcatctctgataaagcgaaaagttcaccgtcatccttggattctgtggccatgaaatctgcccaactgccctatagttcagttgatgaagttgttggggaattgtaccacttggcgaaggatcagaatggttgccgtttcctccaaaggatatttattgaaggttctcgagaggatgctcgaaaggtctttgatggtgtaattgagcatatcgatgaacttatggtggatccatttggaaattatttgatacagaaaatatttgagaagtgcaatgataatcaaaagatgcatatactttatgaaataaccaaaatacctggccagctaattgaagttgcatgcaacatgcatgggacacgtgtggtgcaaaaggtgatagaatctattagtacctcagatgaagtgtccatggttgtatctgctctgagccacggtgccattactctgatgatggattccaatggctgccatgttgcagaacgttgcttgctgaagctgtcacctgagggcaaagcattccttgtcaacgcggccacgaaatactgcgttgagctagcaaaggatcggcaaggctgctgtatcatccagaaatgcatcgctcatgcgagcaaggagcagaggaacaggttactgtacagcatcacaactcgggctctcgagctcgcagaagatgagtacgggaactacgtgatacagttcgtgctggggctcggggttgcctgggcaacgaatgaggtactggacaagcttgagggcagctatgggtacctgtcgacgcagaagtgcagcagcaacgtggtcgagaagtgcctgagagaagcgccggagcgagaacgcgcgaggatcatccttgagctcatccacgaccccaggctgcttaacgtcctggttgataagtatgggaattatgtgatccagactgcactccgggagtctgagggtactgcggtggaggctgcgttgatccgagccatcaagccacacgccggcgctcttcggaacaacatgtatgggaagagggtcctgtcgaaagcctgcctgaagagcaggaagccctgatcccaacaatcccatgccgtcctgatcgcgctcaagtgtagtacaaatcctgtaataaggtagtgttatctaggaatggggagggggaggaggaggagagtagtctgtggggtctggttggaggaggaatccacattttgggccagtgtagaacgatcccatgcgtgttgtagctgtagagttcttgggagagttcgttgcaaataagtaagcgttgtgtcgttgctacgattagtattacgtccgtcagacgatgctctgtatcttctttacattttcttacagcagtaaaatttccattttctggtaaaaaaaaaaaaaaaaaaaaaaaaaaaaaaaaaaaaaaaaaaacaca

SEQ ID NO: 2329 - DNA, 878 bp, Zea mays
  Clone ID: ZEAMA-23APR03-CLUSTER2982_28
attcgcattgctggtggcagcagcgagagcggagagtgctggaagcactcgcagcccagccgcagccgcaggcggaggccgagcaatgggaggaggatggccgcgtccccgcggggccttggcggcgccgcgcttgctcctccgagcgctgctgctctgctccctcctcgcgcagccgcatccgtcgcgcgccttcttcttcttcggcggcgtgcgcaccagcttgcacgtcccccagcaccgcggtggtggacgcgaggagaaggtgcccatgaccgtcgtcgtcccggactactcgccgcggcccgcgccgctcggcctctcgccctcagccgcgcccgcgcccgcgccggtgcccggctcggacggcgacgaagacggcacgccgaggctgccgtcagagcggcggggcacgggcgcgccctcgccgaccatcctggagcttcagcagtcaccacggcgcagggtgaggaactgaggaagcagatcggcgctgcggcctacatcgagtgcagttccaaaacccagcagaacgtcaagtctgtcttcgatacggccatcaaagtggtccttcagcccccacggaggagggaggcagtgcctgccaggaagaagaacaggcgtggatccggatgctctataatgaaccttgtgtgtggcagcacatgtgctgcttagggagtctactagaacactgaaccggaagggaggtgattcatggtgtgtaatgtgctgtggcaactggcaagttagtttgctatagatgaggatgactgctgcttttgttttccttggcccatctgctgtagtgcgtcaggctcttcaagggctgactttttaccagactgcagtgttgtgtaagaagtttgctagacgct

SEQ ID NO: 2330 - DNA, 2205 bp, Zea mays
  Clone ID: ZEAMA-23APR03-CLUSTER29878_1
cattgggaccctcgaggccggccgggataaagacagaaaggtttgaactctgaattctgaaaacagtttcggcttgctggtgccattgcggctgcggcgcatggtggtagcagcagccagcaggcatattccaaccccccaagcacactggcaaatgacaggcagcagctacgcctgcacgtgcacggccttccgctccatcagcacgaagctagcagcacggtccagcggtggccgccgttctgccgtggccccctctgctggagggccgccgctgccgccgccaccaccagttgtcatggccggcgccgtggcgtcgccgggcaagcgaatcccgccgtcaccaattggttgcaccagcagggccgccagcggcgtcgccgtctctgctagtgccaccgtcgccgcccccgctagtagtagtaggcaggcgaaagaggacgatggcgcgagcagaaacgtctcgggctttgagccatccatctggggcgatttcttcctcacctactccagccctctggccacgtcgtcccttcacaaggcatggatggtacatcgagcagagcagctgaaggaacaagtggcagcaaaactggtagcagcttcgtcgagcgcctgtagcctgcaccgtaggattcatctcatccacgtcttggagcgtctctgtctggatcatctcttcgaggacgagatcagcgacatgctagctcgaatgaacgacgtcgatgtcagtggctgcgaccttcaaacggtggccatgtggttctatcttctccgaaagcacggatacagtgtctcgtcagatgtctttgccgagttcagagacgaacaggggggtggttttacagcaaacagtgcaagggatctgctgagccttcactgcgctgcttgtctcgcgacgcgtggagagacgatacttgacgaggccatttccttcacagccaagagtttaaaatcaacagcgccgtatacgggagcagcgtcgttagcatgtgaaataaagcgtgcgctcgagatccccctcccaagacgtgtgagaatttacgaggctaaatctcgtatagctgaatatggaagagaggctgaggctgatgaactggtaatggagctagcaaagctcaactataatctcgtgcaactccagtatcaacaagagctgaagatcataacaaggtggtggaatggtctagagcttcagtcaaggctatcgttcgctcgagacagagttgtggagtgctacttctggatcgtgggagtatattttgagccaagctactctcgagctcgaataatactaacaaaagtcatcgccatcgtgtccctattggacgacacttatgatgtctatggaactccacaggagtgcgagttatttaccgagtgtatagaaagctgggaccctgcagttgctggaggtcttccagagaacatgaagttcatttttggaaaaattttggatacttaccaaagcattgaggaagaattagcgccggaagagaaataccgcatgccctacataaaaaattttattatagatctagtaagagcatacaacaaggaggtaagatggcgcgaacaagggtatgtgcctgcaaccgttgaggagcacctgcaggtttcagcaagaagtggcgcttgtcacctcttgtcgtgcgcatcatttgttggaatgggagatgttgcaggtgaagaagctttcgaatgggtgtgcagtgtgcctaaactagtgcaggcgctctgcatcattctcagactttccgatgatctcaagtcatatgagcgagagaaaatggccccgcatgttgcctcgacaatagaaagctgcatgagagagcacgaggtcccgctcgaagtggctcgcgtgaagatacaggaaatgatagatgaaacatggaaagatttcaacgaggagtggctgaacatgaacaagcaccagccggcggagctgctcgagaggatcttcaacctgacaagaacaatggtgtatatgtacaagaatgatgacgcgtacacaaattgccatgtcatcaaagacaccataaactcgttgtttgtggagcctgttttcatagcctaggacgttcgttaaatagttgtgatgccccatgcatggttgtgtgatgacacataaaagccatcaattaaaataataaatttagatattatattgattagggtaataaaatttttagtgtttaattgttc

SEQ ID NO: 2331 - DNA, 2945 bp, Zea mays
  Clone ID: ZEAMA-23APR03-CLUSTER2987_2
gagaattgaaaagacacctaaattccttagaagaacaaattttggaaagcatggcatgggagaaaggttcatcattgtataactcactgattgttgccaggccatctgttgcttcagaaattaatcgctttggtcttctggctgaatcaatgccatctcttgatgacttagtggcaaggcagaatattcatattgagggcttgcctgctacaccatctaaaaaacgtgctgctggtcgagacgacaatgctgatcctcgatcaccaaagagaccatgcaatgaatctaggagcacagtagtagaacacaatttgcagacacctccacccaagcaatgccacatggtgttgactagtttgaaagcaaaatgccatccactccagtccacatttgcaagtccaactgtcagtaatcctgttggtgggaacgaaaaatgtgctgacgtgacaattcagatattcttttccaaaattctgaagttagctgctattagaataagaaacttgtgtgaaaggattcaatatatggaacagacagagcgtgtctataatgtcttcaagcagattcttgatcaacagacaacattattttttaatagacacatgcatcaacttattctttgctgtctttatggtgttgcaaaggtttgccaattagaactctcattcagggagatactcaacaattacaaaaaagaagcacaatgcaaaccagaagtttttttaagcatctatattggaagtaggaatcataatggggtattaatatcacgccatgttgatatcattactttttacaatgaggtctttgttccagcagccaagcctttcctggtgtcattaatatcatctggtactcgtccagaagacaagaagaatgctagtggccaagttcctggatcaccgaagctatctcctttcccaaatttaccagatatgtccccaaagaaagtttcagcttctcataatgtatatgtgtctcctttgcggcaaaccaagatggatttactgctgtcaccaagttccaggagtttttatgcatgcattggtgaaggcacccatgcttatcagagcccatctaaagatttggctgctataaatagccgcctaaattataatggtcggagagtaaacagtcgattaaactttgacatggtgagcgactcagtggtagctggtagtctaggccagccaaatggtggttctacttccttggatcctgcagctgcatttagccccctttcaaagagaaagccagatacttgatcaaatataaatggcgatctctctcgtatatagctcacagctccatagcagtctattcttctgaataagtgggttgactggagtgatttaactgtacatgtatgtgttagtgagaaccagcagtttataggcagcaaactgttttaaattagctttgaggttttatcaccatttccctgctgattgaacatattttagattgtaacatctgctttgtagaatgctaatgaatctttagttttcagtgggttgacattaaaaatccttatcctagttggctggttgttgggagacattcatcaaggttatatttggtcgtcaaatagtactgtacttgattcatatctttcatatttttcactagcgttggcaaccgtaaattgctttcctgactaggaacatattcttcacaagtatggcaactctaaactatttgaccttttatattctcatttttaagtactttctctatttctgctacttttgtactgtgtatttccagcttctccaccagactgattgttagagtgtatgctcctatattatccatgtatgtgtaaatgggctgctagcccattagggttaggttcccctgggtctatatatgtaaccaccctctatgcaatagaagttgaatatcagtttctatcactaatgattccatattcagtgggctgcaagtgatttgacatacgtgccttatccttcaggtatgtctcatgttgactttgcttttgtaatggtactgttggcttcattgctggaatgctggttataatcaacctttactgctctatattgttctttttttggtttgcacaaccagggtggttggttttctgaatcaatcaatccatttcctcggacgacaagataatttttgtatgttacacttcccaaaattgcaattaattcagaagtctgcctactttcattcagttagttctcagcaacactgaaaggatatgaatcagtcaacccgatagatgtttatctggttattccaaacaatctgacatcacatctgtttctgcaggcgagataaggaaaatctgaaatgctatcaccatttaaaacattggctcctggaagttcaggtaggtgttgctgtagaatgagatggttaggaatctttacaagctcaggctatatgatttcagcagcactgtaacctggggtgcaaatgttaaggccctgcaagcactttccaggccacaccaattctgcttggttcttgaagatacattcttcctatgtgccccctatataaaagccatttctggttgttatgtttatccttgacatgtcaacagattagtgttgggttgcagtcatgcggtccttaagtctcggagaaggcgagaagtcattgctgctagcattgtgatcgtcggccacgaaagtaatcaaaaagtgagagctacttgttcctagcaaatggagaagggcgatatataggtttatgatcaaattcagtgtatgcaagcagcatattttgtttagagttagcttttgaggttcatcatttcatttcacagctgattctctatgttgtaactccttagtcgtgtagaaattagaatgctatctgcttaatttttagtgaataatttgctagtatatttttgaatgtaattgcagtagctctgcctcttcattaaggaaaaaaaaaaaaaaaaa

SEQ ID NO: 2332 - DNA, 1649 bp, Zea mays
  Clone ID: ZEAMA-23APR03-CLUSTER2987_7
gacgtggaggttgctgctgtagcatgtacatcatcaagtcaaaacgtaatacgcacaatcccgagacaaaaatataacatgcaggaaggcatacaatccatgaaggtataggaagtaattataacactatcattatatctttgaaaattaactttttttacgaaatatttgaaaaattaacttaaagaatacttcgcggcgaattctgtaatattcttggccgagctccctccattctgcatagctgccttggccttttgcatccacatagtggcactcttcctatacttatccttactatcaccatccatgacatccttgatgcacctttccacctcgtccctcgttaccaagcctttctcatccttgcgcactcggacacccaagccccacatgctctccatatattttgatatggtcggctggtctgcccagtgtggtattgccaccattggcacaccattaacaattgcttccaatgtcgagttccatccgcaatgtgtgaagaaacaacctgtagctttatgtgctagaacttccagctgggggcaccaagaaacaataaggccacgttccttgcacttgtcacgaagttcattggacaacttgtgttcttcgtttgacctcacaacccaaatgaatggtttgccagaattgtacaatccattgccaagctcctctaactgtgcttcatcataatcagagacagtaccataggatacaagaacaacagaacacggaagctgtttgtcaagccaagccagacatgactcgctgctgttgaagaggttgaaaccgtaagtcttgttcaagggcaaacggtcatcatcaagataaaatgatggcaaagttgggcctattgtctttgcatgccatgttagggccatataatctgcctccttgggttcgatctcgtggaatgagttgacgagcacgtcgtcggcgtcctccagcccctcaaattgccgcagtgatgcccgaaggaacacagggcaccagtctggctttgctgcgaacggcggaacgtcgtcgggaccgagctcgacacccagcagcccgcgtgcaaacagctctttcccgtccaccaccggcagtggcagccgtcctgcacacacctccccgtagacgacgtcgacggcgcatggctgcgataggaacgccgctgccgccagcccggccgcctgtgccacccgtcgcgcccacggcaggtgcgggtcgtaaaccagcacgcgcacaggccgcccatcggcggcctcggagcggatcagctccgccagcgtctccgagccgacggcctcgagctggcgccagtacacgtcgaggtcggggcacgcggccgccccgccgtcgtcgaagccatcggaaatggcggccaccctgaagggctccccgggaggcggggtggtggagagcacgtaccgcgaggtgacgagcgtggggcggaggccgtggtaggcgaggcagcggccgaactggagcagcgggtttgtatggccctgcgcgcccgggtacggcaggagcagtacgtgtgcggcaccgcccccgtgggcagccgatgaggaagacgacgtggtgcctgtggcgctcgtgctccccattgtttggtatcttcgctagctttgtgctcgcaggaaatcataaatgaacta

SEQ ID NO: 2333 - DNA, 1582 bp, Zea mays
  Clone ID: ZEAMA-23APR03-CLUSTER298922_1
actccacgtatccccctccattcccaaccagactagcccaccagtccaccaccagtccaccaccgccccctcgcgcacgcgcacctctcgtcctctccgatgcgcgccttcgagccgactccgccgccgccgctgcaccagccccagccccagccgaggtagccatgtacacggtgcgcccgcacgcggcggcgacggtcacccttaactgcacggaagcaccgctcgactgcctccccctctgccccggcggcggggacgcctgcttcgaatacgtcctgcccccaccacccccgatcccggtgatcccgcgcgcgccggtcgccgaccgccacgcgcccgtccgcctcatcctcgttatctccctgctctctatcttcctctccctctcgctcgggctctccacgctcctcctctaccgccgccgccgccgcctcatcctgcgacgacgccgaagcctcgccgcggccaccgccgaagggcccgacgacgaggaggagggcgggggcggtggaggggtggtgcaccacgtgtggtacatccggacggtggggctcgacgaggccaccatcgcgtccatagccgctgtggagtaccgccgcggggtgggccggagcggggactgcgcggtgtgcctcggcgagttcagcgacggggagctggtgcgcctcctcccgcgctgcgctcacccgttccacgcgccctgcatcgacacctggctccgcgcccacgtcaactgcccgatctgccgttcccccgtcgtcgtcattccctccgatctacccgtcgatgccgcggaggctgaggcaggcggtgcccaattgggagaacactacgttcacgaggaaatgtcgctgtctcaatctgaatcggagactgagggctcggaggactctgaggcgtcgtcagcctcagccactcaaagtgaaggcacgtctacagcggaggagaatggaagggacacgcccaagccaattaggcgctcggcttccatggattctccgttgtttgccgtagctcttcctgaagcaaatgatgatgtggtgcggtataattgcaagttgccaaatccccgagagatgaaggtcttcagggcgaaggagaaggaggccgcaggcatttcttcgtcctcgtgtcagtcaggccggttcaagattggcaggtccatgtcaagcagtggccaagggtttttcttctcacggaatggccgctccagtggtgctgtgctgccactgtgagttggtatgtttttactgtcaattggttgcagcctcagcaaagccgggagctggtagtgtgtcagagtttgttgatagaaaacgcagagagctgaagttgctctccgagaaaatcttcatttaggtgtgagttattcatgagagcaattgttgtcgctaaggattgctggagtgatacggttgtgtaagcttcgaagttccaagtatgataactagcttggcctgagtcaattcgggtgaagctgatgtctggcttctccatatatacttgttatgtactagtaatcatgcaagaaggaatggacttacacttgtatcaaaaaaaaaaaataaaacaaacatac

SEQ ID NO: 2334 - DNA, 1632 bp, Zea mays
  Clone ID: ZEAMA-23APR03-CLUSTER29892_1
gaaagcaggatgttcctacctttaaccaagtggaccaagatctctatcatcgactccctgcccccctcctcctcttctatataaaccatacactgaaacgacgtctaattgtgctgtgatccaggcagcagtgagctcagtacacagctaggcacagcgacggggtccggtccagggccatggctaaggaaagcaagctaacggccggagtggccgccgcgctgaccgtcgtcgctgcttgcgcgctatgcctgctgctgccggcgacggcccgcgcgcagctccgggtgggattctacgacaccagctgccccaacgccgaggccctcgtccgccaggccgtcgcggccgccttcgccaaggacgccggcatcgccgccggcctcatccgcctccacttccacgactgctttgtcaggggctgtgatggatccgtcctcctcaccgtgaatcctggcggcgggcagactgagcgtgacgccctcccaaacaacccgagcctccgcggcttcgacgtgatcgacgccgccaagaccgccgttgagcagagctgcccgcgcacagtctcgtgcgccgacatcgtcgccttcgccgcccgcgacagcatcagtctcaccgggagcgtctcgtaccaggtccccgcgggccggcgcgacggccgcgtgtccaacgcgacggagaccgtcgacctacccccgcccacctccacggcgcaaagcctgaccgacttgttcaaggccaaggagcttagcgtggaggacatggtcgtcctctccggcgctcacaccgtcggccgctccttctgcgcctccttcttcaagcgcgtctggaacacaagcacgaaccccgctaccgcaatcgtggacgcggggctgagcccgtcgtacgcgcagctactacgcgcgctgtgcccgtcaaacacgacgcagacgacgccgatcacgacggccatggacccgggaacgcccaacgtgctggacaacaactactacaagctcctgcctcgcggcatggggctcttcttctccgacaaccagctgcgcgtgaacccgcagatggccgcgctggtgagcagcttcgcgtccaacgagacgctgtggaaggagaaattcgcggcggccatggtaaagatgggacgcatccaggtgcagacagggacgtgcggagaggtccgtctcaactgcggcgtcgtcaacccgagttcgtactcgtcgtcgtcggcggtggagctgggttcgagcgcgccagcagccgtcggtgaagagggctacgccgcgagctagtagctcgcataccagtcttcggccgccgtcgttgtcgagatcaatgattttttttctctctctcgcatgcatccctcttctgcttttattttgtcgcgtggactgtggtttttgttgtgtcgatgatctttgttgtgtgccagtgccactaaacgtacgcatgccggccggcgaactcttaacttcggtggcgggtaataataagcatatgtatgagtaagatgagattgtgtcaatttagggtgtggatgctttcaaaaaagaaaaaaaaaggcttaggactatgcatcaacttgaacaaaagtactgcatgcagtgctaattcatatggatgagttcccccccgccc

SEQ ID NO: 2335 - DNA, 2217 bp, Zea mays
  Clone ID: ZEAMA-23APR03-CLUSTER29917_1
agccaacataagccaccccttgaagccttttatccatggggattcccgtcctcactccactgctccggtctccctgggctagcggtacttggtcctcgcctaatgaccggtgcggctcggaagcccaggcactgcaccctgagtatatcccctgctcacgccaagcgaaaaggtgtttgttaacatggcattggtcctctatttataccgatgactaggtgtctagcaatgtattcatttataagtgaggacaaggagaaagccaaagagcctggtggtgtgtcccctgtgtggtcttaagttacccatgagacctaaggaaagaaggctctcctcgggtataggtgaccgtttgagagagggccaacgggttgggaatagaaaccggtctttgtggcctcctccaactggggaacttaggttctttggaaccagaaccgtcgggtaaaagcaaatcatcgttgttcactcgccttattttttagttgatttgttttccctctctttacgactcaagtttaacctctaagcgcctcaaccctcgaccttagttgcgcgtttaaggtttataaactttaggtttcgcctattcacccccttctaggctgactttcaattgatattagagcctggtgcttcattaagagtcgaacaactcgaagtgatgtcaggagatcactccaagagggagatcatgaccgacgaaaaggccacaagctcggggaggactctcgatgattgtggaaaggccagtggggacaaagaaagcttggagattaatgatatggaaaactcaactattcttccgatcgagggtttaggagcaggtatgaaagggatgaacaagctaatagaaccagcataacgacgcatgggcggccggactaataatgacgcgcatgtagcatgcatatattgacgcacacaatcttaatgttgctggtcaaatatgttaagaaaaaatgatttcgtccacgtaatcaatacaggaggaagaaacccactccatatcaacaggtggagattaatcaagttcgccggtcactacaatataggattagggtcaataatagattacttaatgtaagtcctgttccgtaacagtcatccatttgcctctcccttctccttgcttttaggatcgagagaaaccgtccatgccgtacataatatttctctggtctttttactcatgtataaataccacaccatgatcgaatggaaataacccacgcatcttttgcttcagttttcttagatttaataacatgttatcccgcacccggctttcgccatccgaaaaatttagaagaaaaaagtagccaaacatgggagacacgaacgggaaaaaaatggctatgtacgagccgcgaccttggggtgaaccaacattgtcggcgccttggacgacgactcgattggagcctctcgccatggcatcttcaaaatttcttctctgcgccgtgcactcgaccgagcaatgcaagatcttgttgacgggcggatagcaccgccccgacgcatcccgatgggtcctcgccgttggggaccgcctcgacgctggaactcacctccgcatctggtccccgatacgaggaggaccgcagtcgccagacgcgacgcggtgccattggctgtcgttccgccaaccaactgggcgagtcagccaccgctgccgagtcccactccaagcacagagccagtgttgcgatggaggactctaaaaggaaaataggcttacaccttttcctaattgattttggtggttgaattgcccaacacaaataattggactaactggtttgctctagatcatatgttctacaggtgccaaaggttcatttacaattatactaaatcgactgtccggaataccgtagattattccggacaggagaagctttttggaaaatcaggccaagcgcggaccgtccgcgacacctaaataaccctcggacagaaccaatgcaaaaacatgtgtctctactgcggactgtccgatggaagagcaagcaccgtccgagaccacgcgcggaccgtccgggctcaggcgcggaccgtccggtaggtgaggaaccgaaaaacccgaaggtgacgggttcagccaaatgaattatagcgtcctcgcggaccgtcaaggtgcacgaccagaccgtccgcgactggctttatctgacatctgacgacgcattaaatgcaatatgggggggggggggg

SEQ ID NO: 2336 - DNA, 3180 bp, Zea mays
  Clone ID: ZEAMA-23APR03-CLUSTER29927_2
agagcagcagcagctaccgcagcccctgccatggcgccgagctccccgtcacccgccgcgcctacacgcgtctctgggcggaagcgcgccgccaaggccgaggagatccaccagaacaaggaggaggaggaggaggtcgcggcggcgtcctccgccaagcgcagccgcaaggcggcatcttccgggaagaagcccaagtcgccccccaagcaggccaagccggggaggaagaagaagggggatgccgagatgaaggagcccgtggaggacgacgtgtgcgccgaggagcccgacgaggaggagttggccatgggcgaggaggaggccgaggagcaggccatgcaggaggaggtggttgcggtcgcggcggggtcacccgggaagaagagggtggggagaaggaacgccgccgccgccgctggcgaccacgagccggagttcatcggcagccctgttgccgcggacgaggcgcgcagcaactggcccaagcgctacggccgcagcactgccgcaaagaaaccggatgaggaggaagagctcaaggccagatgtcactaccggagcgctaaggtggacaacgtcgtctactgcctcggggatgacgtctatgtcaaggctggagaaaacgaggcagattacattggccgcattactgaattttttgaggggactgaccagtgtcactattttacttgccgttggttcttccgagcagaggacacggttatcaattctttggtgtccataagtgtggatggccacaagcatgaccctagacgtgtttttctttctgaggaaaagaacgacaatgtgcttgattgcattatctccaaggtcaagatagtccatgttgatccaaatatggatccaaaagccaaggctcagctgatagagagttgcgacctatactatgacatgtcttactctgttgcatattctacatttgctaatatctcgtctgaaaatgggcagtcaggcagtgataccgcttcgggtatttcttctgatgatgtggatctggagacgtcatctagtatgccaacgaggacagcaacccttcttgatctgtattctggctgtgggggcatgtctactggtctttgcttgggtgcagctctttctggcttgaaacttgaaactcgatgggctgttgatttcaacagttttgcgtgccaaagtttaaaatataatcatccacagactgaggtgcgaaatgagaaagccgatgagtttcttgccctccttaaggaatgggcagttctatgcaaaaaatatgtccaagatgtggattcaaatttagcaagctcagaggatcaagcggatgaagacagccctcttgacaaggacgaatttgttgtagagaagcttgtcgggatatgttatggtggcagtgacagggaaaatggcatctattttaaggtccagtgggaaggatacggccctgaggaggatacatgggaaccgattgataacttgagtgactgcccgcagaaaattagagaatttgtacaagaagggcacaaaagaaagattctcccactgcctggtgatgttgatgtcatttgtggaggcccaccatgccaaggtatcagtgggtttaatcggtacagaaaccgtgatgagccactcaaagatgagaaaaacaaacaaatggtgactttcatggatattgtggcgtacttgaagcccaagtatgttctcatggaaaatgtggtggacatactcaaatttgcggatggttacctaggaaaatatgctttgagctgccttgttgctatgaagtaccaagcgcggcttggaatgatggtggctggttgctatggtctgccacagttcaggatgcgtgtgttcctctggggtgctctttcttccatggtgctccctaagtatcctctgcccacctatgatgttgtagtacgtggaggagcccctaatgccttttcgcaatgtatggttgcatatgacgagacacaaaaaccatccctgaaaaaagccttgcttcttggcgatgcaatttcagatttaccaaaggttcaaaatcaccagcctaacgatgtgatggagtatggtggttcccccaagaccgaattccagcgctacattcgactcagtcgtaaagacatgttggattggtccttcggtgagggggctggtccagatgaaggcaagctcttggatcaccagcctttacggcttaacaacgatgattatgagcgggttcaacagattcctgtcaagaagggagccaacttccgcgacctaaagggcgtgagggttggagcaaacaatattgttgagtgggatccagaaatcgagcgtgtgaaactttcatctgggaaaccactggttcctgactatgcaatgtcattcatcaagggcaaatcactcaagccgtttgggcgcctgtggtgggacgagacagttcctacagttgtaaccagagcagagcctcacaaccaggttataattcatccgactcaagcaagggtcctcactatccgggagaacgcaaggttacagggcttccccgattactaccgattgtttggcccgatcaaggagaagtacattcaagtcgggaacgcagtggctgtccctgttgcccgggcactgggctactgtctggggcaagcctacctgggtgaatctgaggggagtgaccctctgtaccagctgcctccaagtttcacctctgttggaggacgcactgcggggcaggcgagggcctctcctgttggcacccctgcaggggaggtagttgagcagtaaaaggatgacagatctgagctgagctgggcaacatccagcggcaggagcatttctggttcggttcgattcgggctcacgagcgcattgtgctgattcgcagggtgcactcgagctcgagtgcggagttgttgtaatgtaggttgaggtttcaaaacatccatccatccatcggccccgcctatttgtggatggtgtttctcgtgccattttagttcagctgtattgatgcttcgtcatgtatgtgtattgtaccattcgttcttgttacctactggtaaggcaacatttaatccatgttcaacgcgagcaaaatttcatccactttaggtactgagatgctcaagtagttcagtcatcaggtaacataacatttacaacctattattttgcctggtattatctcgatttgct

SEQ ID NO: 2337 - DNA, 1047 bp, Zea mays
  Clone ID: ZEAMA-23APR03-CLUSTER2992_2
gcacgagaccattacctagaacatcctaatcgaaaaacgcaaatggtaaaacgcttgggaaacacaattcagccctggcctttttccagttgagttcacctcttggctcttgcctcctgcatctctagagaggcacatcccagctccaagcttcgcgccttgttggatcttggcgtccaagcaacggtggtagcggagcgcgaggcagtggccgcagaaggaagcgcgaagcatccatggaccaacgccaggtggttagcgagaattatgccaatcccataacatgcttcttccatgtgctattcaaggcgggggcgctagccttctacatcctattctcgctctttgtgaagagcttcgtcatcatcttcgtgatcacggtgctcctcgcagcgcttgacttctgggtggtgaagaacgtcagtggcaggatactagtcgggctgcggtggtggaatgagatcgatgatgacggaaacagtgtgtggaagtttgaatgccttgatggggagtctctcgctcggatgaacaagaaggattcatggctgttggtggactctttacttgactgctgctgcatggatcgttcttggtatattttcactcatcaggcttgaggctgattaccttcttgttgttggagtttgcttgagtctaagcattgcaaacattgttggattcaccaagtgcaacaaagatgccaagaagaacatccagactttcgctcaaaatgcactcgcttcccgtgtcacatcatcgctgcaatcagcattcggtgtcatctgaagtcccacgcggaggccctggtattagtatattactcacagcggtgtacaatttgtcaaaaggatgagcttgcattctacgtttactgcctttcctctgattgcaaggatgtaattctaccagcgtagacagcaagcatattgtactgtcccgttatcattcttttttacctcatacaacaaataggtcgattttgatgtcgttaccaaaatcctctggtttaaaaaaaaaaaaaaagggcggcagacaactagtgagcta

SEQ ID NO: 2338 - DNA, 1126 bp, Zea mays
  Clone ID: ZEAMA-23APR03-CLUSTER29963_1
agcttgcttgctctctaacacgcacagacacagtcacacagcgttgcgcgagagagcttattgcaaattactctgtggaccgaaccggtcggtcggaagtcggaacaataagcagcagatagagagagagagagagagagatggggaagctgacgctggggcaccgcggcgaggcgtcagagccggacttcttcaggggcgtcctcggcgagctcgtcctcaccttcctcttcgtcttcatcggcgtcggagccgccatgaccgacggagcgacgacgaagggtagcaccgctggaggcgacctgacggcggtggcgttggggcaggcgctggtggtggcggtgatcgcgacggcggggttccacatctccggcggccacgtcaacccggccgtgacgctgtcgctggccgtcggcgggcacgtcacgctgttccgctcctccctgtacatcgccgcccagatgctcgcctcctccgcggcctgcttcctgctcaggtggctcacgggcgggctggccacgccggtgcacgcgctggcggagggcgtgggcccgctgcagggcgtggtggcggaggccgtcttcaccttcagcctgctcttcgtcatctacgccaccatcctggacccgcggaagctgctcccgggcgccggcccgctgctcaccggcctcctcgtcggggccaactccgtcgccggcgccgccctgtccggcgcctccatgaacccggccaggtccttcgggcccgccgtcgcctcgggcgtctggacgcaccactgggtgtactgggttggcccgctcgccggaggcccgctcgccgtgctcgtctacgagtgctgcttcatggcggccgctcccacgcacgaccttctgccccagcaggacccatgatcagcgtgcatcgtgcgttggatcgatcggagtgtgacttggtttgagctggcgacggattgtgtttgattcgtgtgtgtgcagtgtgtgcacagttgcaaacgacttatgggttgtttttacctcatgttttcctttgtttgagaaggctacttctcaagaacaaaactgcagaatttcttgtgggtctacgtgtatttttgcataaaaactaagcttcaaaaaaaaaaaaaaaa

SEQ ID NO: 2339 - DNA, 1918 bp, Zea mays
  Clone ID: ZEAMA-23APR03-CLUSTER299_38
gaagcgaaacagggccccgtctcttccaccactccgcagaggcgcagactaccgtctcatcctactactctagcccagtctcacgatccagcactcagtcactagcgcttgtcgtcgccagtacaacaacggcatgggtgagggtgacgacgaccggcgggacgagttgttgggcgcggggcgggaccatgaaccagagccggcggacgcggaggaggccaagaaacccgcacccggcgaggcggaggccggcaacggcgccggcgcggaggcggcgacctgcgactactgcgggaccgcggcggcggcggtctactgccgcgccgactccgccaggctctgcctgccgtgcgaccgcctcgtgcacggcgccaacggggtytgctcccgccacgcccgcgccccgcwmtgcgccggctgctgcgccgccggggccgtmwtccgccgcgcctcgacctccgccttcctctgctccaactgmracttcgggaggcaccgggatrrcggtgacccgccgctccacgaccgstgcgccgtgcagccctattccgggtgccctccggcgagcgacctcgccgcgctcctcgcggtgcccctcttcgacaagccggccgccgaagatggtgcctggtggaacatctgggaggagccccaggtgctgagtttggaggatctcatcgtgcccaccaccccttgccatggattcgaacccctcctaacgccgccctcgcccaagaaccggagcatctcgccggaccggaaagtgaacgaggagatccttcggcagctgggggagctcgcagagtctgatggcggtatgcaggcatcagcaggtcgtgaggaggcagagcaagctggtggagatcagttcccttcctgggcgtcaccacagtatgccactggacatggcaattttggaacagaggacaaccatgagaatggcagatggaacaacagtgaatatcatgatctaaatgatgcatgtaagctcgaggtcacatatgatcaggctccagtcaactcggctgaaccgtgcttgtcatcatttgctccactgtcggaaatctgccccagcatgagcaatggtagcagtaaggaagataaccaccaggctaatcctggcattggcatgccaatgcaaggtctacccaaaaggagtggatttgatgttgtcccatgccctgaccgtgactctgtcatttcgcgctataaagcgaagaggaagacaagaagatttgacaggcaggtccggtatgagtcgcgcaaagttcgtgctgatggaaggctcaggatcaaggggcgttttgcaaaggcaaaccagacatgaacctaaatctgaagttatgcaatatcctaagcatctttcctcaagaaatatgctaagtatcttccaacacgaagaagaaaactgatcaggggcgatgataatgcaaaaatgtgccagaattttgtttgccttcagttcaatagctgataaccatagttccatatacagttgaattgaatgacgtgtgtatatattgctgtcatgtgactagtagctacattgctttgagagatcaaaacctgtatatgcacctacacactatgtgattttgccatgacggacataataatagaaccactgcgtttgattgatgtagttattaacttattttgcaatttgatttccaatgcaaaagcttctttcactgatgagcaataaacacagttgtgatgcaagaactgagagatgacgtttgctaagagatattttataggatgaggaattgtaatcagatagatgtttttattctgaaatagactagaatctagtttaaatatgtattgtatttatttaggacttttagaattggcttctatatgtgtacgtaacactgagggttcctcatccaatagatcaacatgtaacacacgc

SEQ ID NO: 2340 - DNA, 1992 bp, Zea mays
  Clone ID: ZEAMA-23APR03-CLUSTER30033_2
ctaatcgaaaaaactcgcaagtcgcctgccagcccggttagcaaggaagcacgcaggatatttggtgcgcgcgggcggtgtgagcggtgagcctgcaaaagccagcagcagcgagcgtcggtaggggagcccgggcagcggagcacacttgccctctccacctggaaccccgcgcaggctccgccggccgcggccggtgccgcgacgactcggcacgcgctagctagctagctgttcctctccccgagggccccaccactaccaccatcctgccgcccggcctcgcgtggcggatgatgattcctagggagccgtggcggccggagcacccttccaattcctgatcccgagctgacccccgcccatcgcagcggcggctctgccgcagcgtctgtgtccagacttatgatgatggagacccctcaaatcgagatgggcggtttcaaggtcaacagcccgcaagtgcccaacggcgtgttacggcccaccgtgtattcctcctggaactcgcgagggccggtcgagagggcgctcaagagcatcaggatcgtcattttcacttccaagctcaacttgctcatgccgttcgggcctgcgtccatcattctccacttcacgactaggaggcatggattgattttccttttcagcatgctaggaataacacctttagctgagcgtttaggatatgcaactgagcagcttgcaatatacactgttccaacagttggtggccttctaaatgctacatttggaaatgcaaccgaaatgatcattgcagtatatgctttgaaaaatggaatgatccgagtagtgcagcagtcactattgggttccatattgtcaaatatgctgttggttatgggttgtgctttctttgctggtggtgttgttcaccgcaacaaagaccaaatcttcagtaaggcaactgcagttgtcaactcaggtttactgttgatggctgtcatgggattgatatttcctgccgttcttcatttcactcattcagaagtgcgtcaaggggcatcagaggttgcactttcaaggttcagtagttgtattatgcttgtggcgtacgccagctatctctatttccaattaagtggacggagcaccagttacagtccaataggcagtgaagaggcgcctattgaggatactgcggaggaagatgaagaagctgagattggcatgtgggaggcagtaacatggcttgcggttttaacactctgggtgtcttttctttctgagtacctagttaacgccattgagggagcatctgattcattgaacctaccggtggcttttatcagtgttattttgcttcctattgtgggcaatgcagctgaacatgcaagtgcaataatgtttgccatgaaagataagcttgacataacactgggtgttgcaattggttcatcaacacagatatcaatgtttgtgattccattttgtgttgttattggttggatgatgggacaaaggatggacttgaattttcagctatttgagacagcaactctcttcataacagtgcttgtggtagcatttatgctacaggatggcaccgcgaactacttgaaaggacttatgctgatcctatgttatctaatagttgctgccagtttctttgttcacgttgatccacaatcaagtgatggttgatgccgtagatgctgtaagtaatgcgtcaaataccttttgaaacttgttaatcctttcttgtggaggtgctactccatagcaacgttccacctgtttcaagcagcatgctggcaaaaaaaaaggcgggaagatcacacattgtcggttccttcatgaaccgcaaaaggaattcttgtattgtgtggatactgaggtgtactaggggtagtctcaatgtatacagaaacaagaagtgccagcatgttacattcgattaattggatgggtgagtccccctttgagatttgggtatatgatttgatgctggctaaaaaaaaaaaaaaaaaa

SEQ ID NO: 2341 - DNA, 3430 bp, Zea mays
  Clone ID: ZEAMA-23APR03-CLUSTER30079_2
gcacgagaccattacctagatcctaatcgaaaaattccccccttatgcttctcacccgtcacccctcgccgtctccggcgagacccggaaatggatgtcgctgccaccccctcaaggtcaaaatctaagcccagatcctcgctggtgaatcccgtcgcagcccccgccgagtccaggatggacctctgcaccccatcgaagcccacgcccaggcggaactccaaatcgacggcctcgccggcgccaatgtctccgtcgacgccctacaccgtccggcgctcgcgccgcctcctcgaaacccccaccaaagccgccctggaggtgcaggtgaaggctacgctgacccctacctccaagggcaagcgcgccgcgccgtcacctaaaacccctgctcagcacgagcccaagaggcagaaacgacacccgaggaagagggcatactaccggaaggtggtgtatgacggcggggagttcgaggtcggtgatgacgtgtacgtgaagcggcgggaggcggcggagtctgacgcggaggaccccgaggaggaagagtgccgcgtatgcttccgcaccggtggcggggttatggtggagtgcgacgcgtgcctcggcggatttcacctgcgttgcgtgcgaccgccgcttcggagggtgcctgaaggtgactgggcatgtccatactgcgaggccgagcgcgccggaaaggtggtcgagcggcccaggccgcctgagggcaagcgcatcgtgaggactgccaaggagaaactcctttccagcgatctgtgggctgcacgcatcgagagtttatggagggagcctgatggcaccttctgggcaaaggtcaggtggtacattatccccgaagagactgcagcaggaaggcagctgcataacttgagaagagagctgtatcgtaccaatgatcttgcagacattgagatggaaacaatccttagacattgttctataatgtgccccaaagactttagggatgctaacgatggaggagatgatgtattttactgtgaatatgagtatgatattcattggcataattttaagcgtttggcagatattggtgatgaacccgagacaaaggaagatcccagtgacgagccttacaatgccagtgatgattataacagtgacactgatgaagattcagagtatgacgaggtggaagaacctacatcatctttctctgccagagggaatcaatcacatgaattggcagcgaattcaaggaagggtagaatatatggcctacaaaaaattggaatacgaaaaattcctgagcatgttcggtgccaccaaaagactgagctggagaaggctaaagcaaccctgttattggcaactctccctaagtcattaccttgcagggataaagaaatggaggagatatcgatatttgtaaaggatgcaatctgcaatgaccagtgcctaggacggtgcctttatatacatggtgtacctggtactggcaagactatgagtgtacttgctgttatgaggaggctgagatctgaatttgattctggaacactgaggccatattgttttattgaaattaatggtcttaaattagcatccccagagaatatctacaaggttgtatatgagcagttgagtgggcatagggttgggtggaaaaaggctcttcactatttaacagaacatttttcaggtggcactaaaattggaaagcaagcaaaccagccaattattttgctgatcgatgagctcgatcttcttttgacaagaaaccagtcggtgctgtataacatccttgattggcccaccaaaccatattcaaatctagttgtcataggtatagcaaacacaatggatctccagaaaaattattgcctcgtatatcaagtcggatgggcattcaacgactgtgttttggtccatacaattatcggcaactacaggaaattataacaagccgtttaaaggggattgatgcctttgaagaacaagctattgaatttgcttctagaaaggtagctgctatgtcaggtgatgctaggcgagctttagagatttgtagacgagcagcagagtttgcagactaccgtgttaaacagtctcgacagtctgcacagaatactgtttctgcaaataaaggtgatggtgttgtttccatgggtgacatagaagctgctattcaggaagtcttccaggcaccgcatattcaagtgatgaagaattgtccaaagtttggaaaagttatcttggttgccatagttcatgagctgtacaaaagtggactaggtgaaataatgtttgataagttagcaacaacagttttctcctggtgccgtgcccacagagaactattgcctggatacgacactctcttgaaaatttgctgcaagcttggtgaaagcaagatcatcctctgtgaagagggtaccaagcacaagttgcagaaggtgcagctcaactatccaagtgatgatgtgacatttgccctcaaggaatctccagatcttccttggctatctaagtacttgtgaggctcttattgcattaaccattgattcctggcactctgttgcctttctgttctctttggaggctagacaattctacttcacccgcaaacctttcaaacacacatatcccatggtcgatctcctggtcactctagcctcgtatctgcaaaggaaccggcgaaggatgacggcatgtcgctgcacccaacggaacgcgtcacactaggaacgtaaaacgttagaaacatgtacgtctggaatttcgtccccttcatgactggatacgtatgtatccacttcaacccatgtagtttggagtggtttggtatgtattttaaactaaactctatattaaaccactctaatccatatcgattgaggtgaatatgcatgcgtccatatgttgtaactgaactgccgcgtagtgagatttagtaactatatatgaatggtttgttacaataacattgcgagttttgaataagaaacattgagatatcaatttgcttgcctcaaggaatccccagatcttccttggctatccaagtacttgtgaggttcatattacattaaccattaattcctggcgttctgttgcatttctgttctctttggaagcaacgattcactttacctgcagaccttgcatacacacgtcccatggtcgatctgcaaaggaaccatcgaaggatgtcggcatggcgctgcacccaagggatcacgcatatttaatcgcacaacaggaacataaaacgttaagaaatatgtacgtctgcaatttcgtctccttcaaactatggtgttgtttgtgttgtattgaactgccgcgtgtgagctgatccaattgttttctattgccatctttcagtaactatatacgaattgttcgttaaacattgacagttttgaataagaaacattgagatatc

SEQ ID NO: 2342 - DNA, 1238 bp, Zea mays
  Clone ID: ZEAMA-23APR03-CLUSTER30155_1
aactcagattcagtacaagctcaagccaggcacacagcaagacatcgaccatggctgcctaccaacaagctcccgctctcctgtgcgcctgcctgatgctcgtgctcatggcgggcgcggcatccggcggccgcgtagacgtggaagacatgctgatgatggaccggttccgcgcgtggcaagccacgtacaaccgctcgtacctgaccgccgcggagcgtctgcgccggttcgaggtgtaccgccagaacatggagctcatcgaggccacgaaccgccgcgccgagctctcgtaccagctcggcgagaccccgttcaccgacctcaccagcgaggagttcctcgccacacacaccatgtccacgcgcctgcatgcgtccgaggccgcgcggcggcaccgggagctcatcacgacgcacgcaggccccgtcagcgacggcggtcgccagtggaaccggcggaactacacgacggacctcgacgtccccgaaagcgtggactggaggaccaagggcgcggtggcgccggtcaaggaccaaggagcttgtggcggttgttggtcattcgcgacggtggcggcgatcgaaggcctgcacaagataaggacgggccagcttgtctccctgtcggagcaggagggcaaatgcaagctcgacaaggcacgcaaccacgtcgccaagatcagaggcaggaagttggtggatcaaaacaacgaagccgcgctggaggtcgccgtggcgcaacagcctgttgccgtgggcatgaatgtacatccgatccaacagcactacaagagcggggtgttccatggcccctgcgacccagaggatctcaaccacgccgtcaccatggtggggtatggtgccgaatccggtggccgcaaatactggatcgtcaagaactcgtggggcgagaagtggggcgagaagggatactttcgcggtttcgcctcgagagggccgtcaaggacgtcaggggcacctgcggtatagccgagtgggcaaactacccggtgatgtgagctcccgtcccgtgtctgtcgccaccgtgctttacctgcctggcctatagcagtgcggtcgtcttgctttcctgcacatgcgcaagcctatatatgatgatgtgcagaagtcagcttgtagaacaggctgaaataaactcgacgcgcccggcatgtgtactcggcagtgtcgtcgttgtcatttgcctattatctatcatcttaagaactatatagt

SEQ ID NO: 2343 - DNA, 1495 bp, Zea mays
  unsure (1)..(1495): unsure at all n locations
  Clone ID: ZEAMA-23APR03-CLUSTER30264_1
gcacgagctggaggttcctgcaagccccccgatgaactcagagagttgcaagacaccaaaggcaaggagcctggtcaagagcccaagttcgatgatgctcctgagctacttgaacaaggcaccatcaaaccaaggctacagtccgcaaaaggcttatggatctcggcccagaccgagatcaaagtccccccttcccagtatcgcgccttcggaagtgttcagggaagcgaagtctaccagcaagaggtttgcaagccctcctccacagcgaagaggatctgaaaagagtatctatggcaaatcgtttgctagacaggtgtcggatattggtcagagtcctgattggtgttcaactccagtggtatctggtaagcacaagtctcaaaagaatagtgcttggtcaaggaaatccagcggtggaaggaggattagcgcagtaaaccctgcggatgatcgtagggcgcagatggttagaatgaatcaggcggtgcagacgacgttcgattggacgctcgatccatccaagctgcttgttgggcacaggtttgctagtggagcgtgtagccggctgtacaaggggttctatgatgagaagccagttgcaattaaatttatccgccaacctgatgatgacgacaatgggaagacggctgcaaagcttgagaagcagtataacagtgagatcaattcgttgtctcacctgtaccataggaacgtgatcaagcttgtagcagcctacaaatgcccaccggttttttacatcatcaccgagttccttcccggaggctcgttaaggtcatacctaaacaacacggagaaccacccgatccctctggagaagaccatatccatcgctctcgacatcgctcgaggtctggagtacgtacactctcaagggatcgttcaccgcgacatcaagccgagaacatcctcttcgacgaggactcgtgcgtgaaggtcgctgatttccgtatcgcctgcgaggagaccttgtgtgacgtgcttgtggaggatgaaggcacctacagggggatggcgcctgagatgatcaagcagaaggcgttcaaccggaaggtggacgtctacagcttcgggctggtcatgtgggagatggtgtccggtagagttccttacgagaacctgacccctttccaggtgggnttcgcaanggccaacaggaacttgntgncnncgntanttccanaatgcnttcngccttgncgcnttgttaagctatgcntntcnttcnantnntanaggncngtnttttggatnttttaatcnganngnnnanatgntctttgttggtgnttgtctganccntnntgctanctgtngacntnaantatttnttnttntatttaatntttatntccatntgntgttantgttttaatantttnntcttttntcnnatatnaaanattanatatnnngattatntaatgnnnattgannatnntnnttttntntgtgtnntgngttntttntnttg

SEQ ID NO: 2344 - DNA, 1994 bp, Zea mays
  unsure (1)..(1994): unsure at all n locations
  Clone ID: ZEAMA-23APR03-CLUSTER3026_1
caattaaccctnactnaanggaacaaaagctggagctccaccgcggnggcggncgctctagaactagtggatcccccgggctgcaggaattcgcacgagaccattacctanaacatcctaatcgaaaaaccaatcgtcctcgcattatccatccatcatcgactaatccagtgtacgtcgttagttgttactcaagagatcaataccgcaacaatggccgggggttttgccgtctccaagtccggcgccgacggccgggagttcaagggcaggatcacctggtacgtctggatgtgcggcatcgtcgcggccaccagtggcctcatgttcggctacgacgtcggcatctctggtggggtgacggccatggacgacttcctggagctcttcttcccgtcggtgtacgcgcgcaagcaccgcgccagggagaacaactactgcaagttcgacgaccagcggctgcagctcttcacgtcgtcgctgtacctggcggcgctggtggccagcttcgtggcgtcgcgcgcgtgctcgcggttcgggcgcaagcgcacgatgcaggcggcgtcggtcttcttcctggccggcacggcgctgtgcgcgtccgccaccaacatcgccatgctcatcgtgggccgcgtctgccttgtcgtcggcgtcggcttcggcaaccaggcggcgccgctgttcctgtccgagatcgcgccggcgcacgtccgtggcgcgctcaacatcctcttccagctcaacgtcaccgtcggcatcctcatcgccagcgtcgtcaactacttcgcgtcgcgcgcgcacccgctcggctggcgctacgcgctgggcggcgcggcggcgcccgccgccgtgctgttcctcggctcgctcgccatcaccgagacgcccacgagcctggtggagcgcggccgcaccgacgccggccgccggacgctggagaagatccgcggcaccgccgacgtgggcgccgagttcgacgagatccgggccgcgtgcgaccttgcccgcgcgctcggcgaggaggagaagccataccgccggctgatgcgccccgagagccgcccgccgctggtgatcgcgatcgccatgcaggtgttccagcagttcacgggcatcaacgcgctcatgttctacgcgccggtgctgttccagaccatgggcttcgagaccgacggctccctgctgtcggccgtggtcacgggcagcgtcaacgtcgtgtctaccgtcgtgtccatcgtcctcgtcgacagagtcggccgccgcaagctcctgctggaggcgtgcgcgcagatgctggtggcgcagacggccgtgggcgcgatcatgctggtgcatgtgcgggccaacaacaaccccagccagtcgtgggcggtggccatcgtcgtgctcatctgcgtctacgtgtcaagcttcgcctggtcctggggcccgctcgggtggctcatcccgtcggagacgttcccgctggagacgcgcacggccggcttctcgttcgccgtcagctccaacatgctcttcaccttcctcatcgcgcaggcgttcctgtccatgatgtgctccatgcgcgccttcatcttcttcttcttcgccgcctggatcgtggtcatggctatcttcgtcctcacgctgctgccggagaccaaaggcgtgtccatcgacgagatggtggaccgggtctggcgccgccactggttctggaagaggtgcttcgccgacgactacgacgcggccagggtctatgacaactgctagtgctaggcacgcgcgccgccggggattagtttttttttgtcattgtaattagaaatcggcctgattaattgatttcgttgctatgacatttaaattgatgtcgttgcaatcagcaggcaaaactatatagtatatgagaaatatgctcgagttctcgtgtgattcgtatcgtcctcgtatatatcttatatgaggaaaacatgacggcagaattgattctacgtacattatctgggtca

SEQ ID NO: 2345 - DNA, 1704 bp, Zea mays
  unsure (1)..(1704): unsure at all n locations
  Clone ID: ZEAMA-23APR03-CLUSTER30290_2
gcacgagaccattacntagaacatcctaatcnaaaaaactttccctgcaagaatggatcgcgagaccaagaacagtagaccaaagacaaaggaaggcgagggccaccatccccaaaacccgtaaaaaaacccgaattgacaaattgagtcgacggggaaggaaataaagaaggggaagagcacgcgccgccgccagcaccgcgtccgccatggccgcctcctcccgccgcgcgtctcaattgctggggtccgcggcctcccgcctcctcctcgggcggggcttcgccgcggcagccgccgcggcgccctcgccggcggtcttcgtcgacaagagcacccgtgtgatctgccagggcatcacggggaagaacggcaccttccacaccgagcaggccatcgagtacggcaccaacatggttggtggagtgactcccaagaaaggtggaactgaacatttagggctcccagtgtttaactctgtagcagaagctaaggctgaaacaaaagccaatgcatctgttatatatgttccaccaccatttgctgccgccgctataatggaggcaatggaggctgagctcgaccttgttgtctgcattacggaaggaattccccagcatgacatggtgaaagtgaaggctgcactaaatagacaatctaaaactcgattgattgggccaaattgccctggtatcattaagcctggtgagtgtaaaattggaatcatgccaggttacatccacaagcctgggcgtattgggattgtatctcgttctggtaccttgacatatgaagcggtgtttcaaacaacagctgtaggcttggggcagtcaacttgtgtaggcattggtggtgacccattcaatggcacaaattttgttgattgccttgaaaaatttgtcgatgaccctcagacagaaggcattgttctcatcggtgaaattggaggtacggctgaggaggatgctgcaacgttcatccaggaaagcaaaacacaaaagcctgttgttgcattcattgctggacttacggcacccccaggccgtcgcatgggtcatgctggagctatcgtggcaggaggaaagggtactgcccaggacaaaatcaaggcactcagagaggctggtgttaccgttgtcgagtcaccagcgaagattggttctaccatgtttgaaatcttcaaacagcgtggaatggtagaatagacacagtggtacagtagagagacattgagaaaccgctttttgatgcttgcgggcaatcgcgagcaattcctcggtagatccttctccctggccacaaacaaaactactgaggttttcttttcgtacttgtcttatctttggaagatgtcctggccttcttcacttggataacctttcgctgagctcatttcaataagacgtttcggagccatggaaatgctatgtcgcttggagtcaatgtggatgcctaatttcaaatttttattcttcatacatttccatttagggtttcccatctggttccctgtattataatgggcgggaaaatgccccccaactgagggcgattgctttggtcggggtcatgtttgaaaaaaatttttttttgggcctgattgaaaattgtttattttggcccctgtcctggaaaaaaaaaaaaaaaaaaaaaaaaaaaaaaaaaaaaaaaaaaaaaaaaaactcgaaaagagggcgccggtac

SEQ ID NO: 2346 - DNA, 647 bp, Zea mays
  Clone ID: ZEAMA-23APR03-CLUSTER302954_3
aaaaaatctccctcccaggtggtgctgcctgctgcgtgcaggggagtgagcgtggctgcgtgggcaccctcggggtcggatctgaagaggaagaaggctgtcgcgctgacctcgactcgatgacggccagaagataaccgacgacatcggaccgcatccgcgcctcctcgagaagggcgccaacgtcatccttgctagccacctggaggcttggggtgtttgctttcaacaatccctgtaggccagtcgaaatggaaggtgttatgaggagggtgatcacttcggacaacatctgctttgtaaatgctgcggtgcgattgccaagaagctggctgagcttacaacgctaacggatgtcacaaccatcgtcggctaggctggctgacaagatgagccacatttggaccggtggtggcgcgagcgagcttggagctcttggaaggcaaggcgctaccaggtgtccttgtccttttgtttcggaccatggtgtaacactgcaaagcttatggtttgtattggacttgggataggcttgccgtcgagttttggtagatgagtggtgaataagcttgatctataccactgttaccccctcacctaaaagaactatacaactgctgtcgttacctccaaaaaaaaaaaaaaaa

SEQ ID NO: 2347 - DNA, 1544 bp, Zea mays
  Clone ID: ZEAMA-23APR03-CLUSTER3031_1
cccttagcacaacacattagttatttgcaaattaatacaagtgccatggccgccttcgcctcagctatcctcttcaccgtacacttagcgcttgcatttcccttccgcttgtcgtcggcggaggcgccgccactactcggagccgtcgttggagaacaacagccgctcctcgaggaggcgcgcacgcccaggttcgtcacgtggctccgcggcgtgcggcgccgcatccaccagcggcccgagctggccttccaggagcaccgcaccagcgagctcgtgcgcgctgagctcgacgcaatcggcgtgccctacaggtggccagtcgcccagaccggcgttgtggccaccattgctggtagcgccgggcccacggtcgcgctccggggccgacatggacgcgctccccgtgcaggaaatggtcgattgggcatacaagagccaagaaagtgggaaaatgcatgcttgtgggcacgatgcgcacacaacaatgctcctaggagctgctaagctacttcaagctcggaagggtgacttgaagggtgctgtaaagcttgtgttccaaccatcagaggagggctatggcggagcctactacgtcttgcaagaaggtgctcttgacggcgtgtcagccatatttggcttgcatgtggacccagcacttccagtaggtgtcgtcgcatcaaggccaggaccattcacagcgacagcgggtcggttctctgcaactattcgtgggaaaggtggtcatgccgcagtaccccatgaatccgtcgaccctgttgtggttgcagccactgcaatcctcagccttcagcaaatcgttgctcgtgaagtggatcccctccatggtgcagtggtatctatcactttcgtgaaaggaggagaagctttcaatgttatcccggagtctgtcacctttggcggcacaatgaggagcatgacagatgaaggtttgtcgtatctcatgaagagggttaaagagattgtggaaggacattcttcggtacatcactgtactgcttcattggacttcatggaggaggagatgaggccatatcctgctgtggccaacgacgaacggatgtatgcccatgcaagggcagtgggcgagagcttgctaggcgaaaaccatgtcaaggttgctccccaagtgatgggcgcggaggactttgggttctacgcgcggagaatggccggcgccttcttcaccattggagttggcaatgaaagcaccatggtgactgtgcagcaaccccactccccctactttgtgatcgatgaggacgcgcttcctgtcggagctgcatttcatgctgcagtggcaatcgatttcctgaagaaacattcgtaaacaagaacttaaataattaatggagagaagtaggcttttgattttctttgggtgttagatatgcatggtttatatcgcttcttctatattatgttttaggtgtctgatttttttctgttgtttagatgacatgaaatctttttattctttgactattgaaaaaaaatcgttaattgcaaaaaaaaaaaaaaaa

SEQ ID NO: 2348 - DNA, 1428 bp, Zea mays
  Clone ID: ZEAMA-23APR03-CLUSTER30339_1
cgatcgatcgagatatcgtgtcaacgtgccggccggggcgtgggaagatgatgaacctatcggctgccgccaacggccgcgacgagttccccccctacgtcgtgccgtccaacgcggccgctccgcccccttccctgctcccaaccatggagcagcagcaggagagcagcatccacagggagcatcatcagctgctgggctacaacctcgaggccaactcgctggccctcctgcccccgtccaacgccgccgccgcccaccaccacaccaccttcgccggcggccacagcccccacgacatcctccacttctacacacctcctccttccgccgcctcgcactacctcgccgccgccgccggcaacccctacagccacttagtctccgcgcccgggaccaccttccaccagacctcgtcgtcctactacccgcccgcggcggcggcgcaggccgcgcccgagtactacttccccaccctcgtcagctccgccgaggagaacatggccagcttcgccgccacgcagctcggcctcaacctcggctaccgcacctacttcccgcccagaggaggctacacgtacggccaccacccgccgcgctgccaggccgagggctgcaaggccgacctctccagcgccaagcgataccaccgtcgccacaaggtgtgcgagcaccactccaaggcgcccgtcgtcgtcaccgccggtggactgcatcagaggttctgccagcagtgcagcagattccatctgctggatgagttcgacgatgctaagaagagctgcaggaaacgcctagcggaccacaaccgccgccgccggaagtcaaagccatcggatgctgatgccggagacaagaaaagggcacatgcgaacaaagcagctgcagctaaagacaaagcagagagtagcagcaagaacatggatatcggagatgggttgggcgcacagatactgggaagtgcactcttgtccaaggaacaagatcaaaccatggatcttggagaggtggtgaaagaagcagtggatcccaaggggaaggcatcaatgcaacagcattacggcttccccttccattcgtcgtcagcaggatcttgcttcccccagacccaagccgtctccagtgataccacatccaatataggtcaagtgcaagagccaagcttagggttccaccatcagcaccaccaacacagcaacatcttgcagctcggccaggctatgtttgatctcgacttcgatcactagtcaatatgtgatgcacatgcaccctctctttctcaccccaccccacccctcccctcccctctatcttgtttgtgcgcgtaatccgaatatttttcctttttaaattatctgtgttaattactgtaacgtggacataataatgatagtctatgcttgccatgcaatcatctatattatagtt

SEQ ID NO: 2349 - DNA, 1396 bp, Zea mays
  Clone ID: ZEAMA-23APR03-CLUSTER30346_1
ggcacgagcggatagatgtggttagttgctctactgtttatgataactttctgccgtttaggatgtctgtgggtaccagttcataaataggcgtgcgtgccgtggaccttggtgttgctactagctaccaatggtcatggcgaagcagcagcatgacaaggggttgccgaagcaagctcgcaatgagcccgcgccgttccggctcgagcagtgttgccgctgcgacgatgcccaccgtcaggccgacgacgagtccatggatgctgctgggtctgctggcccgctgcacctgactctcggcccgctcggctcggccgccggcccccgctgctcgtgcggtgtcgcgccggcgccggcgccggcgctggcggcgcccgcaacggtggccgtcctccgcgggtcccggtacatgcggccggcgcaggagctgctgggcgaggttgtgcgcgtggccgacctggcggctgccgacgacgaagacgaggaccaggcgacggagcggctcgagggcggcggtcaccgggcagcgcgtcgggcggccgggaacgacggcgacggcgtccaggccaagctcctctacctgctcagcgagctggagagcaggcgggagcgctacttcggcgagctggagcgcgtggtgtcgtcgttcgagccggcgctgggcggcggcgcggcggcggcctacacgaccctgatggcgcgggccatgggccgccacttcggcaacctgcgccgcgccatactgcgcaggctcaggctccaagccgccgccgcggcgaggaggtctctgcggcgcggcggcgaggaccaggacgacgacgacgacgacgacggcgacagcgacggcgaggtgaccgaggagctggtggacaggttggctcggcggacgaagctggccgcggcggcgcgggcggagcaagcgtggcggccgctgcgtggcctgccggatggctccgtggccgtgctccgggcgtggctcttcgaccatttcctccacccgtaccccaacgacggcgagaagctgaggctggcggtgaccaccggcttgagcaggcgccagatatccaactggttcatcaacgcgcgcgtgcggctgtggaagcctatgatcgaggagatgtacaaggacgagttctccgacggttccgccgtctccagctacgacgacgccagcgcctcctcctcctgactcctgagtcttgaccacctcgccctcgagagcgtttatctagctacttaatcactcgatgtctcggttgattggtcctgttgctttgggattatattaatttatttatatccagcttaatcatgtgcggtgcctctcttgtatttcttagaaaaggacatactccttcaaaatctagcgacttttcaaaaaaaaaaaaaaaaaaaa

SEQ ID NO: 2350 - DNA, 1083 bp, Zea mays
  Clone ID: ZEAMA-23APR03-CLUSTER303639_1
attcggcactcacttctgaagaatgacagccgtggccctggcgctgcccacggacgacgacaaagacggcggccgccgaggcgtcgaccactccccgacggctcccgcgccccctcctccgccgccgccgccccaggagctggtcatggtggcgcgcgccgtgcagcggctcgtggcgcggaacgacgcggtggtgccgccggcgccggacgggcgcggaggaggccggagactcgggatgcgggcgttcgaggcggcggagggcgcggcggcgccgcgcatcggcgtgcccgagtacctggagcgcgtgcaccgctacgccgcgctggaccccgagtgctacgtcgtggcgtacgcctacgtggacatggccgcgcaccgccggcccgccgccgccgtcgcgtccaggaacgtccaccgcctcctcctcgcgtccctcctcgtcgcctccaaggttctcgacgacttccaccacagcaacgccttcttcgcgcgcgtgggcggcgtgagcaacgcggagatgaacaggctggagctggagctgctggacgtgctcgacttcgcggtcgcggtcgaccaccgcgtgtaccgcaggtaccgcgagcacctggagaaggagacgacgctgatgatgctgcgcagggacgacggccacggcccgcccgtgcccgtgcccggcagcggcgcggcgcccaccaagtcgagaacggccgcgtcgtcggtcgtcaagccgccgctgacggaggatcgtcgccgcccggccgaagctggcgacgccgacggcggcggcgaacacgacgaccggcggaagctgcccaacagcgcgacggcggcggcgtctcttcgagagctgtgggccttcgattactagccgtagattgttgcatgtccaagctgaagcctgcagtgcaggcaaagagtgtgtcgtgtgttgtcgtgcgtgctaatccaacgacaggtagtgtaactggatgaaatctcaagctgttgagcgtcattgacgtactgttcatcgaattgaaaactatactagttgcctagttcacaatctattcctagctacctgaaaaaaaaaaaaaaaaa

SEQ ID NO: 2351 - DNA, 1272 bp, Zea mays
  Clone ID: ZEAMA-23APR03-CLUSTER3038_47
gcacgagaccattacctagaacatcctaatcgaaaaactcggcctcggccacggccaccctctcaaaccaaacagaacccacacgcgtgcacggacacggagcacgcgtgcgcgccccacgagcgatgtctccccttcgccgcgcgcgctctaccctgctcctcctccactacgtggccgcctcccacttcctgctgtgcgcgccgatccagcgcaccgccgcggccacattgccggaccccgcgccactcgacccggcactgatcctcccctcggcgacctcggtgcagcccaccgccactaccattcccgggggcacgatcccggcgttccccgagcagtcggactcgctagcggggtcctcgtccgcgtgcccgctcgccccttccccggtgctcctcccggccgtgcggtcctcctgcgccaccgacgacggcgcgctgccgccgaggctgcgctgctgccccgcgctggccgcgtggctgttcgccgcctacgcgcccaccgcgctagcggagcggcccccggccgcggccgcggctaccgtggacatgccgctgccgcccgacgactccgagacgtgcgcgggcgccgtggaccgcgcgctgcgtgcggcgggagcggcgctgccccgcccccctggcgctggcggcaacgggacgtgcgacgtggcgttctgctactgcggggtgaggctgaggcggctggcctgcgggtccccgccggctgagggcgggatgtggtcgccagctgacgccgcggcgagggagctggagaaggactgcgcgcagccgggcgtccctggctgttccaaatgcctccttgctcttaccacgataaaggccacgaatcccgggtgtggtgctggcgtggaggcagcaggcaagaagaagcagcagatctaccgatggaccgcgagtgaccgtgactgcgagctcatggggctcatgtggctgctgcagcgcaatgccacacggtacggagcggcggccacggccgtgatccgggccctaatggccgtggacgaggcgttcaccgcaggggtcgcggtggcggcagatacgggggcagccgtggcgtgctcgctgcccgtggacgacgacatgcccctcccggccgagtacgcgcaggtcagcagggccagcgacgcgcctcgtctctgctgcttcctgctcgtgctgctctccattctaagcttctgttttgtgtactcgttgtaatactttgcgatttaattgaagttcgttgtatggtccaaaaaaaaaaaaaaaa

SEQ ID NO: 2352 - DNA, 851 bp, Zea mays
  Clone ID: ZEAMA-23APR03-CLUSTER3038_48
agtcgccatgggcatcggctacgtagtgggcgtcctcggcggcgccatcctcgcccacgccgcctacgccaccatccagtgtacgctccatccttgtcccatcccgtcgccgcgctctcaccaaatttcgccgtggatctccgtttcccgagggcgcctttgatttgccgtcttgactctgggttgccgttccgtcgtgggttctcggtccttcggaacccgatgtgctctcggatcgatcctgccgttgagcctttagtgaagtgaggcgaggtttagatctagttcacgagcttctgtgatcctgggctctcttcaccgaccgggttcgacggctgcgtggttggctcagcagtgcacccaccgcgcggtgctcaagatcacggaggaggagttctcgcggccgcccatggatgtgatgatggagttgctcttagggttggtcttgtgcatgtgggcaggtcttgctgttcccactaaatttctctcggtgcttccacattctgatgagaataggatcgtctcgctcccggctaacctggatttcatgatcttcaaccaccgtggaagagtgctgccgtcagactcagacctgaaactccgtacatagacatgtcgtcccagaatccagatcttttttctttattttccctgctgtaacctgtagggatgaaaacggtcggaaacggtatttattcggtaatcagttttttagtcgtttttctttgattgcgaataaataggatatataatctacaatacaaatttgtattcttgtttttaacatccagcttgtaaagattcataaaaggtaaaccttaaattcaaaaaaaaaaaaaaagggcggccgc

SEQ ID NO: 2353 - DNA, 2660 bp, Zea mays
  unsure (1)..(2660): unsure at all n locations
  Clone ID: ZEAMA-23APR03-CLUSTER3038_62
ggagttttaacaaatttaattctaaaaatgcccttttccctttgggcttgggatttttgggaaggggcttggtgtggccttttttattattactccaggggcgaaaggggatgtcttccaagacgattaggtggctagcgacaagtttttcccagtcaagatttggtaaaacgtcgcccatggactgtaatgcgatccatattgggtcgattgggtaccgggccccccctcgagtttttttttttttttttttcaacacgccaatccaaacaaggaatattcatgtcttctgacatacgtcttgataatcacatatctagagggaatgtaaataaattacaataactcaaaaaaatctgaatacgtggctgcgaagttcaaaggccgaccaccaccgtccatcgccgctagaaaacaagcgatctaaagccaccatgttaggcatattatccaatgcaaatgccgattaagtaaaatctaacctcctaaactacgcgcacctgaagtttcacaaatggagggtttcagcgtgctgctgacagctgggatccagtggaggcaaggcgaagaggtggccttaggacagggcagcagtgctggtgtgttgccaccgtatgcaggagacagcctgtgggcctggtcaagcagggtagcttcattggagagattaacaatgggtacacatcaccagagagggtcagaggtgatcactgatcagtcagcggggacgacactggagttggaagtttggaacgcatgagagatggagagacgagagattcaaaagccggtctctgtcatcgtggacactcggatctccatccgacgtccacttcattgcctgaagctaaaccaaatttcaggcacctgacatagagtgcctctcgaaaggaatagagtgcacgggaaacacaaacacacacagagagagactatgcattggctgtagaccaccccagaaataattgattgaatcctgttaacaacaaaatacgtcagcaatgattaattgaatatcaccaagcttgttaactatcttaaaccgccatgctttagagtatgcacagtgataacacctgctatggcagagtgtccattttaaatttttatgtcaaaactttttaaaattcaaagtgaaattgtctattggcaggacagtaaaataccaaacaatggaaaaaccaaggcatttatagtacaacatgacagacagtataagattgtcatttcaacctggagaaactttattaggcttttgtttggtagggcttctcaaagcttcttcggaggagctggaagagtttaagggtctgtgagagcgaaatatttttttatagtttctatgcaataccatggttttggacaataccgtagtattttatgtcatgaggtgtttagttgcactcctgaaaactatgttttcaaaaccattgtttatagataccatgatatttttagagtattggagattccactacaacccaaagtttttatggcatgactagcttttgcctaataccatggtttataatattgtctccaaacaatgtttctcaaaaccatgttatttttggagctaccaaaactacggtattatcatgtgtaaaacattgttgccaaacatgccctcagagtttttcaaaatggctctagctcctccctttttaatgaaagggggggggggggccgcaatcatagagatactacccctcccccctcgcacccggaggacccactaagatcaccaaaggacgccaccgcgcccggtcagcccccctctttcccccgcaaaacggggtaaactatcccacctggctccaatccatggttcatacccaattccatggccaaaaaccgttaatccgcctcacaactcccatcacatctatcggagccgccaaaccttaaacgcgcaaaagcccgccagcggacaaatggtccgacgtccacccccccccacatgtccctccagcgcccccttgactaccatctcacgggcccccaaaaacgcgcaccggtcacaagagcatccaacgaaaacccggccaatgcgcccacgaacacaagaagctttcacacaaacagagcgggtttctccgccctatcccaccccacccctcaacttcccactacccccccgcccccacccaacactatttcacacaagccctccccccccttccaccctccccacatgcgggcgaccccacaatctaaacccacaactaatcccgggcgcacacaccccccacgcatacacaccacctcggcatttccaataaagcaccacccaacagagaggcagctaaaaccctctagaacaaaaagctcaccacccaccccggcacaatgctataagatgaacactcaacacaccccccgccccttgcacccaacctcccaactctcacctgcgccccaccgcccaccaaggctctgcccacaccccctcattcgtcttatataaaacacaccccccgacacctatacactccccgcatcaacaacgcccccccacagccncttctcccagaggcccccacccccagcgccatctcaaacaccgcaaccacgaagccgcaccctctctccctctcccacacggcaaacccgaccggtggatctcctcatacatgtacacgtcaactcgatccgcacct

SEQ ID NO: 2354 - DNA, 1496 bp, Zea mays
  Clone ID: ZEAMA-23APR03-CLUSTER30402_25
tgggccttgcagtttttggttgtgtatcggggaaatggcaatcgacgacgaatcgccgatcagagtcaacagcagaggcggcggcggcatggtaacctggatagcacaccttcttttgtactctcttcttgccttgttttttttcccctttcgatgccctgtttctttgctctctgttgggctttctttgctctctgttgggctggcgctaacatggcggcgccgcgccggatcgaatgcggcagggaggaggggagcgcgacggggcggagaaccagcggtggccgccgtggctcaagccgctgctggggacgagcttcttcggccaatgcaagctgcacgcggacgcgcacaagagcgagtgcaacatgtactgcctcgcctgcatgaacggcgcgctctgctcccagtgcctcgcctaccaccgcgaccaccacgccatccagatacggaggtcctcctaccacgacgtgatccgggtgtcggagatccagaaggtgctggacatctccggcgtgcagacgtacatcatcaacagcgcgcgcgtggtgttcctgaacgagcgcccgcagccgaggcccggcaagggcgtcaccaacacctgcgaggtctgccagcgcagcctcctcgacaccttccgcttctgctccctcgggtgcaagatcgtggggacctccggtgacttgcgcgtccggaagaagcaggccgtcgtcaagaagaacaagaagaagaagcaggcgcagcagcagcagcagcacaggggcgccgcgttggactcggaggacgactcttcgtccaccagcaccagccgcggcagcgacaggagcagcgtggtgcagagcttcaccccgtcgaccccgccggcgacgcccaacagcttccgaaccgggaagcggcgcaagggcgtgccgcaccggtcgccgttcggcagcctcgtgctggagttctagaaagcagcggttctataccatctataggtgttgccggatcggcctcggccggtctacatagttcatagccacccaagaaaaaaaaaacggagctagtagtagcaactatagcaagcaataaccaaggccccactgcacgcccgcgcttctggacgacgaggccggtgcaatgtggcacgtacgtcgtacggtacggttacctctacttccattccatagtactgtactactactgtagtttacatgcagtcgcagagctgtgctggtagtgacaacggtttgggttttggtgcctgtaaaaggaaacgaggtagttgtagcagttacccttgtcgtcaccactcatcagcagccagccactactgaattacatagtatataggtgtttcctagttttaccagcgcttgatatagatgtggatgtacatatatacatatactgtcacagatggggaacggtaggagtgttgttgttggtactggtgtttgcgtttgttgcctgtaataataaagaggataagaatgctgcgaaaaaaaaaaaaaaaa

SEQ ID NO: 2355 - DNA, 1418 bp, Zea mays
  Clone ID: ZEAMA-23APR03-CLUSTER30402_30
agtgtctcctcccttccctctagtattttacagtattttactcgctgcctgcgttccaaaacctttcgtcttttcccccgccgtctacaaagacttcacactcgcagtcgcagccgcaggctgctccggcagactccttcaccgcgaagacttctcctctcctctctcctctctcccttccactcgcgctctcctggataccgcgcgcggcgacgagatggcgatagatcacgggacccctctcgggctgaagcggagaggcgccatgggcggaggtggcgagtgctgcgacgacggcagcgagacccggcggttgccgccgtggctgaggccgctgctgtccgcgagcttcttcgtccaatgcagggtccacgccgacgcgcacaagagcgagtgcaacatgtactgcctcgactgcatgggcgacgctctctgcgcgctctgcctcgccgcgcgccaccgcgaccaccactccatccagatacggaggtcgtcgtaccacgacgtgatccgggtgtcggagatacagaaggtgctggacatcgccggcgtgcagacgtacatcatcaacagcgcgcgcgtggtgttcctgaacgagcggccgcagccccgcccgggcaagggcgtcaccaacacctacgaggtctgcgagcgcagcctcctcgactgcttccgcttctgctcccttgggtgcaagatagtgggcacggcccgtggctaccgtcctgggaagaagaagcacggcggcggcggcggtaacaagaagagggcggcgccggcgccggcgcttaaggacgtgcggtctgactcggaggactcgtgcaccagcaccagcggcgccagcagcgacaagagcagcgtcgtgcagagctcccctccgccgccgacctctgccagccaccgcccccccgggaacaagcgccggaagggcgtcccgcaccggtcgcccttgggcagcctcatcgtcgagctctaggactcttcgtcagcgccaaggcaaggcaaggcaacgcactctgtactgtacatgacataccccccgaagagaagggaataacaaacagtaagcctctggacgtggagggcgaagggcgacagcggtaagccgtaagatcggacaatccttagttttgcttcttctcaggttttgttttgcttttacagttactaccactctagcagtggtaccatcagtaagataaccgcgactaagttttgcagccttgtacattgtaatattattattactatagaccatgactctccgatgcttagatgtatatagtaatagtatcagaacgtgggggtagcagtcgatcggcagcgaggtgttcgtcgtatgtgcatcataagctgtatgtaataaaaataagaaacgctgctccaaaaaaaaaaaaaaagggcggccggctcgcgat

SEQ ID NO: 2356 - DNA, 1180 bp, Zea mays
  unsure (1)..(1180): unsure at all n locations
  Clone ID: ZEAMA-23APR03-CLUSTER3041_2
attctttgtccgcttctcctccgctccccatttctcttgctagggtttctacccctccatatcctcgctccacggtcatggcgaagacgaagcagggaaataaggacgtggattcgtacaccatcggcggcaccaacaaggtcgtctatggtaatttcccgcatccccgatctggttgtatctgttttccccgtgagaggtatctgatgctgctgcaaatgtctgtgccgggaagtgggagactgcgtgctgatgcgggcgtcggactcggacaaccagccgtatgtggcgcgggtggagaagatggagggcgacgggcgtggcagcgtgcgggtgcaggtgcggtggtactaccgccccgaggagtccaagggcggccgccggcagttccacggcgccaaggagctattcctctccgaccatttcgacctgcagagcgcccacacaattgaggggaagtgtgttgtccactctttcaagaactataccaggcttgacaatgttgggcctgaggacttcttctgccgattcgagtacaaggcggccaccggtattgcaaatgtgagatgccgtacaaccccgatgacctcatggtgcagtgcgatgcttgcaagcactggttccatccatcttgtgtggctatgaccattgaacaggccaaaaagctagatcactttgtttgctcagactgtttcaaagaaaatggttcaaagagactttcaaatgcatatgccacttcaccaaattttgagcctaagcaggctgaaccaaaaaggcagaggaggtaacaaactgtgagtggtaacatccatatgggtaaggggagatgtgctgcttctgtggtgaatcagcccttgccctttgctgtggtgagagcagaggtgtacagtgtactagaccagtgtttgctgttaggggaacgggttttgttcgatgtgtagaccgtgtggcatggcatgcagttgttggtagaggtcaaaagaacagtcgttgtgttcacttggtcagcttagccttgccttgttaatgtgttaatgcactgtgttaactcagcgagccccccttgtggctgataatgcaagtcatgcagttgttgatacaaatgttgctgcggccaaaaaaaaaaaaaaaaaaaaaaaaaaaaaaaaaaagggcgaacggacgcgtggaanaacgatat

SEQ ID NO: 2357 - DNA, 985 bp, Zea mays
  unsure (1)..(985): unsure at all n locations
  Clone ID: ZEAMA-23APR03-CLUSTER3041_5
ccgatccggttgtatcttttcctgtgagaggtatctgatgctgttgcaatgcctgtgctgggaagtgggcgactgcgtgctgatgcgggcgtcggactcggacaagcagccgtatgtggcgcgggtggagaagatggaggccgacggacgcggcanngcggggtgcaggtgcgctggtactaccgccctgaggaatccaagggcggtcgccggcanttccacggcgccaaggagcttttcctttccgatcatttcgacctacagagcgcccacaccattgaggggaaatgtgttgtccactctttcaagaactataccaagcttgataatgtcgggcctgaggacttcttctcccgattcgagtacaatgcggccaccggttcgttcacccctgaccgcgtggcagtgtattgcaaatgtgagatgccgtacaacccggatgacctcatggtgcagtgcgatgcttgcaagcactggttccatccatcttgtgtggctatgaccattgaacaggccaaaaagctagatcactttgtttgctcagactgtttcaaagaaaatggttcaaagagactttcaaatgcatatgccacttcaccaaattttgagcctaaggctgaaccaaaaaggcagaggaggtaacaaactgtgagtggtaacatccatatgggtaaggggagatgtgctgcttctgtggtgaatcagcccttgccctttgctgtggtgagagcagaggtgtacagtgtactaggccagtgtttgctgttaggggaacgggttttgttcgatgtgtagaccgtgtggcatggcatgcagttgttggtagaggtcaaaagaacagtcgttgtgttcacttggtcagcttagcccttgttaatgtgttaatgcactgtgttaactcagcgagccccccttgtggctgataatgcaagtcatgcagttgttgatatcaaaaaaaaaaaaaaaaaagcggccctcgagctcc

SEQ ID NO: 2358 - DNA, 2710 bp, Zea mays
  unsure (1)..(2710): unsure at all n locations
  Clone ID: ZEAMA-23APR03-CLUSTER304_1
atcacacatccaccgccgccgccaccaccaccacccgccctatacccgtatataattactcgtacccggacgccaccgccgcctgcgccatgggcgactcctcggtggccggcgcgctcgtgccgtccgtgcccaagccggagcccgcgccgtccggtgacacctccgcggcggccgcggcgactacagcggcgctggcgatgccggaggaggcgggtatgcgcgcggcgtcggcgtcgcctcaggggcctgcggaggagggggagggccccgccgatagggaccttctctgcccgatctgcatggccgtcatcaaggacgccttcctcaccgcatgcggccacagcttctgctacatgtgcatcgtcacgcatctcagcaacaagagcgactgcccctgctgcggccactaccttaccaaggcccagctctaccccaactttctccttgacaaggttctgaagnaaaatatcagcccaacaaatagcaaaaacagcatcgccaatcgatcaatttcgatgtgcattgcaacagggaaatgaaatgggggttaaagagttggatagccttatgactttgattgctgagaagaagcggcaaatggaacaacaagaatcagagacaaatatgcaaatattgctagtcttcttacactgccttagaaagcaaaagctagaagagttgaatgagattcaaactgatctacaatacatcaaagaggatataagttctgtggagagacatagggcagaattatatcgcacaaaagaaaggtactccatgaagctgcgcatgcttttagatgagcctactgcacaaaaaatgtggccctcttctatagacaaagctagctgtcgctttcttcccaactctcggacaccacttagtggatcatgtccaggaactttacagaataagaagcttgatttgaaagctcaagtaagccatcaaggatttcaaaggagagatgctctaacttcttctgatcctcctaactcccctatacaatcgggtaatgttattgctaggaagaggcgagttcaagcacagttcaatgagcttcaagaatactacctgcaaagacgtcgtactggagcacaggcacgcagacaggaagaaagagatatagttgcaatgaatagagaaggctatcatgcaggtcttcaggatttccagtctgtgctaacaacgttcactcgatacagtcgtctacgtgtcattgcggaactaagacatggagacttgtttcactctgccaatattgtatccagtattgaatttgatcgtgatgatgaactatttgctaccgctggagtctcgaaacgtattaaagtcttcgaattttccactgttgttaatgaaccatcagatgtgcattgcccagttgttgaaatggctaccagatctaaacttagctgcctaagctggaacaagtactcaaaaaatattattgcaagcagtgactatgagggtatagtaactgtgtgggatgttcagacccgtcagagtgtgatggaatatgaagagcatgagaagagagcatggagtgttgatttttctcgcacagactcttcaatgctagtatctgggagtgatgattgcaaggtgaaagtgtggtgcacaaatcaagaagcaagtgtgatcaatattgatatgaaagcaaatatttgctcggttaaatataatcctggatcaagcttctacgttgcagtcggatctgctgatcaccatattcattactttgatttacgtaatccaagttcgcctgtccatattttcggggggcacaagaaagcagtatcatatgtgaaattcttatctaacaatgagcttgcgtctgcatcaacagatagcacattacgcttatgggatgtcaaggataactgcccggtacggacattcagaggacacaaaaatgaaaagaactttgttggcttgtctgtgaacaatgaatatattgcttgtggaagtgagacaaatgaggtttttgtttatcacaaggctatctcgaaaccggcagcaagccatagatttgtatcttctgacccggatgatgccgatgatgatcctggttcttatttcattagtgctgtctgctggaagagtgatagccctacgatgttaactgctaacagtcaggggaccataaaagttcttgtacttgctccttgatgttatggagggcgttcaagaggttcacagtactgtccagttgtttcctttcgtgtcattatattcccccaaaattgggaacgggggcataattgatctccggttagggaatgaagttttgcagatggtcagctgacgtagggttttgaggtatcagaatgtgcatagtcatgtttatgttgtataggtgtaattgtgtaaagcagccaagttattggttacaagtgtaacacgagaaatacacattaatataaaaaaaacctccagctcgtttgtacagagattgtgtttgaacccagaaccttatgtggtaattgcgattagtaatatatctacctgatatgatcagcaaaaaaaaaaaaaaaaaaaaaaaaaaaaaaaaaaaaaaaaaaaaaaaaaaaaaaaaaaaaggggggaagaaaataaaggaaaaaaaataagggaggcgggcatgcaaagaaataaattttttataagggggggggggcctttttaaatggccaaatttttaccccgtgggtacggaaaaaaccttttt

SEQ ID NO: 2359 - DNA, 3407 bp, Zea mays
  Clone ID: ZEAMA-23APR03-CLUSTER305_3
attctccctcttcccgacccgcacccgctcctcagtcctccccctcttgatgcagatattttgaaatctaagccaccgcagcccgcccgtccagcgctgctctccgccgtcgcttgcgccatgtcgtcgcgacatgacaaggagaagtcggtgaacgtacaggttctcctccgctgcaggcccttcagcgatgatgagctccggaacaacgcgccgcaggtcatcacctgcaacgattaccagcgggaggtcgccgtcacgcagaacatcgccgggaagcagttcgatcgggtctacgccttcgacaaggtttttggaccgacagcaaagcagaaggaattgtatgaccaggccattattcctattgtaaatgaggttttagagggatttaattgcaccatatttgcgtatggccagacaggcactggaaaaacatacaccatggaaggcgagtgcaggagagccaagagtggaccgaagggtcaattacctgcagacgctggagttatacctcgggcagtgaagcaaatctttgataccctggagaggcagaacaccgagtacagtgttaagatcacgttccttgagctgtacaatgaggaaattacagatcttcttgctcctgaagagatatctaaggctgcatttgaggataaacagaagaaagccttacctcttaatcttatggaggatgggaagggtggagttcttgttcgaggtctagaggaagaaattgtcacgaatgcaagtgaaatattctctctattagaaagggggtctgcaaagcgccgcactgcagagacattactgaacaagcaatccagtcgatcgcactccctgttctcaatcactattcacataaaagaggcaacccctgaaggagaagaactgataaaatgtggaaaactgaatctagttgacttggctgggtctgagaacatctcccgttctggagctaaggagggccgcgcaagggaggctggcgaaatcaataaaagcttgcttactctgggccgtgtgattacggcactggtagaacaccttggtcatgttccttacagggacagcaaactcacaagattgctgcgtgattcattaggaggaagaacaaagacttgcattattgctactgtttcaccctccgtgcattgcctcgaagaaaccttgagtactttggattatgcacaccgggcaaagagcattaagaacagacctgaggtaaatcagaaaatgatgaaatcaacattaattaaagatctttattgggaaattgatcgacttaaggcagaggtatacgctgctcgagaaaaagttggagtgtacattcctaaagacagatatcagcaggaggaaaatgagcgaaaggcaatggctgatcaaatagaacaaatgaatgcttctttggaagcaaaccagaagctaattagtgacctgcaagaaaagtatgattctgagcttcgacattctgctgatttgagcaaaaagcttgaagtcacggagaaatgtatggaccacacaagcaacctactctctgcgacaaaagaagatctgaaacaggcacagtataatctaaaggagaaagattatataatttccgagcagaaaaaagcagaaaatgctttaacacaccaagcttgtgtgctgagatcagacttgaaaaatatactcgcgataatactttcactgtattcaaaaattgctagaggagacaagctaagtgcaacaaacaggtcggtcgtgaatacattccaaactgaccttgcttcgaagttggatactctttccaatacactcaatgcatcaatagaccagcaaaatatgcacctaaaagctgtggaggatttatgccaatcctgtgttgattcccatgacagggctacttctgagctgaaaaagaagattttggcttcaaaatcattatacatgtcacatatggaagctttccaaaatgttgtcctcctacataaagcaagtgcaaatgccacactagaagatatatcatcactgtctgctacaagctgctgtagtcttgatcagctactagtttgtgttgagggagaggctcaaaatatatttaatgacatccataaattgttaaccacacaccgaagcgaaatgacacacttcactcaacaattaagggagagtttccaaataagcttggacaggacaaaagaaatgtctacctatattattgggctctttgacaagtatgttgaggagacctccaaattgcagagtcactcaaataatactcatgaagcacaaatgaaaagcattgaagattttcagatggtttacgaggagcaatcaaaatcagaggagcagaagcttctagcggacattagcagtttagtgtctaaacatattactcgacagagagagttggtgggagttagattgagctctctgggtgatgctgcccgtggaaacaaggcatttttggatgaacacacatcggccatggagtttgtcacaaaagatgctaagaggaagtgggaaacatttgcagagcaggctgagaatgactgcaaagctggctccagctcttctgcagtcaagcattgccgcatggaaaccatgcttcaggagtgcgcatgcactgttgactccgcagttcagcaatggaagaagtcacatgctgctgtcaacgatctcagcagaaagcaagttgctgaagttgaagcactcgtcaggactgcaattgagaacaatgagcaacatgaagtggaagttgcatcttctcgagctgtggctgaagaagacaccaccaatagcagcaaggacatagcccagggcgttgaaaatctgttggaaaaggcacagaaatctagttcaagaggtgtctcaatggtggaggctcacttcgcagagctacagaagctgcaagagagccactccaccccagggtaccggtatcaacatgcacgcagacaagtctttccaaaccagttacaaggattacgagccgacgggtgaaactccagtgaggtttgagccgaacgtgccaagcaaaggctcgatcgagtcgcttcgagccatgcccatggagaccttgatgaacgagttccgtgagaaccatccgtatgaattgaatcgagcaaagaatccaagttatctcagatccctcgcttgccgctcggacaatcaactgagacatctcacatcccccgtgtgcagtgtaattttattagtagagcatcaatttggtgtccttgttgtgcacttgtgctaagttaactgcggcgggtgagctgccttggctctccccccagtgcatttccccttcccccagtcaatcatctgtatcattgccttgtggacactgatttttgtagagcatcagaaatttgcccgaaaaaaaaaaaaaaaaaaaaaaaaaaaaaactcgaggaggggggcgggaa

SEQ ID NO: 2360 - DNA, 905 bp, Zea mays
  Clone ID: ZEAMA-23APR03-CLUSTER3063_3
agaatgatgctgaattgttttagtaaccattacattcaatcacacctgactgtaaatccagcatttgaactaatataaaaaattgaaacgttctactactgtgatcagttgtcatttcaggtaattgtgtcacttctatgtgtatctgcatattttattgttcatatgtccaaagtaacactctgaaatatgtatgttttccatcatcttgggcatcacaaagaccattaagaccataaaaccaaccatcaaccccatggggctcttcaatagtgacatgacggagaaaagttccctaaccttatccactcgcgcccaccacgccgccgcaccgccgctggtgaacggatccgtccatcccgtacaccgcccgtcgctgccgcttctccacgaatgcagcggcgtcgaacccgtcccaggcgtcgcagcagctgcccaggggcaagcgatgggatgtggtggtgatcggcggtggccacaacggcctcgtcgcgttcagaaagcaatcgtccttatagacgagacacgagaggcagcgagccagcgaccgacaacagttttctcggaaggcaacctcttcctcgtcgccgccgacgtcacccgccgcggctgtcgaggatgtcggtcagggtggtcgataccgccacgccttcctcgcagccctccctaggttcccctacccacctcgcatccgctgtctccaataaatacgctatgcgcgcatcaggtccgctttgtacaatcaggtctagatcttatcggattacaactctttgttgcctcggcgtgatgcgatttcgttgaatttcagttggaagctgtttttctgatctagattggtctaagtcatcttgagtgtgtggctttagtttggttccaaataaatcaattcctagaatctgtac

SEQ ID NO: 2361 - DNA, 1015 bp, Zea mays
  Clone ID: ZEAMA-23APR03-CLUSTER30680_3
atggggttggcctagttgtgcccgttgagcactagcagcctccttgaaacctccagatctgtgcctccaaggcccccgttcctcggcaacaagtcccatctgacggaccttgttccctgtgcccgcccacgtggcctcctctgcagccgtccagatggacaccgccgcgcccctgcaactgaaagcctgcgccggcgacgccgcggagaagctgctgctcgccgtcgcagccgagggtcctatctgtggtgtgccagacttcaagatgaggggaaagaagagtgatgagctcgaacctgtcgatgctggcgatgaagatgatgatggtggtgacgatggggacgaggatggtgactttggggaggagggtgaagaggacgtctcagaaggggagggatatgacaacccaaagggcaatgagaccaagaagcaaagaggtgatcctgaggaaaatggtgaggaagatgaggaagaaccagaagatcaggagggtggcggcgacgacgatgatgacgacgatgacgatgatgagaacggggatgacgaggacgacgacaatggggatgacgatgaggagggtgtagatgaagaagacgatgaccaggacgaggatgaggaggaagatgatgatgaagactcgctccagcccccaaagaagaggaagaagtgaagatcttctgccgctttagttaccgtgcgctgagttctgcctggcttttcgtcatatcctcgcatttcaactttcccatagagagttaagaaggatccacacgttcagcagcacgtgtgggcttgtaggagctttatgatttgaggcaattagggacaactcttatgtcattgttgcttgcttctgtggagtcgaacagatgtttcgctaacataattcgacttgagtgatgaaagcctccagattgaatatgccttctcttttatctcgtatggaatcattgatgcagccctggttgatagcgttccttcaataaatgaattatattggcatcatgacagcttc

SEQ ID NO: 2362 - DNA, 748 bp, Zea mays
  unsure (1)..(748): unsure at all n locations
  Clone ID: ZEAMA-23APR03-CLUSTER30750_7
agtctctccactccaccactgctcgtctaacccggtcttcaaatttgagcttttctctctctctctctctctctctctctctctntgcgccaacaaattctccagccttacagtatattttggtggccatttggtacaggcgtnggactcccaggaggatgacnggtggcaagaggttcggcggcgggcgggtgccgagggggaccccgtccctcgcgtggtcgtncgtcgtcatcgtcgcctccctcctcgtnggcgcctccatcgtccacaacatctacaagcctgacatgaccattccacctgtggagggtgccgcgggcggcggcggcnaagaaagctgagctacgantggctggacactgcatgcaagagaggaggctgggcatgggagtngtgagggaccggccatcagcacctttttttttttgttctagaacaaaaaacgacattatgttgttcttttctgttttgctaccaaaagatgtgaggctgcatagtatttgcttccttaggcgctactggtcacgcgtaaccatggggttattcacaaccatgtcagcaacagaaagtatatgtacgttgattttgtgttttttttttctaatggctaactaggtgtgtgcccgtgcgttgcaacggaaatatataataccatgacaacttatgtnaaaaaaaaaaaaaaaaaaaaaaaaaaaaaaaaaaaaaaaaaaataagagataaaaatgttgtaaatttatagagagg

SEQ ID NO: 2363 - DNA, 669 bp, Zea mays
  Clone ID: ZEAMA-23APR03-CLUSTER30756_4
atgctataaccctaggcctcttggtatttaattcccagcagcagctgcccacacgccgccgccgttcgctgctcggcgctctcctctcccgacgacagctacacctcacaatcgtgagctcgcgaaggaacgctgttcgcaattccggcgccggcaccatgagtaagctgcagagtgattctctgagggacgcgattgcctcaattaccaatgattcccgtgagaagcagcgcaaatttgttgaaaccattgagctacaaattggactgaagaactatgaccctcaaaaggacaagcgcttcagcggttctgttaagctgcctcacatccctcgccctaagatgaaggtttgcatgcttggtgatgctcagcatgttgagggaggccgagagaatgggtatagacgatatggatgtggaagctcaagaacaaaacatcaagtacaagaccaagtttgtaactagatcttccagaatgtgcaaatgagtgtcaacttcctcgtgtcgctcttgaaaaagaattggcataatgtgacatgcttgtacctgaagagcactatgggaaaggtgtaccggctgttctaaattttccaattaggcttagaattctcaggagactctaatgcttggacacttgccatttttcctaacattcatttttttgatccac

SEQ ID NO: 2364 - DNA, 1975 bp, Zea mays
  Clone ID: ZEAMA-23APR03-CLUSTER3076_2
ctgccttttggtgttttttcttctcccgttcaagtcgcgtgctgctttcttctctcgttcacctcgcgtgcgcgaaccaactagggcgaccgctgccgccctacggcctacgcccagctgctcaggtcttattcgggcctttggcggcgagaaccgactgcgccaggataatggctcaccgtggacacttagatggactgactgcccaggctccagcactgatgcgccatggttccttcgctgcaggcagcctttctagccactcacctttggagtcttcatctacactggagatgctggagaacaagcttgccatgcaaactgcagaagtggaaaagcttatcatggagaatcagcggttagcatcaagccatgtggtcttgaggcaggacattgttgatacagagaaagagatgcaaataatccgcacccacctaggtgaagttcagacagagactgatttgcatattagagatttattggagagaattagattaatggaggcagacatacatagtggtgatgcggtgaagaaggagcttcatcaagtgcatatggaggcaaagagacttattactgaaaggcagatgctgacccttgagacagaggatgtgactaaagaattacagaaactctctgcctctggtgacagtaaaagccttcctgaattgctagctgagctagatgggctaaggaaagagcatcttaatttacgatctcaatttgaatttgagaaaaatacaaacatcaagcaagttgagcagatgcggacaatggaaatgaacttgatgaccatgactaaacaagctgagaagttacgaggtgatgtggcaaatgctgaaagacgggcacaggcagctgtggctaaagcaacagggcatgcagctggtgcacaggtgacagcttcacagcctgggacagctcaagctacagcggttccagcagcagctacagatccatatgcaggtgcatatgccagttacccccctgcatatcagcagggagcccaggctggggcgtaccaacagggagcccaggctgggacgtaccagcagggagcgggaacccaggctggggcatatcagcagggtgctcaggctggggcatatcagcagggagcccaggctggggcatatcagcagggggcccagtctggggcatatcagcagggggcccaggctggggcatatcagcagggagcccaggatggggcatatcagcagggagcccaggatggggcatatcagcagggtgctcaggctggagcatacaactatgcttatgatgctggcacggcttatgcatatgcaggttactctggctatccagttgcaggctacgcgcaaagtgcagtgcccaactattcctatgctgcacctccgcagccaacaagcagcggtgcagctacgaacgccgcaggaggccagtatggggcagttggtagtgctggatatcctactgggcaagttcagccgagcagtggcactgcaaatgcagcgcaagcacctcctcctccaccaccaccggcagcaccatatccccccagcacatatgaccaaaccagaggagcccagagataaaatctgggatgtaaaccagatggatgtttgccatgcacatttgttgagcagacaaatatggtgaaatctgggatgtaaaaccaagatggctggctgtctgtgcctccatcccattgactagggcgtattttcaccaatattgtgcctccagtgcaatttcttttgtgttgtatatcaccaccatttgttgagcaccgtagaaatgagttccagacggccgggacagcaactctgtcaggccccatttgtagactgattactggttcagttatgtagacccagttacgggtagattaatttacatcccgacggaagagttgatgtaaaaaaaaaaaaaaaaaaaaaaaaaaaaaaaaaaaaaaaaaagggcggccgccacgcggtggagttcagtt

SEQ ID NO: 2365 - DNA, 851 bp, Zea mays
  Clone ID: ZEAMA-23APR03-CLUSTER30814_2
cccatgtagggctgattaaattttgggagttccaaggccaattatagtttaagtgactggcgttcgttattataatataccctggggaatataaaatcctgaggcagtagatttgacaaaggaaaaaaaggaaagtaaatctggggggagaggacaagatggaagatgcaaaaagaacgactgctgcgggctgcggttaagccatgatcagcagggcagcagcagctaccatggcggccggcccaagaagaacgcgactccccctgcccgacgtggcggccgaggacgacggcggcgtcttgtagtaccatgggtaccacggcaggatggggttgggcggcggcggcgccgggtagccgccgtaccccccactaccgccgccaccaccgccacccgccgcaggctggaagtagggaatgtaagcccccggcggtggcgggtacgagtacgacgccgcagccggcggaggcggcgggcagttggcggtgacggcgggcggcggcaggcacgggtaggggcagtcgccggccgggtacgcgctgccgtctgttcgggacggggggcggaagcagggcgtgccgggacgagcagcagcgccgagaagagcgtggcctcgaagaggaagatgagcctgctgccgtgcgccgtggccatatggctagagtgagtctagaggccggccgggcggagagagagatgtgacgagctgtaggctgactggtgatccggtgatgaagtggagtgtgcgcgtgtaaataagggaggaggactcagctccagcgccttcagcttcaagcccaccacggtggttggtcggcgccggtgcagtgtgtgtgtggagatagaccgcc

SEQ ID NO: 2366 - DNA, 1908 bp, Zea mays
  Clone ID: ZEAMA-23APR03-CLUSTER3083_2
gacggagacgtgtcactggcggcgttgagaagacagaagacttcagaccttctagattttttcccggccgcaatggatctctgggagagggcccgggccttcgccggcgaggcggcgaattggtcgcaggagctctccgcggaggcgaccaagcgctcgtctgcgctggtctcggagacggcgaagaagtcgaaggagatcttttccgagaccgcctccaagtcgctggagatcgccgccgaggcaaccaagcaggccgacctcctggccggccagatcaagcacctcgcttccgacatccccgtaccctcgatcccacccatccccgcgatcccacctatcgccgccactgcctcgtcggagcccgacgcggccgagcttgagcgctacggcatcaccgacgacctccgcgagttcgtcaaggacatgaccataagcaccttccgcgagttcccactgcaagatgagcctgagatgtctgatgtgccaacggtgtcgaatgtgcgtcaggatctgagcgaatggcaggccaggcacgccacacttgtcctctcggcagtcaaggaaatatcgaagttcagatatgagctatgcccaagatacatgaaagagcgcaaattctggcgggtatattttttgctagtaaacagctatgtagccactcctgttcgtgatgcacaaacttttactagaatgtcgacggtttgccatttatttatcatgtcacacttgtcaaaaggaatttatagaaatttatttgaattggtgtagccattacttttatttgtggcattgtagtatgctgattttatccattgtctgcaattattattgatggcataatctgcggtcctatttacttgggcctcctgcctcggctgcctccatagatgcaatggagcttaccttgaatatatttattatcacatttgatcttttcatatttcacataaatagttgatttccaaccactgcttattatatcatgatgttagttttctggcatagtttttgcgcatttacatttttgctgacttcagtaaaattctaataggttcgagaagaaatccttggaggagctgaaagtgaaagcagaggaagagaaaagggattcccagaagcaagcatcccaggcatatacaactttcgaacccaaagacacaaaagcgccaatcaagacctcttcaacaaatccagaacatgatctggatgtatttcttctgggagatctgggtagcgacgatgagggacctgttgatgatgatgatggcctagatgaggacttcgataagattgatgtgaccacgggattggaaagtgatgacgatgacaaaaaaatagcaacagggaaagcagaagatgcgaagtagtagcctatggttttacgattcgacagatgaccacaatgatagcgaactttagtattccaagatggtattgtatattagttgatcgcatgtcatcaattcatttgttatctcccagaaaagggatgttaaacacttgtttttttacaactttcgatttttaactaaactcacacatcttatcgatgttgtgactcctcttttcctattaggagttttctgcatatgttgattgaacaaaaaaaaaaaaaaaacaacagggaaggcagaaggtgtgtagtagtagactatggttttgagagacgacgccaatgatagcgaacttcaggattccatgatgatattgtaaaaaagttgatcgcatgccgtatgttcatttgttatctcccaatgaaggaatgctaagcacttgttattacaattttcgatttttttttactaaactgagacacctatctatggatggtgttactcttttcctaaaaaaaaaaaaaaaaaaaaaaaaaaaaaaaaaaagtgctctgcgttgttaccactgctt

SEQ ID NO: 2367 - DNA, 1739 bp, Zea mays
  Clone ID: ZEAMA-23APR03-CLUSTER30887_2
aagttgagcccgtgagaagccaaatcgcgaacccacccgggccaggggcaaacctcgtgctcccctccacttgccgaggaggctcgcgacccgcgacgccttccgcagccccgacccaaaccctagccccctccaccgtactgccaccgtcatggccgaatcatctgccgctgccgaggtcgggtcgccagcttcgttgccaccactggtcgccgaggaggccgatgccgccgcgatggaggaggccgcggcggtcgcgaagaggtggcccgggtggcccggggacagcgtgttccggctggtggtgccagtgctcaaggtcggaagcataatcgggcggaagggcgagctcattaagcgcctcgtcgagggagaccaaggccagggtccgcatcctcgagggacctgtcggcgccaccgagcgtatcgttttggtttctggaaaagaagatccagacttggagctacctccagccatggatgctctcatgagagtttttaagcgtgtcactgggataacagatggagctgctgagggcactcaggccgctgctactcctgatgtatgtgctgcccgattgttggttcctggagctcaggcaattaatctaattgggaagcaaggtgcaactatcaaagcaatccaggagagcacgagtgcaacaatacgggtaatatcagtagatgaacatgaacgaccattctatgtaactgacgatgaaaggatagttgagatacaaggcgatacagagaaagttctaaaagcactgcaagcagtttcaaatcatcttcggaagtttttggttgatcatagtgtacttccattatttgaaaagactaatactacagtgagccaagatcgcaatggtgatggttggagcgatatgtcacgtccttcaattggttctgcacaagtgaatcaactaccttcagtgttagatgactatattcttcaagtgaagagggatcctctgtaccttgaacgagaatctttggtagatcataacattcatcgctcaggcgtatcactttatgggcgtgatccagccttgtcaacactacgaccctctgcagtacatggtgctggctcactacttacacagataacccaaaccatgcaaatcccacttacctatgctgaagacattataggagttaaaggagcaaatattgcgtacatacgagctaatagtggggctgttgttacaattcaggagagtttgggtagtcctgatgatattactgttgaaataaaggggacatcttcacaggtgcaagctgcacagcagctcatccaggactcgttggctgcacaccgagaacctgtcaggagcagttatgtgggggcaggattagattcagtatataggtccagctactcacaatatggcagctcaatctatccctcgtcatcactgccgtcttattctagcatcgatgatgttagtagatacccgtcttcaggccttggtggctatggttcgagttaccggtactaatagcagtttgtcctcgggcttgaatgcttgatggcaccagtgatcattgtatcccagtacccagacttcagggtctgctttgttttgacaaacaattaattggttttatagattttcgccactcatggattcagaaattgtacatgtttactggtgcttttttttcttagcgctacaatttaggagctgtttagttgtctttttcagaccaccaatgatttccggcgtggatgtggatgt

SEQ ID NO: 2368 - DNA, 2371 bp, Zea mays
  unsure (1)..(2371): unsure at all n locations
  Clone ID: ZEAMA-23APR03-CLUSTER308_3
gccggccggtcggggaccatcacattccggctgccgttccttcccttgcatctggctctccttgcagtcgcagcctcgtacaccgcttgtgcgagcttttactcctaccccaatctccctttgctacttttggggacctccagacctctcaaatcgagagaaccaaaaacgatagagaaagagagcctgtcagcccaagaaaaggttcctcccctccttccccacctcgccctcagccctcatcatcctctaacatccgattgtgccctgtgctctgcggttctcggatccaagatttcgccggccggccgccggcggcggctccgggagcgggagaaagactggatttttcgggccatggaggcgtggcctgatccgttcaggcccgggcggtggggtggctttctgagcaggtctgattcgtatcggttcaaatgatctcggcggcttgattggtcggttccgcttccgccgggggatcggagctagggcggtggtttcttggccggccggtggattcatcggctcgggtctggtgggatcttggtggttgctggttcagcacacgagccgcaggtctgcgtagatcccctcttcgcttccgtggcggatttgtactgctagggttttggttgggtctggtggaagatgattaagcagatccttggcaggctgccgaggaagccggggaaggctggggatagccgggaagctgctgctgcggggaatggaactgagccgtcgaattcctacagtgttgcgaggagcatggacccaggtaacaaaagggctggaaatggagattacccagttccatctggtgtgattccgaatccagtgatgaatggggctgtggtgtatcactccaatgaacccttaccagcattcaaggacgtgcccatgtcagagaagcagaatttgtttgtcaagaaggtgaacctatgttgcgctgtgtatgactttgtggatccaactaagaacctcaaggagaaggaggtgaagcgccagacacttatggagcttgttgattacgtcacttccgctaatggcaagttctctgaggttgtcatgctggagatcacaaagatggtgtcaattaatttgttccggagctccagccccacacctcgtgagaacaaggccattgaaggggtcgatctggaggaggatgagcctctcatggatcctgcatggtctcacctacagatcgtgtacgaggttttcttgagatttgtagcttcacaggagacagatgcaaagttggccaagagatatatagaccattcctttattcttaggctgctagacctttttgactctgaggaccccagggaaagggactatctaaagacgatacttcatcgaatatatggtaaattcatggtccatcgaccattcatcaggaaagcaattaacaacatattctacaggtttatattcgaaacagagaaacataatggtgttgcagagttgttggagatcctgggcagtattatcaatgggtttgcccttccacttaaggaagagcacaaattgttccttgttcgtgcactgatccctcttcacaagccgaaatgtgtatctatgtaccatcagcagctatcgtattgcatcacacagtttgttgagaaggattgcaaacttgctgacacagttattaggggtttacttaaatattggcctgtgacgaacagttcaaaggaggtgatgttcttgggtgagttagaggaggttttagaggcaacacagcttgcagagttccaaagatgcatggttccactcttccgtcagattagccgtagcatgaacagctctcatttccaggtggcagagcgggctctgtttctctggaacaatgaccatattgaaaccctaattaagcaaaactacaaggtgctattacctatcatntatccagcnctcgananaaactccanagatccctggaaccaagctgttngtagcctgacgctgaangtccncaanattttntntgatcncgattntgcatttttcggggagngngttcanaggttcagtgacgaggagctcaagcaggaggaatttgattngaagcganaagccctatggatgcgcttggaggaaatggccnccttaaaacctngcgaaaacagtcccttaggngccccgaatggcaaacccagccaagctgctggntagaanagcccnccatatcagccgcanccgtgtaactntgactntgggttgtgattttagctttgggacttttttttggngttggtttgcctntggccctgttgtaggtgggtaggatgtgtttggttttgtcaggactgtatgttcaaagtgnacncanacagaggaatttnaganatttggcatgngtagt

SEQ ID NO: 2369 - DNA, 1799 bp, Zea mays
  Clone ID: ZEAMA-23APR03-CLUSTER3095_1
gcacgagaccaatacctagatcaccctaaccgcaaaacaatggcatcctcctcctccctggcctcccccggagccctagcccgctcccccgcgcccctccccgcgcccccgcccccgcgcactggttcccgcaggattccttcctccgtcgccggagtcccgtccccggaccgcggctcgccgcgacgtgcccggggattcaaccgggtaccccttgggcgttcgtctttctgcgggacctctgtcgttggctcctccactcagcccctggagggatgctcctgaaatgatcctggactttgattcttcttccgcggtgcagggcttgccccagcggcgtcgcgcccgggccccacctccgtccagatgcgcgcccctgctgctgcgcaggcggtgccgaagaagaccgtctgggcgtggaccgagagccggcacgtgatgacggcggccgaggagagggggtgggagcactttcctcttcggatccaaagacctcggcaaggactggtcatgtcagagctcacaacagtgcttcccttcattccacactaatcgaatctttgctgttccagcatctagatagatgtcgagatagcctggctggatccctggttcaaactgttgcaatttacaaatcccaaaagcaaactcagactctgctgacttcacgactcattggtgttctcatctgatttttcagcaaccgctcgcataaatcctctcttcattgacggtccaaagcttttcgatgaggagaatcagaaggttgctgtaacttctgacatagcttcgctcggtgaacttgacgttgtacaaccggacaatgccgtagccaacagcattgtcagagactttcgaggtggctgacaggttatagcggcagaaaatagagttgctgcattccaaggatctaaaggaaaggtattagctgtatcaacgaacacaactgaggcgcaagtttttccttgaggccttggagcaagggcttgatggagttgtacttaaagtagatgacatggatgatatcattaagctcaaggaacgaggcaaagagtcaattaccattgacaaaggctactgtaacaaaggtcgaggttgttggtatgggtgatcgcgtttgtgtggatctttgcagtatcatgcgacctggcgaaggccttctggttggatcctatgcgagaggaatgtttcttgtgcattctgaatgcttggagactaattacattgcaagcaggcctttcagagtcaatgcagggcctgtacatgcatatgtcaccgttcctggtggcaagacaagctacctctcagagttggggtcaggaaaggaagtcatcgtgatcaatcagagtgggctatggcgtactgcaattgtcggtcgtgtgaagatcgaatcaaggcctctgatccttgtagaagcgaaggataactctggagacgagacgtatagcatttttctacaaaacgcagaaacagttgcacttattacccctaacacaggatcaagtggaaggaccgctattcctgtgacttcgctgaaagtcggtgacgaagttctggtgaggaaacagggcgccgcccgtcacactgggatagagattcaggagtttattgttgagagatgaaaatggaaacgctgaatgcaccacttttacgtcgttttgaacaaaaaaaatgatgtatgattttgaacaaaaaaatgatgtatgattgcaacattcatctgttctgctattggtcaagattgtgagattcccattgcagcaaaaaaaaaaaaaaagggcggccgccaccgcggtgga

SEQ ID NO: 2370 - DNA, 1464 bp, Zea mays
  unsure (1)..(1464): unsure at all n locations
  Clone ID: ZEAMA-23APR03-CLUSTER31002_1
atcgaacaccaatggcattcttgcattgaaggaaccttccctccacctccaccgcccgagtgcggcaggcaaggcggcgttttgcctggtcctgcgccccacagcgagcggccggacggggttttggttgggcatggctgccccggcgatgctccaagtggtgatcctcgccgcgctcccccttctcctgttcctcaccgtgctgggcgtcgaggcacaggccaacgccgtcgtcctcacggagttcgccatcgccagccaggcctgcgccatcctcccacccactagtcccgagcaccaccaccaccatcacgacgacgaggacaatgacgaggacaacgacgaagatgaggacgaagacgaggacaatgatgaagacgaggacgaggacaatgacgacgatagcggcggtggcggcgaccgccggcgccacccccgcgaccaagccaagaagagcgacgtcgtcagtaaacccaccgtgtcgtccgcgagcaaacccgccgtatcctccatgatcaccgtcgaggcggtcaccgacgatgacgaccgcaacggcaccaccggtcactcctccgtggctgtggtgggaaacggaaaccacacccacggcggcggcagcgtacgacaccaccgctcccgcagccgcaggcgtcgtcgtcgccgacaccgccatggtcgtctgcgtgacggcgatgaggacaatgacgaggacgaagacgaggacgaggacaacgatgaagacgaggatgaggacgacgacgaagacgatgacgaggatgatgatgacgacgacgatgaagacgaccaccgcgcctatagggactgctgccggtggctgaaggaggtggagccggactgcgtgtgcgaggcgctgctccgcctgccacccttcctcgtcaagccgcagcacaagtacaccgtcaaggtgggcaactcctgcaagttcacctacaggtgcggcggcgtctgatgatgagctgaaggccgccgggcacgcacgcctgcatatggcgcgagagcgactagcttaattgtatacgtacgtgctgtgcccatacatgcgcatatatacggtaacggtatatagatactgactgctacatgattcgagagcgacgacgatcgaggattcgaggtcgtctggccttttcccaaagtattgccatccattacagttataaccatcaagagtatgtgtttctccagtgagcctagcaaaaaaaaaaggaaaccaattagagtttggcttatatatgtaaactgatcaccctatataggtagccaaaaatttgtaacagtaatattaattgtaataaatacgtgtcatgtatacactggcgaaaaaaaaaaaaaaaacgtgtttccatctagacacgggttggtttcaaatgctacgtacattgcccgtagagaatatatatagtgtgttatatatgtattagttaaagaaaaaaaaanaaaaaa

SEQ ID NO: 2371 - DNA, 1137 bp, Zea mays
  Clone ID: ZEAMA-23APR03-CLUSTER3108_10
aagccacaatgggtaagattccatccacccgcttctcgctttgcctgtactgacatagctgccccggtggttctccgatttgagcgacgctgccgcagtcgtttccggtatctcgcgtgactcgatgcacaagcgccgagccaccggtggaaagcagaaggcctggaggaagaagcgaaagtatgagcttggtcgccagccagccaacaccaagttgtcaagcaataagacagtgaggagggtccgtgttcgtggaggtaatgtgaaatggagggctcttcgccttgatactggtaactactcatggggaagtgaagctgttacccgcaagacccgtatcctcgacgtggtctacaatgcatcaaacaatgagcttgtgaggacacaaacccttgtgaagagtgccattgtgcaagttgatgctgccccattcaagcagtggtacctcactcactatggagttgacattggtaggaagaagaaaacccctgctgcaaagaaggataatgctgaggtattctttcttggaacacagcttctcactatttaccactgaatgttttagtaaggtattggcttcgtagttcatacatcattttttgtagctgacaaatataagctcgttagataactcttctttttaaccacgtgaatagcttgtttctgcactagcctattttagatttctatatggaaaaatgtagaagttgataatttttatcaatatattttgtttacttgaagtatttccagaaagcagatgtcaatagttcattacttttcattttctttactctagtagctcatatgtttcctctggtgattcatttattgtttgatataatatccatccagggacaagaggttgaggcagcagctgaggaaacgaaaaagagcaaccatgtcacgaggaagcttgagaagcgcaaggagggacgtacccttgacccacacattgaggagcaatttggcagtggacggttgctggcatgcatttcttcccgccctggacagtgtggccgagctgatgggtacgaaataatggacctccaccagactttcttagtatttttagagcagcatatctgtgtgtactacaaacttttgttgcttaaatcataatggtcgttttgattt

SEQ ID NO: 2372 - DNA, 1005 bp, Zea mays
  Clone ID: ZEAMA-23APR03-CLUSTER3108_11
atccacccgcttctcgttttgcctgtactgacatagctgccccggtggttctccgatttgagcgacgctgccgcagtcgtttccggtttgatcgacgttgccgcgatggttcttcggtttgggcgatgagatgctaatgggtgcctctgcggatggtttggatgtatccgtgcaggtatctcgcgtgactcgatgcacaagcgccgagccaccggtggaaagcagaaggcctggaggaagaagcgaaagtatgagcttggtcgccagccagccaacaccaagttgtcaagcaataagacggtgaggagggtccgtgttcggggaggtaatgtgaaatggagggctcttcgccttgatactggtaactactcatggggaagtgaagctgttacccgcaagacccgtatcctcgacgtggtctacaatgcatcaaacaatgagcttgtgaggacacaaacccttgtgaagartgccattgtgcaagttgatgctgccccattcaagcagtggtacctcactcactatggagttgacattggtaggaagaagaaaacccctgctgcaaagaaggataatgctgagggacaagaggttgaggcagcagctgaggaaacgaaaaagagcaaccatatcacgaggaagcttgagaagcgcaaggagggacgtacccttgacccacacattgaggagcaatttggcagtggacggttgccggcatgcatttcttcccgtcctggacagtgtggccgagctgatgggtacatccttgagggtaaagagcttgaattctacatgaagaagctacagaggaagaagggcaagagcgctgtagcttagagcattctcatggattgtcttgcaccgaaatgtgtgtcctgatgagtacacttttttggttagtcgtctcaagttcagagcgttatgccatattttcagacctgatttgtacactgttttctaaaagcgattgagctctagtctaaaaaaaaaaaaaaaaaagcggcc

SEQ ID NO: 2373 - DNA, 1107 bp, Zea mays
  Clone ID: ZEAMA-23APR03-CLUSTER3108_18
gcacgagctcgtgccgctcgtgccccaaccagaagagcggcggcgcgggcggacaaggagcaggcggaggaggagttgtgccaagccacaatgggtatctcgcgtgactcgatgcacaagcgccgagccaccggtggaaagcagaaggcctggaggaagaagcgaaagtatgagcttggtcgccagccagccaacaccaagttgtcaagcaataagacagtgaggagggtccgtgttcggggaggtaatgtgaaatggagggctcttcgccttgatactggtaactactcatggggaagtgaagctgttacccgcaagacccgtatcctcgacgtggtctacaatgcatcaaacaatgagcttgtgaggacacaaacccttgtgaagagtgccattgtgcaagttgatgctgccccattcaagcagtggtacctcactcactatggagttgacattggtaggaagaagaaaacccctgctgcaaagaaggataatgctgagggacaagaggttgaggcagcagctgaggaaacgaaaaagagcaaccatgtcacgaggaagcttgagaagcgcaaggagggacgtacccttgacccacacattgaggagcaatttggcagtggacggttgctggcatgcatttcttcccgccctggacagtgtggccgagctgatgggtacatccttgagggtaaagagcttgagttctacatgaagaagctacagaggaagaagggcaagagcgctgtagcttagagcattctcatggattgtcttgcaccgaaatgtgtgtcctgatgagtacacttttttttggttagtcgtctcaagttcagagcgttatgccatgttttcagacctgattagtacactgttttctaaaagcgattgagctctagtccaatgtattgataatatctgctgttgtcctattgcggtgatgatgatttgccctgttcgctagctgcaatagttcctatttgttgatgaatttgtttgaagcataaacgcagaacatgtcgtaaagaaaacctttctgtaatattagcttgtaagatcgtcatggcatcactgcatatatagttttccctttttaggtgtcaaaaa

SEQ ID NO: 2374 - DNA, 1691 bp, Zea mays
  Clone ID: ZEAMA-23APR03-CLUSTER31126_2
gcacgagaccattacctagaacatcctaatcgaaaaatcgccaccagtggccgcgtcctcttcatttccgccatccgtatcgtctccctagggtttggcactttggccgccgccatggcgtcggcgtcgcgtgcgctcctcctctcccgtgcgctccaggccggcgcgtctcgccgcgtccccgccctcctgcgcccggtcgctgcggccgcgagcctcctcccagcggtggcggggccggcaggggccgccctcggcgctagggtgcggtgcttcgcgacccagccggcgacgtcctcgctgcgggactcgtccccaaactggagcaatcgcccgcccaaggagacgatcctcctcgacggctgcgacttcgagcactggctcgtcatcatggagccgccgcctggtgacgcctccaaccccgacatcacacgcgacgagatcatcgatagctatatcaagactctcgcccaagtcgtcgggagtgaggaagaagctaggcaaaagatatactctgtatcgactcgtcattactttggctttggtgctcttgtatctgaggaactttcttacaaactgaaagaaattcccaaggtccgctgggttcttcctgattcatacttggatgtcaaaaacaaggactatggaggcgaacccttcataaatgggcaagctgttccttatgatcctaaatatcatgaagagtgggtgagaaacaatgcccgtgccaatgacagaaaccggcgcaatgataggcctcgcaactttgacaggtcaaggaactttgacaggagaagggagaacatgcaaaactaccagaacagagatgggcctcctgcccaaggtttcaatggccccccacctccacctggccagaaccagatgccatcccaccatagtcagggcaacatgtctccgcaaccaccacatgctggtggtggccaaccaaactatcagccccaaatgcaaaacccacagacgggctacaaccctggcggtgctcctcactaccagcaaggtgctgctcctggctaccaaggtggacctccggggtatcaaggtggttaccaagggaacccaggccctgcctaccaaggtggtaacactggttatcaaggtggcaacccaccacctccctaccaaggaagcaacccaccacctccttaccagggaggcagcccaccagggccaccacctccctaccgaggaggcagcccaccagggccaccacctccctaccgaggaggcaaccccaacgtaccgccatattcgggtggtggcaatcctggctaccctggtggcagccctggctaccagggtcaaggaggcaactccaacttccagtgaacatgaccacgagtactaagttggcacccctgtttcagagtagccttctgcaagagatggtgcgccgtagcctagcataaatcgaacccttgttgctatcggattttcatggattgtcgctgtttgcacttaatgttctatatatagtactcaaaactatgcttggtgtctgagtgatgtacgtggaattctgaaactatggatcagctcttgtgtgcacttgctgaaccagatacccagcagtaagcttttgtttgttcgttttgagtggttggttaaccacatacttgttacagtcgattctgataaacaaaaaaaaaaaaaaaaaacccatgtgatacttt

SEQ ID NO: 2375 - DNA, 848 bp, Zea mays
  unsure (1)..(848): unsure at all n locations
  Clone ID: ZEAMA-23APR03-CLUSTER31139_17
aaaaacgcaaaacacgagcgagcacaaaaaaaaaatcccaatatccgcaacggcaatgtctccgctgccccgcatcgtgctcctcgccgttcgccgccgccgccgccgcagcggttcacggcgtcngccacgttcgctcagcggcgcggcgaaacgnacctactccccaagttacggcctcccgnaaggggctcatcccggaactccgntcgcctcctacagcttcgacaaggccacgggcgcctttcgagaatccacctcgccggcacctgctacgtccacttcggctcccacctcgtctactacgagaggaccataaccggcaagctctccaagggcgccatctcggacctctccggcgtccaggccaagaagctcttcctctgggtctacgtcacggggatggtcgcgcaccccgaccagggcaccatcgagttccaggccggcttcgtctcggagtcgctatcagcctccatgtttgacgaggtgcgcacctgcggttccagcgctggcgcgcagctgcgcggcgcggctggggtcatcggagagcttgggctgctccccgttgcgcaggcatgaacctcgagtttgagaatccacgctaccagagaaccgcaagagcttccagtctgctgtcgttctagagtgcaggacgttcagctgtggggtgtgttcgagtatctggttgttgcttcccggtctcaatggacatggatgctctgtagaaatgtatatcccatacgctgttgctgaacctgcgtaggatgtaggcaggctggctctcttctctcttgttttcctggatcatcgtatattcatgtcataaaaaaaaaaaaaaaaaagcggcc

SEQ ID NO: 2376 - DNA, 1234 bp, Zea mays
  unsure (1)..(1234): unsure at all n locations
  Clone ID: ZEAMA-23APR03-CLUSTER31205_2
aaaaaaaaaaaagatcacggacgacacagacggccaccaaatctgcacctgccccagatgcagcagaggtagtcgccacggcgccacctgcccactgcactgcccccagagcctccaagctgcatatcggaagtgaagcgcctcgcagtcctcctctcggatctcgcggtggaagtcgccggtccactcgatcagcgagcgagtcggtgccgcgcggcggattccccgacccgagcaaaggaaccggacatgcggccgcggctggtgctcttcggcgactccataaccgagctgtccttcgcgtccggcggatggggggccgcgctcaccgaccgcttcgcccgccaggctgacgtggtgctgcgcgggctcagcggctacaacacgcggtgggcgctcaaggtgctgccgcgggccatggagggcgcggcgggcgcgggcgcgggcgcggacccggcggccgtgacagtcttcttcggcgccaacgacgcctctctgcccgaccaggtgcaggcgcaccagcacgtgccgctcaaggagtaccagagcaacctccgcgccatctgcgcctatttcaaggagcgatggccctccactgctgtcatactcatcactcccccaccgatttacgagccagcgagaatccgagacatgtatggagacgacgagccttcacgccaaccagaaaggagcaatgaggctgccggcgcttacgcacaggcatgcatagatgttgccacagaattgaaccatccagttatagacatctggaccaagatgcaggaatttccagactggcaaacatctgcattgagcgacgggctccacttcaccccggtaggaaacaagatcctgttcgaggaggtggtgaagacgctggagacgagcatcggtttcagccaggagcggctcccgtcggacctcccgctgttccacgagatcgaccccaaggaccccatgaaagccttcggagcttagcttgggccttggaggagacgcacggtcgttggatcagccacgtctgctgcatttgagttcgtcgtcagtatgcaggaggcctgctgaggccattacaggaacagtgagctttaataagcggtgttttcagtaccgtttggttgtcagcgcatcacgtgttgtttggcacactgtggttggataaatcataccatttcggtcccggaacactngtgttccatatatataccatatatgtatctaagattcatcatta

SEQ ID NO: 2377 - DNA, 1063 bp, Zea mays
  Clone ID: ZEAMA-23APR03-CLUSTER3122_2
cggcggttcgtgatccccaccagctacctggcgcaccccgtgttccggctgctgctggagaaggccgaggaggagttcgggttccggcaccaaggcgcgctcgccatcccctgcgagaccgaggccttcaagtacatcctccagtgcgtcgagtgccacgaccagggcctctccggcggcggcggcggcgatggtgcgtgcacacgcaggcggcgaaccacccgacgacgaccgtgctggagcaagaaccagcggtgcgtcgtgcgtaaatcctagactaggtggtgtggtgttgtgttgcacgctatttataattttttttatcgtattgttttttttggagaggagggattcctttgtgcgatgtggctggaactggaatccaacaaatacgttgttgttgtaatgtcaagaattctatgccccctggtgcggacactgcaagaagctggcgcccatcttggacgaggcagccaccactctccagagcgacgaggaagtcgtgattgctaagatggacgcgactgccaatgacgttcccagtgagtttgacgtccaaggctacccgaccttgtacttcgtgaccccgagcgggaaggtgacatcctacgacagcggcaggacggcggacgacatcgtcgacttcatcaagaagagcaaggagaccgccgcctccgccgccaccaccacccaggtgccaccggcatccgagaaggcagctgccgccgagcccgtcaaggacgagctgtgagcatccaaggtgtggacggctgtggctgcgtaagcatgggaggaaaacctggcgctaacgtgcctccaacgcctagtttttgcgggaccagagggagacagaggggcggagttagagagagaggggatctgcgacgtgttttgctctgcggcggcatgtctgtgtatcccattgaggttatgtacacaattacaccgcggtcggtgggtgtctttttagttaattatcacaagtgacagtagaaaggaacagattgtgacgaggttaatggattaataaatcgcgagtccgccccgcctcgttggatgcgtg

SEQ ID NO: 2378 - DNA, 561 bp, Zea mays
  unsure (1)..(561): unsure at all n locations
  Clone ID: ZEAMA-23APR03-CLUSTER312566_1
cgagaccattccctanaacatcctaancgaaaacttttttcgtctgggctgccaacatgccatccagactgaggaagacccggaaacttaggggccacgtgagccacggccacggccgcataggcaagcaccggaagcaccccggcggccgcggtaatgctggtggtctgcatcaccaccggatcaacttcgacaaataccacccaggctactttgggaaagttggtatgaagcattaccacttaaagaggaaccagagcttctgcccaactgtcaaccttgacaaattgtggactttggtcagtgaacagacacgggtgaatgctgctaaaaacaagacgggggctgctcccatcattgatgtggtgcgatcgggctactacaaagttctgggaaagggaaagctcccaaagcagcctgtcatcgtgaaggccaaattcttcagcagaagagctgaggagaagattaagagtgttgggggggcctgtgtcctggtggcttgaagccacatggagggagtttcattaaatgctaactactttttcaaaaaaaaaaaaaaaa

SEQ ID NO: 2379 - DNA, 1376 bp, Zea mays
  Clone ID: ZEAMA-23APR03-CLUSTER31292_3
acccatgttcctgttcccacactcgactgtcatcctgtgatatccgctcgccagtcgccactccgtttcggcattccgcctcctcccgacacacctctttaactcgcttccgtttccaaaaaaatgctccagttaatttaatccagacgaggaatcgcctcgccgcggatctctccgctcgccgacaagacccgctatcggctccggcgggaagactcgcactacggtggggcgcgtcgccgccgctcggcacgtggctcgtcggttcgacgttcgcttgtggaggtcgtcggggccagcggtgccggggcaatgcggtcagtttgtggagccgtctgaggcgcttggctgggatctgagggtgtcaggtagggggcgcgagcgagctctgtcggtggggagttggtggtggttgtagcgtagggcgcgtcgcgtgtttggctgccgggatggagcacgtagttgggggcaagttcaagcttgggaagaagatcgggagcggatcatttggggagctctacctcggcgtgaacatgcagagtgacgaggaggtggctgtcaaactggtattccacgaacatcttccacgtgatttttgtgtccactatccatgtcttggtgaacagttctgtgttagaccttctccaaccgcaccccccaaacctcccctcacccttgctattgctaccgacctactgtgtactatggggggaagtatcttttaggatgatgtagtaaaatataatagaaaatacagatatgaggaaaaaatatgggggaaatggttggagatggtcttaggagttaactttagtcggagtcactgaaatctatagttagcctaattgcttgcaggagctaatgagcctgtagcactctgaagtgagggtatcaatgctgaaaagcacccactggaaactcatctcttgtttgttctgattggattattctctttcttcatttccttacagagcaaagcagaagagatgatctggaatctcttggttatgtgctgatgtatttcttaagaggaaggtatgatattatttctcttcactagaattttctataaccttgtgcatcataacatttttcttcatcttggaatcccccagtcttccttggcaaggcctgaaagcttcttaattcccttgagatggtaattgttcatggacaggagaaccaactgcatatctgcccactgcccagtgcacactaattttccgcgacgaatttccggtgacacagaggccggagtggcggtctggcggagccgacctacgtggtcgcgcgcttggacggccccgcacggcctttgccgccgccgccgccgccatgatcaccgggaagcaaactggcgctgccgcgaacaccaa

SEQ ID NO: 2380 - DNA, 2801 bp, Zea mays
  Clone ID: ZEAMA-23APR03-CLUSTER31319_1
gcacgagaccattacctagaacatcctaatcgaaaagcgttcggatcagcctctctgtcatgtcgccaatacagcgcagcgctccgcatccacccaaatcggagtagggtcgtcagtacagcgcgacgccctgccagtagccgccgcaaccggccgccggtcccgcgcgaggggaggaggagatcactgcggcggcgtcttctgccggtttgaggattcggggcatcactgcagcagctggcgccaggctccagcatggacacggcgtttctgagtcctccgcttgcccgtaatctggtttatgacgagtttgccgttcttcaccccactagctacccttttcatactcttcggtatttgagatgcaatccaatgtattcgagaccgctgctaacaatagcaccagcctcaccatcaaggggcttgattcagagagtggccgcactacctgatgttgatgatttcttctgggagaaggatcctactccaatacttgacacaattgatgcacccattcatttgaaaaatctatctagtaaggagctcaagcagttagccgatgaagttcgttcagaaatagctttcataatgtccagaaaatgccaaccgtgtggtgctgatcgctcagttgtggagctgacaattgctatacattatgtgttcaatgccccaatggataagatactatgggatgctggtcaacatgcatatgcgcacaagattctcacaggaaggcgctctctcttccatactattacacagaaaaatggcctttctgggttcacgtcgcgttttgagagcgagtatgatccctttggtgctggacatggatgcaatagtctatccgctggccttgggatggcggttgcaagggatataaatgggagaaaaaatcgaatagtgacagttataagtaattggacaaccatggctggccaggtgtacgaggcaatgggtcatgctggcttcctcgattccaacatggtggttattctaaatgatagctgtcataccttgcttcctaaagcagatggcggggcaaagatgtcagtcaatgccttttctagtgctctaagcaagattcaatccagcaaaggatttaggaggtttagagaggctgctaagggacttgccaaatggtttggcaaaggaatgcacgaatttgctgccaaagttgatgagtatgctcgtggtatgataggtcctcatggtgcaactctttttgaagaacttggattatattatattggtcctattgatggacgtaacattgatgatctcatctgtgtacttaaggaagttgcgagcttagattcaactggcccagtacttgtacatgtaattactgggactgaaaatgacactggtggaattattggaagtgcaataaatgcagttgaggaagggccttcaaactcaagccctgatcttctaaagtttttaggaactggactttctaggacatataatgactgctttgtagaagcactaacagcagaagcagagaatgacaagcgcattgtggtagttcatggcggcatgggaatcgatcgatcactccgcttattccagtccaggttcccagacagattttttgacttgggcatcgctgagcaacatgctgttaccttttctgctggtttggcatgcggaggtctaaagcctttctgcataattccatccacatttcttcagcgagcatatgatcagataattgaagatgtggacatgcaaaagataccagttcgatttgctatcacaaatgctggtctggtaggatctgagggtccaactaattcaggaccatttgatattacattcatgtcatgcttgccaaacatgattgtcatgtcaccatctaatgaggatgaacttattgacatggtggctcactagtccccgcccccccccagacctcttcgcttccgctatcctaggggtgccattgttgggactagtggaagtgtaacatatgggaatccatttgagattggtaaaggagagattcttgtcgagggaaaagagatagcttttcttggctatggcgaggtggtccagagatgcttgattgctcgatctcttttatccaactttggcattcaggcgacagttgcaaatgcgaggttttgcaagccgcttgacatcgacctaatcagaacgctgtgccagcagcatagttttcttatcacagtggaagaaggaacggttggtggctttggatcacatgtctcacagtttatttctctcgatggtctacttgacggtcgaacaaagtggcgacccattgtgctgccagacaggtacattgagcatgcatcgctcgcagagcaacttgacctggctggcctaactgctcatcacatagctgcaactgcattgaccctcctagggcgtcatcgtgatgcccttctgttgatgaagtaggggaaggaaccaccaagaagaatggaattggatagataaaaggcaatatgtgcaaaagttgattcggaggacgctcatcatgctgttttacgattgtgttgtctggatagaactgaagcgtgccgtgggaggtggccaaatgcacaaatcccaaagagggacgacaaagcctatagcaccatagattaatagtcacggtgtatatactaaaaagaatttacagagcaccgatgtaacgttgttactgtgcatgttaatactgaaattgtggtacgacgccaactaggagaatgagctggagctgacatgtttcagttaatgtaataaagctacttagttttgtatgtaccaattcattccttaaaattggaattcat

SEQ ID NO: 2381 - DNA, 1259 bp, Zea mays
  Clone ID: ZEAMA-23APR03-CLUSTER3131_2
aactatgttatccaataccgttggcggtgggccgcagaaccgcgcgcacgggggagccaatggcgatcgtggccgttctcgtcgcgcccaccgccagctacgtcgggccgcgccgccggtggcgcgccgcggcagcctcgtcttcggcggcgtccggggtggacctcaaagcgctgcaggccgccatcgataagaaaagcagcgatgatgttaggcaggcgctggaccagctgagagagagcggatgggccaagcggtggggctcgcagccctatgtgtcgcgccggacgacatctctacgggagctcactacccttggaatcaagaatgctgagaatttagcaattccaagtgttagaaatgatgcggcattcttgtttacagttgtgggtaccactggattcttagccgtccttgcaggccagctccctggggattggggcttctttgtcccctacttgattggaagcatttcattgatcgtattggctgtcggaagcgtcgctccaggtcttctgcaagcagcaatcggagcgttctctacagtctttcctgactaccaggagaggattgctaggcatgaagctgctcatttcctagtcgcctatttgattggcctccctatccttggatattctttggacatcggaaaggagcatgttaatttgatagatgagcaattacaaaagctaatatacagtgggcagcttgatggaaaggaactagacaggttagctgtagtttcaatggcaggactggctgctgaaggtctagaatatgacaaagttgtaggtcaatcagcagaccttttcacccttcagaggttcatgaacagaactaagccgcaactaagcaaagatcagcaacaaaaccttaccagatgggcagtcctgtttgctgcatcacttctgaagaacaacaaagcagcccatgaggcgcttatgtcagcgatgtcccaaaaggcaagcgtgttggggtgcattgaagcaattgagaatgcgtcctgatcaaaatgtaacctgagtagtgtactagcattgctggacccgatattgtttcaccgcttctgactactactgttgttggttcgttgagcctgaggaatcaggtggaggagaggatcgaggcgtaggaaggagaaaccctaatcatcaccgtcgattcctgtacttcttctgtagacatcagaaactcaggccacagggaggaaattcacacaatgacaaaaacaatagcctaatctgctgccatttactatc

SEQ ID NO: 2382 - DNA, 1399 bp, Zea mays
  Clone ID: ZEAMA-23APR03-CLUSTER3136_2
gctcggcgctcgctcgctcgttcgcgcttcgctcccttccttccgtttcgctcgctgccgcggacacgccgcacacggtcgaggagacgacagctgccgcgcggcactgggctcgggggagctggaccgccgggcgaggacaagagacggtatcgatggcctacgcgcgcaccgtgatggcggcggccgcctctgcgctgctgatggccgtgggcgtgcggttcctgggccccgcggcggcggcgttcgtggaggaagagctgccgcgcgcccgcgcggtggccgccacctggctcacgccgccgtacctgtacctcgtcatcaacgccatcatcatctccatcgccgcgtcgtcccgcttccagtcgagcggcggcgccggcggacgtccgtcagccccgtcgtatgcgcccgccgcggaccccgacgccgacgccatcggaggagaaggagcgggcgaggagatagcagcagcaggatgggatccagccggcggttgcgtcgttgcaggtgcctgcggcggtgcccgtggtggcagcgaaggccgcggaggttgctgctgtcgtcgaggagccagtggtggtggagatccacactgtagcggtggcgccggagggcgaggtggacgaggactattcggtttcgaggtcgacatggacgccgcgtcggaggggcgcggagccggaggtggcggcggaggtgccgccgttcgcggacctgaccaactccaggaagaagccgctcgtgtcggcgaggttcagcaggaaggcgaccaaaccaagccccgaaggtagcagggctctgcgggtggcgcggccgcggaaggaggagacgctggagagcacgtggaaggccatcacggagggccgggggccgacgctagctcggcacctcaagaagtccgacacctgggacaccccgtccccgggcgccgcccgtccggcggcggcagcagcggggaggtcgatccagcggccgtggcaccggcggggacgatgcggaaggccgagactttcaacgacggtggcgccggaaggagcaggcctgctcccgctgcgctggtgcggcgggagccgtcgctggggcaggacgagctgaaccgccgcgtggaggcgttcatccacaagttcaacatggagatgcggctgcagcggcaggagtcgctcaagcactacaacgacatgattggcaggggcaggggcagccgttagtgggaagtcttgctgcaaatagctgcggctcgcaagaaggattctgcttttttgttccgtgatatttctcgattttggttcttggtctctgtaagatatggttttgtgtaaatggttttatcaagtaacgaggacaagttcgatcgtactaaaaaaaaaaaaaaaaaggcggccgctcgcgatctagt

SEQ ID NO: 2383 - DNA, 1415 bp, Zea mays
  Clone ID: ZEAMA-23APR03-CLUSTER31482_1
acccgattcaaacggtttcaaaagcgcgaccccaccgcagcccgcagggtccacggctctcgtttccgcccgcgccacccgccatgtcgtccccgccgcgggggcagcccgccaccgccgccgtgccggcggtcgcggccgccacgtccccgcagttgcctgcggcttccagcaccctcccccgcgcgtttctcgcgacagcctctccccgtgccacagtggcagcaccggtgcccccgctattcaccggtcggccgctgaaccctaacccaccggcccacggctcctccgtgccccacggcatcctctaccccgtcctgaaatccgcctccacgtccaactccgcggccgcggccgtgacagcgcagctccgccgcgttcctcccatggccgtggggtaccctcggacccacgccgtcgccatccctattgcacagcagcagcagcccctggtgcacgcgcaaccccggtccttcgcggccgtgcctcgggcccttgtgactggcgtgtcgacggggtccgaacagcctccccgaggagttcctataggctcgcagcccaaggttaatccagtaccacctgttggcccatccaatgagcagagtaacccaaaagacagggaaaagagcagagaagaacctacagttgtggtgattaatgaccgcaaagttaacctgctggatagtgagtcgggatccttttatgctctctgtcgatcttgggttcgtaatggtgttccacatgaaagtcagccaagctttggaaatggtgaaccacttcttccaagacctttgcctgcttcagttgtagattctagaatatcagacaaggacgataatgatgttgcaggtgaagattcagatgaagagccacagaagaatgccaacggtgaatacaatacaagtgatttattgaagcagcatgtaaagcgtgcgaaaaggatacgtgctgggttgcaaaaggatcggcttcgtcggattgaaagatacaagcaacgccttgcacttcttttgtagaatcggcctgtgactgtataaagctgaaaccataggtgtttgtcttgcaggttttaacttccgtattggaatttgttaagatgttttattgactagcattgtatgttaggaccatctggatgttttattgccaacgttatctaataaaatgtgaaaaagcctttagctaagttggttggatgatctgagtagcactattaaagttttgagtatggtgccactgtgcatgggtgagacaaaggttcgaagttcgaaggttttctcgagctgcatgagaagatcttaaatgtaatgtaggtcttcttaaaggtaatgccgttgaggtggtcttaccatatatgtggattttttttatctagtgaaatgaaactgaaatcatagtcaaaaaaaaaaaaaaaa

SEQ ID NO: 2384 - DNA, 2217 bp, Zea mays
  Clone ID: ZEAMA-23APR03-CLUSTER31513_2
ctctttcgatagctggcgaaggcgcggcgcgcagggccagtagcaaccctcccatggcctacgctgcgcctcccatggcgtcgtccctcaccgcctcccacccccctctttccccgtcccacctcataacccatccgcatcgctgccctgcgcgccccaaccccaccaccggcctcctccgcctcaccccgtctcgccgccgcggtcgtccccccgtggccgtccgcctcgcaatatctgcctcgtccacctcagccccgcccccgtcggcggatcggtcggaggccgcgtcgtcgctggagagatacctctcggcgacggtgacgggagcggtgatgggaacgggggcggccccaccagcttcggccccgccgcgcgccccgccggcgatgaaggggggacggaagcagtatagcgcgttgggggctgtcacgctcgagaaggccaagctcgatctctcccagcgccgcaagaatatcatgcccgagttggcgacaggtggtggtggtggagatattggaaaaaggatcggtcatggtgggggtgatggtggtgatgatgatggtgacgatgatgactactttgatgattttgatgagggagaggaagaaggtgggcttttcaggaggcgaattgttgtacaagagctattcaatagggagttcgtagaagctgtgttgcaagaatggtacaagacgatgagtgatttgcctaccggtcttcgccaagcttgtgagatgggtttggtgagttctgcacagatggtacgttacttgtcaatatttgcaagacctacaaacgctaggtccttctcaagagctcttccaggctggctttccagaggtcttgttggaaggacacttgcagatccatcattcccacataaaatgtctttggagtttatagctaccattgcgtcatctatttggtgtgaaatgaatattcgcaaagagaggtttaaacaagaatgggatttggtgattgttaatgctttgactgcagcttgttgcaacttgatggttcttggacttttagcaccatgccgttcatatgcgagtacatctcgatttgacttccaaaatgcaattgagaaacttccgaacaacatatttgagaagagctatcctttgagagagtttgatctagcaaaacgaatcagtgcattcttttataaagctgctgagcttagtctggtcgggtttgtagctggctctgtgcaagggggtatgtcaatagtcttgtccgcaagaaaagaaaggaggttatcggtgactattccctctatcagcaccaatgctcttggttatggagctttcctaggactctatgctaacttgcgttatcaattgctatgtggagtagaccaatatatggtcaagcgcttcgatgttttgggtgtggcaatcttcttcagcacagcagcaagactgatgaatattcagattggtgaggcatcaaggaggacttggcttggcgaggaagctgatccacagtactcagatcgactgttgagagcatacaagagacctgtggaggttgacgcggaccaatcaaggtggtttatatccaaggatgcaattgtatctggccttggtcttctaggtatcaagcagggtggacctgaggcaacattttctaagtctcgtcgaaagagagtcatccgcaaaaaggtcacttcaggttgagtttagtggatttggatagcaatgctggaacaattttgcttctgttccactatgccagagggaggtctacccaaattatggtaaatgagaaaaaggtatcaagtcaaccagcacgtggtctgtcggcgaagggatcaaagggtttgttactgggaagggttagttaaaaggtgccaattactattttataatttaattgcagttatttaaggtaagaaaatatgttgttttcttgtattgctgtgaggcaaatagacacgcttagtggtagttttgtaagattgttaatgtactgactttacatgagaaatggattctgcatttttatatagatcaagtagctgccacatgcttgtatctatcttttgaggtcaattaggtcagggtcctgctttgttgctggttaggactacgcttttataaaaacttattttaagtacgaaggccgatctctgtggaagtttcatcgtgctatttccaagactactacattttctaaagaggaatgaacctcaatggaatgttttatttc

SEQ ID NO: 2385 - DNA, 607 bp, Zea mays
  unsure (1)..(607): unsure at all n locations
  Clone ID: ZEAMA-23APR03-CLUSTER31621_4
tcgcttggcggcataccatcccaaatgctaagcaagcgctctgccattcattgtccttgctcttgctcttgtgtgtaacagatccagcagactcctttcacccctcccagttcccactaacattgtgtttaaacatgcaccaccacaattactcctcacataatcatcttcattcactcactctcttcgatcactgtactgaagataccatggccaagtcgaccgcgatgtttgtagccgccctggccctggtggtggtgatggcgacgacgagcacaggcggtggcagggcggcagcggcgtgcgatcccaagccgctggtggtgtgcgatccggcgttcatggacggagcgaaacccgcggcagcatgctgctccaccctgcgtgcgcaggaggcatgcttgtgcgtgtacgccaaagaccccaagtttgcaaaatacatcaacaaccccaacaccgccnaaacctttacctcatgcggcatagccatccccaaatgctaagcaagcgctctgcgtcgtcgcttcgcttgctcttgctcttgtgtgtaacatatccagcttatgaataaattatgtggatcagttaattaaaaaaaaaaaaaaaa

SEQ ID NO: 2386 - DNA, 1342 bp, Zea mays
  unsure (1)..(1342): unsure at all n locations
  Clone ID: ZEAMA-23APR03-CLUSTER3166_22
accaaacggacattcagtcgaaatagaaacggaaataaaaaatcgtcagtgtgatcctgtgagggttcatcttcttctccaagcagatttctgttggttagctactcacgtcaactcaaaatctcgcgttcacctccttcatctctccgcctcccgcttacctctttggctctagtctatccccctctcgtttcttcctgtgagcgacagctggtggagctgcgccgttctcaccttcgccggcgacgggcattcacaagtagtgatctcttgactaacggcgtagtggtgactaaagagccttgacaatgagcagcataggcacaggttatgatctgtctgtcaccaccttctctcctgatggccgcgtctttcaggtcgagtatgccacaaaagctgtcgacaacagcgggactgttgttgggatcaagtgcaaagatggcattgttctgggtgtcgagaagctggtaacctcaaagatgatgctggaggggtcaaatcggaggatccattcagtgcaccggctttcgggcttggttgttgctggtttggcagcagatggcagacaaattgtttcaagggccaaatcagaagctgccagttatgaaaaggtctatggagaacccattcctgtgaaggatttggcagatcgtgtagcaagttatgttcatctttgcacgctgtactggtggctcagaccttttggttgcggtgttattcttggaggttatgatagggatgggccacagctttacatgatagagccctcaggagtttcctataaatactttggtgctgcattggggaagggaaggcaggccgcaaagactgagatagaaaagttgaaactttcggagcttacctgccgagaaggcattgttgaagttgcaaagataatttatggagtgcatgacgaatccaaggacaaagcttttgagttggagttgagctggatctgtgatgaatcgaaccgccagcatcagaaggttccgaatgaattgttggagcaggccaaagctgctgctcaggcagctcttgaggagatggatgctgactaagaaacatgacaaatatgcccatgcttcatgtttttgtgctgttgatatctttgatccctttggggtgacaccgtgacagactggacattgccaatttgttggattttatttggatgtcatgtaaaactccattcatggaagtttgaatctggattgactgatataagagctgtggtgttttttacattctggtttagtcacgggctcacggcgctcgcgttctttaggaacttgcccttagacgatgcctgttttcatccatcaacaagtctcttcncacatgc

SEQ ID NO: 2387 - DNA, 1691 bp, Zea mays
  unsure (1)..(1691): unsure at all n locations
  Clone ID: ZEAMA-23APR03-CLUSTER3167_3
cagcgtaatggcagaagatcttcctctcaattaagaaaaaagaaattgatccagttttaagggaaatcggactcaaaacctacacagggcgcacaaacaacctagacaacaacaaccgcacacacaatacacatcctgagtcatcgttgccgagctcaacacaagtgacgagcagctccgactccccaagacaggcaacacaaggctaaatgaaatacgacgacgactacaaacatcggcacaggaggaggaagaatgcggcgcgccgtcgttgctaagccacgagacaccccactcgagacagctccaattctttaccagcgagacttccaaaaccttgatcctctgtcctgtccccgccagcagtagcgacgccttcaggaagggagtgatgtcggggacaccaccgtcgccggtccgaaatggacggggctttcgcccatgaaagacagtgctgggaagcacgacgccctcaacaggggaagcggcgcccaggggcgtcaccgtcgccaaggctttcgcccaagaaaaccccagcacaatgccaagcgagggccccgggacaaaagcaagctacctctgctgccgccgccctgacgcacaaaccccgcagccgccgctggggccactgctgcccacttgttgttgccacacaccaccaccggggagccagatccgacgaccggcctcgccgtacccacgagaaggccacagcacacctcacctcctccgctcctcactgccgcaccaccatggggagctcgcccgccggcgctccacaaccggcattggcctcagggatggcaaatccggccaccggacctccggatctgactgccgccccaaggccaacctgctgcggccatcggccgccccgacctgggccaccggcagcggccaactccatgtcgcaccacgccccacgaatagaggcagctccaacgctggcgtggcccacatcccacggagcacgcgcgccaccggatctggttccaagcgcggcggccaagccaagcaggggacgcgggggcgaggtcccgcggccatggccccgctgccgccatcctcgcatctgcacggactcccggctgtctgctctggcgacggcgaggctggaggaaggaggaagcggcgggtgttgtggtggtggcggagtcgccgcccgtgtcacccgcggagttgcagcattctccctttgagcacttcgggctgtgactagagctatactatttatacgtggggtgccctctgcagaaagagaaggaaaaaactggtggagcaaggaaacctcagaattcgaaagacaacaagtgaaattttcagaaaagctcatggatggaagtcggttgatagacgcattcaatgaagtttgtatgttagtatgtccttttggtttaaccgtgctgggagctgtattcatgtgggtgctctgttcgtaaacttgtttaagttcttagtttgcgatgtcatgctcttgtcactttcggtgtggctctttgttctctgcttttgggcaattatgttagatggtctgaaactcctcggtggaaggctttccccgtgttatgttttctttagctgatagttgcgtgcgttttgtcggcttttccgtnttctggtgggcttaacggtcatgtttgaactatttttctgtctttttcgtaatgaaataggggggtgccccctttgta

SEQ ID NO: 2388 - DNA, 2803 bp, Zea mays
  Clone ID: ZEAMA-23APR03-CLUSTER31899_1
taaggatgcactctaatgagatggaggatattcaagaagcatatgctggccgagctgctgctctctgggtgttgttctctagggttttctgtagccgacctaggccacgcaaagtgcaaaacccagagccatcgctgccgcctcggtcgcgattcctaaaggcggcgatggccatgacgcggcgttctgcttcccatctcctatccgccttccggcccttctccctcctcctccagccgcacctcgtcgactcttcgccggcggccgcgtcggcgaggcgggcgatgtcgtcggcgtcggccctgcgtgcacgggacgagaaggatgtggcgcggtggcgggagtcgatgggccggatgcggaatatcggtatctccgcgcacatcgactccgggaagacgacgctcacagagcgagtcctctactacacgggtcggatccacgagattcacgaggtgcgcggccgtgacggcgtcggtgctaagatggactccatggacctagagcgcgaaaaggggatcaccattcagtctgctgccacctactgcacctggaaggattaccagattaatattattgatactccaggtcacgtggatttcaccattgaggttgaaagggcactccgtgttcttgatggagctatacttgtactatgtagtgttggtggagtacaaagtcagtcgataactgttgatcggcaaatgagaagatatgaaatcccaagggttgcttttattaacaagttggaccgtatgggagctgatccatggaaggttcttaaccaggcgcgatccaagctccgtcaccacaatgcagctgtacaagtacccataggattagaagaggagtttgagggccttgttgaccttgtagaaatgaaggcttataagttcgagggatctagtggccagaatgtaactgcttctgatgttccattgaatatggaggatttagtcactgagaagcgtcgtgaacttattgaagttgtttctgaagtagatgaccagcttgctgaagcttttctcaatgatgagccaataacagctaatcagcttaaggcggctattcgaagagctacagtggcacggaagttcataccagtatacatgggaagtgcattcaaaaataagggtgttcaaccacttcttgatggcgtgctggattatctaccgtgcccgttggaggtttataactacgcccttgatcaaaacaaatctgaagagaaggtattattagctggaactccagctgaaccacttgtggcattagcatttaagctagaggaaggtcgttttggtcagctgacctatctaagaatctatgacggcgttatacggaagggtgacttcatatacaatgtcaatacagggaagaaaatcaaagttcctcgcttggtaaggatgcactctaatgagatggaggatattcaagaagcatatgctggccaaattgttgctgtttttggtgttgattgtgcatcaggcgatacatttacggatggaacagtgaaatatactatgacttcaatgaatgtccctgaacctgtgatgtccttggcagtttcacctatatctaaagactctggaggacagttttcaaaagctctgaatcgcttccaaaaggaggatcctactttccgtgtgggtttggatgctgagagtggccagacaattatttccgggatgggtgagctgcatctggatatatacgttgaacgtattaagagagagtacaaggtggatgcaaaggtaggaaaacctcgtgttaacttcagggaaacaattacccagcgtgctgaatttgattatttgcacaaaaagcaatctggcggtcaaggtcagtatggacgagtttgtgggtacattgagcctctaccttcaggttctgatggtaaattcgaatttgataacatgattattggacaagcaattccttcaaactttataccagcaatagagaagggttttaaggaagcttgcaattcaggctcgttgattggtcatcctgttgaaaatttaagaattgtattgactgatggggcttcacatcaggtggattccagtgaacttgcttttaagctagctgctatctatgcttttcgacagtgctacacttctgccaaacctgtaatattagaacctgtgatgaaggtggaactcaaatttccaactgagtttcagggcacagtaactggtgatatgaacaagagaaaagggatcattgttggaaatgagcaggaaggtgacgacaccattgtagtttgccatgttccgctaaacaatatgtttggatatgcaacagctattcgatcagcgactcaggggaaaggtgaatttacgatggagtacctggagcataatgttgtatcgcaggatgtgcagatgcaactagtgacctcataccaggcggccaagggcacagagtgattcttctttttacagaagaacaaattttgtttgcgaacttttagtggcatcgacttcccggtcctctggacacgtcacaaatagtaggcgataattcaaactgtggtttcttagtgaaaatacaactgtgccgcaataattagcattcccacagtagaattgtacaaaacattatctagcaaatgcctgaagtttagtttgtaatgtcttggtaatgagaacatcttgtgcaatttctcctcaaaaagaaacatctaatgctacactgtgaaggcatggatgttttggttactggtaaaaaaaaaaaaaaaagcggcctttatttctccttttcgtttttgggtttctgttcaaactgtttgtttttttatatt

SEQ ID NO: 2389 - DNA, 1367 bp, Zea mays
  unsure (1)..(1367): unsure at all n locations
  Clone ID: ZEAMA-23APR03-CLUSTER31936_3
gcacgagaccattacctagaacatcctaatcgaaaaacaactcgacaccgagaaaagcgcagcaaagcaacgcaaagcccacgccgctacagtgctacagcgagcgagcctcttgcctgccgctacgagccaacgactcgaacgcatacactccaatggcagcgacggtgatggcctccatgagccccctcgcctccgccacccccggcgcgcgtcgcgctttccctgtacggctgctgctccaggcatctgcgctcgcgccgcgccggcgcgccttggccgtgaccgtgagggcccagagcgacgacgccgaggccgagccaaaggaggcggcggcggcggccaccaccccggcgccaaagtccaaggcgggcggcggcggcgagccccgggctgtgggacgcgctggcgttcagcggcccggctcccgagcgcatcaacggccggctcgccatggtgggcttcgtgtcggcgctcgccgtcgaggcgtcccgcggcgggggcctcctctcgcaggccggcagcgggtccgggctcgcctggttcgcggccacggctgccgtgctgtccgtggcctcgctggtgccgctgctcaggggcgacagcgccgaggccaggagcggcgccgtcatgagcgccaacgccgagctctggaacggccgcttcgccatgctcggcctcgtcgcgctcgccttcactgagtacctcaccggcgcaccgttcatcaacgcgtagaggcggttcagtccaagccagtgcttatatattttggaagttggaactgtgtatgctagtcagctatagcggcaccatgcccgtagtaggagcctagctacagttggacgagctactttttattgggatttactagtcttgggccatttacttctcttcttattaaagtccactcataaatcagaaatccaattttatctgacgggaataagggcggaagacactagtcaaagttgtttaggctatccacactcgtacaaccctaaatttttactctaaaaataatattctatcctgatcagcgagattctttactctataccacaattctccgcactcatatttactctatatctaaccctatccctgggaacacactacacgtcctccacgtggtccaaccaggcgggcgcggcatcggntgccgtcctcgtgcacanggatagagcagcaccgtacgagcggtaagantggcgtacgccgcggtgcatgcatttccangcgtttcaattccgtgnaggtatgccttggntaaatttgggggcttccatganggtggggnnttacattaaatcngttaaggtttaaatgattaatggattnttaaaaaaaaagggggctaaggcaagttg

SEQ ID NO: 2390 - DNA, 801 bp, Zea mays
  Clone ID: ZEAMA-23APR03-CLUSTER3193_8
gtatttgtatttaggttctgttgtgcagtttgtgatttcgaacactggattggcatttgttcccgttagaaattataattaccactttgataggacaattctttggccgttaactactctactagtatgccatttatgtgatgcagaatgatactcataaagtcatgaggagttattttcagtattaccaatcaaataacaccaattttatattacaaagatcatgcattggtaaagaaattgttggacaaaaggcttgtatagtttgtgtaaagtatgattgaattttgatagcaaccccatgcttgtccaattcgtggtttgtagaactgtaagttgctcgtagtgcatcctttttacgcacagggtgcacatcttggcttatgttggttctttatgttcctcctccagcacaagtattctgcgtttccatgatatgatactctgtctctgtaggcattccatttgctgccggcagctgggtccttcttcgtgcagaatgacatgttccgcctgaactatggctaaaagacagccgaaaactcttgtgatgaacgaatttgttaagggcttcatgttgagacgatgaataccgactgtcgccgctactctcatctcctttgtatctcctctgttggctgattaactgttattacaagaaattgctggacttgttttttccagttgttttgaatcatgtattatggttgcatgggcaccatttcttcgtgggatgtgaattgaaacagtccaaaaaaaaaaaaaaaaagaaaaaaaaaaaaaaaaaaaaaacccgcggcc

SEQ ID NO: 2391 - DNA, 1537 bp, Zea mays
  Clone ID: ZEAMA-23APR03-CLUSTER31966_2
agaaatctccgtgcgtgtttggccgaaatccacgggagggtgctcgtctttgctgagctgctccggcctccggagcggagctctgcctacttaagttcaggcttgttccgccatccgaggacaagattcggagcgtcgccgaagggaggcgatgaaggggaaaggcggggcgatggaccgcaggtcctccgccaggtggagggtgttgctgctctgcgcattcagcttcggcctcggcatgctcttcaccgaccggttctggacagcaccggatagcagtaaccatatcatgtctcaaagccggaggcaagagcaagagctccaacttgtatcagaggattgcagcacaaagaggaagcatggggaagacaaggatataatgggagaggtaaccaagacccatgaagctatacaatcattggataagtccatctcaacgctgcagatggagcttgcagcaaagcggagcacacttgagctgctccgatctagtggttcaccagtaacctttgaaactagccaaccaaggaaaaaggcatttgttgtcattggagtcaatactgcattcagcagccgcaagcgccgtgattctgtccgggagacatggatgcctcaaggagaaaaactgcaacaattagaagaacaaaagggaatagtaatccgcttcactatcgggcacagtgctacatctgacagtatactggacaaagctatagattcagaggacgctcagcatcatgactttcttaggctggaccatgttgagggataccatgaactctcagctaagacaaaaatattcttctctactgctcttggcatctgggatgctgacttctacgtcaaggttgatgatgatgtgcatgtaaacttaggaatgcttgccactacccttgctcggcataaattgaaaccaagaacttatattggctgcatgaagtcaggcccagttctcgctgacaagaatgttaagtaccatgaacctgagtactggaaatttggggaggaaggaaataaatacttccgtcatgccacggggcagatatatgccatttcgaaagatctcgctacttatatttcaatcaaccagcctatcttgcacaaatatgcaaatgaagacgtgtcgcttggatcatggttcattggtttggaagttaatcacattgatgaaaggaacatgtgctgtggaactccaccagattgtgagtggaaagggcaagctggtaatgtctgtgtagcgtccttcgattggagctgcagtggcatatgcaagtctgttgagaggatcaaagatgtacatgctcgctgtggtgagggggattcagcagtttggagtgctcttttctagcgcataccttctttgcccgtaaatatgtagcatacttgctaagctctcgcggcggacaccataggcaactcaagtaaacttgacaaaaaccaaagatcgtggagtatgatctgaaactgcagaaacagtatgttgcttggaaatattctgcaacaacataattttgctccggcactgttcgtggctttt

SEQ ID NO: 2392 - DNA, 977 bp, Zea mays
  Clone ID: ZEAMA-23APR03-CLUSTER31989_1
accgtagcccccgaagacacactccaagaaaccaagaacaccggccacacgcacgcgcgcgcgcaccgacgcacggcaggcgaggccgaggacgaacacacgataaaggaagcaatggctccgtcgctcgcgtcgacggcggggctcccgagctgcgcggcgcggcgcggcggccggtgcgtggcccgccgcgcgtccgcggttgcggctccggcgacggcgacggcgacggcgaggacgcactacgaggtgctcggggtcggggccggcgcgagccggtgcgagatcaaggcggcgtaccggcgcctggcgagggaggtgcacccggacggccgcggcgacgaggggttcatccgcctgcacgccgcgtacgccacgctcgcggaccccgacgagcgcgcgcgctacgaccgcgccgcggcggtccggagccggatcagggcggcgccgtgatcggggtccggggcggggttccggccgcgaaggtgggagacggaccagtgctggtagcaccgtagcagcagccacgtagacgtagctgcgccggcggtggagtggagtcgccggagcgcgctcggtggtctggtccgttcccagggccagttgcgaccatggggcccatattgaagacagcccacatgaaaaacggaccgcgatcctggcagcccacagatcgtgactatcacatgagttgggatcgtggactttatgggctgcaggcttcgtaggcctttcgcgccagacttggcgctggatgttgttgtaggccatcatagagctgcacgaagaggcatttttaacatctcttttgcactgctgctactccttccactccaaattgtaaaatacttttatctttttattaacatattatgtttactagtatatgtttatatatcgtgtatataattaaaacattgtatctagcgtcttataaaaaaaaaaaaaaaaaacccacgcgtccgcccacgtgtccg

SEQ ID NO: 2393 - DNA, 1176 bp, Zea mays
  Clone ID: ZEAMA-23APR03-CLUSTER320158_1
aaaaatagggtggcgttttccttcccgagtggaagacttgagtgagagagaaggacatcgaggtcccgctggacctgcaatccgaccaactctttgcagattttctgccgcttaagtgtgatgcctgctcaggcatcttctgcgcagaccatgtggcctacgcccagcatcactgtggatctgcttaccaaaaggatatccaggtacctgtgtgccctctctgtaatgtgcctgtgcctgtggccagaggggagccccctgaccgtgctgtgggagagcacattgacagagactgtcgctctgatccagcacagcaaaaacgtaagatcttcaccaataagtgtgaacgcgctggctgccggcagcgagaaatgatgaaactgacctgtgaacgctgtagccgaaacttctgcatcaagcaccggcatccactggaccatgattgctctggggaggggcacccaaccagccgggcaggacttgctgccatctccagagcacaagctgtggcttctacaagcactgtccccagcccaagtcaaaccatgccttcctgtacctctcccagcagagccacaacccgatctccgtcctggacagcccctccagtgattgctttgcagaatggcctgagtgaggatgaagctctgcagcgggccctggaaatgtccctggcagaaaccaaaccccaggttccaagttgtcaggaggaagaagacctagctttagcacaagcactgtcagccagtgaggcagaataccagcggcagcaggcccagagccgcagctcgaagccgtccaactgcagcctgtgctagggccctgggcttggggagggaggttcacctgaggaggactgtggccctcacacctctagggtacacagggagaggaggcccggagcaccctggagggcagagacaagcgggagtgatgtggaggtcgccctgggagcctctggaaggccttgctagtgctccagctgcatggaagagagcggctagcaactgttccctggttgggccctcagtggatgctgggccaggccctactcttagccccttcatcatgtcatctcccttatgctggagctgccccgatgtggagtgggcaggaaggggcctggaaaaaataaaggatcttggcagttgataaaacgcaaaaaaaaaaaaaaaa

SEQ ID NO: 2394 - DNA, 1275 bp, Zea mays
  Clone ID: ZEAMA-23APR03-CLUSTER3202_18
acccatattattgatacgaactagcaacatacatagtgaagtacactagcaacatcttagcaccaatggcagccaagatttttgccatccttgccctccttgctctttcagcaagcgttgctaccgcgactattattccacaatgctcacaacaatacctctctccggtgacagccgcgagatttgaatacccaactatacaatcctacaggctacaagaggccatcgcagcaagcatcttacggtcgttagcattgaccgtccaacaaccatatgccctattgcaacaaccatccttaatgaatctatatctccaaagaatcgcagcacaacaactacaacaacagttgcttccaataatcaatcaagtagttgcagcgaaccttgctgcttacctccagcaacaacagtttcttccattcaatcaactagctggggtgaaccctgctatctacttgcaggcacaacagctactaccatttaaccaacttgtcgggagcccttatgccttcttactgcaacaacagcttctgccattccatctgcaagctgtggcaaacattgttgctttcttgagacaacaacatttgttgccattttacccacaagttgtgggaaacattaatgccttcttgcaacagcaacaattgctaccattctacccacagaatgtggcaaacattgttgccttcttacaacaacaacaattgctgccatttagccaacatgctttgacgaatcctaccaccttattgcaaccgcccaccattggtggtgccatcttctagattttttatgatttatactgtaataataaagttctcatgctgatatgtgcgacctctcagtaataaagtattagagatctatattttaaattcaaaaaaaaaaaaaaaaaaaaaaaaaaaaaaaaaaaaaaaaaaaaaaaaaaaaaaaaaaaaaaaaaaaaaaaaaaaaaaaaaaaaaaaaaaaatttaaaaaaagaaaaaaaaaaaaaaaaaaaaaaaaaaaaaaaaaaaaaaaagggggggggccttttaaaggaaccaaattttactccccggggttggaaaggaaaaattttttttttggggccccaaaaaaaaaataaaggggccgggttttaaaaacgggggaggggaaaaaccctggggttccccaaattaattcctttggaaaaaaacccctttttcccaaggggggaaaaaaaaaaaaggcccccacccatccccctttccaaaatttggccacccttaatgggaaatgggacccccc

SEQ ID NO: 2395 - DNA, 791 bp, Zea mays
  Clone ID: ZEAMA-23APR03-CLUSTER3204_16
aatctcgcgagaagcgaacgcggaggaggagggtgcgaggagatcgcgagcagccggagccggagccggagccggascttagtagatgaagacgttcgatccgtggccggtcttcttccgccgggagtggaagcgcaattggcccttcctcacggggttcgccatcaccggcttcatcatcactaagatgacggccaacttcaccgaggaggacctcaagaactccaagttcgtccaggagcacaagaagcgctgaccaaccaggctccggggcagcgcttggaccagagtgcatggtgattggagctcgaaaacggagaaagcgaggggtgtgataggtcgaacacaacaacaaatgacaattagcactggaggatgccaagtattcaaagggtgcattattataatgccaacagagcaattactgtcttcatgatgccaatagtctgaagtccgatgaatcgagtgccaaaattgcaaaaatctctccatcatgcgggagttagtttcatttcgcaacagcagtgattcttaggttcttatttctggtggctattgtagcacttatccattaacgatgtcattatcacattagtgtattttgggaacagtaatctatgacatggacgccggatggcactggcagagggatggtgtacggtgagtggcttcaatctatcgctgatgcaatctgccattggtgctggcgtgctgtaggtctgttttgcgtatatttcatttgacatgctacataaaaatttccaacaattcctggtcggttgttgacacca

SEQ ID NO: 2396 - DNA, 2438 bp, Zea mays
  Clone ID: ZEAMA-23APR03-CLUSTER32089_2
agcagtggtaacaacgcagagtacgcggggatcctttatgtcaaatagacacctaacatagtttactggcttatacttttatcctttacctttatgctcggagagatcgacctctacaagaggattgtggatctcaatcaattgattgttgtgcagccatgttaatagaccgctcccaatcgcatactgttcagaggcagttttctcatcaatagatttacccttatccgccattctttcacccttattctgtttcgggcaatccgtcttcatatcaccaatcaccttaccagcaacaacgccttcaaccgcactagcaataggagtcccagccaaaacagcttcaagtccatgcgatccatcaagcgtactgtactatactatatatactatactatactatttattagtctctgggaatgtgttcataggccaggccaggatctgagattccatgtgtcctacttctctgccttggaggatatgtggtcgatgaatgaataaaaggcaggtgtctcgattggcaatagcatttcgagttgtgtttttttcagacttgaatattgatctggcgcacagagttctagtggtagtcccaaactctgaaatgagaatgcaagcaaggaagctccaatggcaatggtgactacttaggcgccgctatgtgagaagcggtatcaaagaataggagggaatcaaataagcacagccttctcttctcatatatagtttattttatctttgatgagaaagctcttctaattaattcaagactgccttgattttcccagttattactcgagcgcgctgaggcaactctgaactaagctggtagtaggtatgcttccctccagcaccttgaagatcgaggtttttctttttgaaaagcggatttatccatcgtctttgtttgttaaagtaaagtaaagtatggaattctcaccaagagctgcggaacttacgactctattagaaagtagaatgatcaacttttacacgaatttgaaagtggatgagatcggtcgagtggtctcagttggagatggagagcccgcgcagccccgaggcggagatcggccaccgggtggaggacctctgggaggtggcggagccgcagctctcgccgtcggagaagctcaactcctgcttcgaggacatccccgtcgcgtccttcccgcgcacgcacccgtcccaagtcattgagattccttcagatgcaagtcttgctgaaactgtagaaatattatccaaaaacaaaatcttgagtgcacccataagaaatgttgaggctccagaagatgctagttggatggacaaatacatcggcattgtggaatttgctggtattgccatgtggttgctcagtcagtctgatgctgcagttaatgggacggttggttcgggaccaggatcgcctgtctccagtctagtttcgaggttgggttctttcacattcagaaggacatcatctggaagattagaaactgctactgattctgaatcagacgaagcagcatcggttggtgggagcttttttgaaaccctgacttcctctgaattctacaagaatacaaaggttggcgatatctcagggagcttccgctgggcaccatttcttgcactgcagacatctgacacattccttaccatgttgctgcttctatccaagtacagaatgaagagccttccagttgtagaagtgggaggagataagattgagaacattatcacacaatcctctgtcgtacacatgcttgcagagtgtgttgggctctcctggtttgagaactggggaaagggagttggtggcttgccagtcatggacacaagtggagcaaatgccattggtaatattagcatcagagatgtccagtatcttttaactgctcccaagatatacaaagagcacaggtcaatcacgacaaaggatttccttagtgctgttcgacaccacctccaggagcagcgtgaggcctcaccgttgctgcatgatgtcatcacttgcaaaaaggatgatacaatcaaggacatcatactgaagctggactctgagaagatccacaggatctacgttgtggatgacaaagggaacaccgagggagtcatcaccttgagggacataatctccaagctggtgcatgagccacgccattactttggggatttctttgatggtgttgttcccctgcctgcaaacagcaccgtatgacacatcttcgcggtccaatcacactgatgtatctgtgcaaatgtacattttgagctattctcttctgaagttgcttctagtgtattccttttctcagccttctcggttctcaggtaaacagaccattgcctacatggagaaaaggactaatgctctaatggatggatggcaatgttgtacattgaataatcaaaaaaaaaaaaaaaaaaaactcgagggggggcccggt

SEQ ID NO: 2397 - DNA, 1562 bp, Zea mays
  Clone ID: ZEAMA-23APR03-CLUSTER32116_3
atacaaaaaacagttcttcctctattctattcttacatggtatcagccgcctagatcctgccttcctctcttttgcgtccgacatgagtgatacgcagagttcattttccagcactactgctgccgtttcttccaccaccgctcttcctctctctcaagctatacacagcgtgaacatcaaatcgcttgtgtcgtacattcttgatactcaagttcacaactacggcaaatggagccaactcttcaccattattctcggtcgcttcgatcttctccaccatatcactacctctgatgttttctcggatgatcctgcctgggtccgtgagaacctcacagttctctcatggatcttcgccactatctatgaagacctcgtcgacatggtggataagatggaagaagcagatgccacgacgtcggacaagatggaagaagtagatgctacattgccggacaagatggaagaaacaaatgtcacgttgccggacaagatggaggaagcaaatgccatgtcgccggacaagatggaggagaaaaattctgatccgaaggacaagatggatgaggagtgacgtggtggtgtaaccagttttgaaatagcggtagacttgttctgtcagccgcatatcttgatttggaacatcatgtattcacctgtgttaccgcagatgaagactgatacgtgctccccaagaggtgtagccttgtgggcagaatcaagatcgacatatgatgaccatcttcctgcggttaatggtggtgaaggttgttttcgttaccatcttggccaggctatgctggaaaatgttccttctcttccagccaagggtatccatgtttccccatgtgtttaatcgtgcaaactgtagaggattttttgggtagtttttttctgaaacacccgttccatctatcgttgtctccgtaacataacacagctggaacgttgcttttgtatacttgactgactactataattttggcaaatgcattagatttttgtagatttgataggccttatcggccattcaaaaaaaaaaaaaaaaaaaaaaaaaaaaaaaaaaaaaaaaaaaaaaaaaaaaaaaaaaaaaaaaaagtttttttttccccccccccccctggggggggcccccccccccttctgtcacccgcatatttttatttggaacatcttgtattgacctgtgtttccccaaatgaagactgaaacgtgctccccaaaaggtgtagccttgtgggcagaatcaagatcgacatatgatgaccatgttcctgcggttaatggtggtgaaggttgttttcgctaccatcttggccaggctatgctggaaaatgttccttcttttccagccaagggtatccatgtttcggcatgtgtttaatcgtgtaaactgtaaaggattttttgggtagtttttttctgaaacacccgttccatctatcgttgtctccgtcacataacccagctggaacgttgcttttgtatacttgactgactactataattttggcccaagcattagatttttgcagatttgataggccttgtcggcccttcc

SEQ ID NO: 2398 - DNA, 684 bp, Zea mays
  Clone ID: ZEAMA-23APR03-CLUSTER3211_13
gtactcgctcatcttgctccgccttctgcttctgcgcatcctccaaggatcgtgatggccatggccacgcaagcctccgcggccacgcgccacctggtggccgccgccgcttccgccatcatgcgggaggggcccaacctcctgaagctggcgcgcaaggagcagtgcctcgcgctcggcaccaggctgcgctccaagtacaagatcacctaccagttctaccgcgtcttccccaacggcgaggtgcagtacctccaccccaaggacggcgtctacccggagaaggtcaaccccggcagggagggcgtcggccagaacttccgcagcatcggcaagaacgtcaaccccatcgacgtcaagttcaccggcaagagcaccttcgactaatcacacatcacgccgcccgcccgcccggccggtgatccaaatcaaaggacttcttcttcttcttatattaataattaagctagctgctggtggtgcgccatatacatgcatggtttgatctaaatatatgtggacatggatgtgtaatttgttttagtaatttcttggtgaccgtggaggcgcagcgtgggactctatgtacatgtgcatctgctcctcatgtctatgtatatgacaacgttgccaaaaaaaaaaaaaaaaaaaaaaaaaaaaaaaaaacacacacaacccagcgcc

SEQ ID NO: 2399 - DNA, 2845 bp, Zea mays
  Clone ID: ZEAMA-23APR03-CLUSTER321421_1
gcacgagaccatttacctagaacatcctaatcaaaaagggcaatgacgagattccaaatttctcacaaaatctccgccccggcccgacccgaccccggccgcctctatgcgtcctccgccgccgcttcgcgcgcccacctcccgctcgacgtaatgcggcaccgccccgccgcgggctgcatcgtgcaccttcccgcggctctcgcaggcttcgtccgtgcgcgcgccgctgggactgcatccgcgtcgtgtcggttctcttacggcaaagcgctggccgcctgtgccaccgcctccgcgccgttcgccttcgcggagcagctctactgcgcagcctggaaggatggactctcgcgggacgcgtacatctgcagcaccatggtggacctgctcgccaagcacggccgcctgggcgacgcgctgcgggcgtttgaggacggggaatatcgcggaagcgtggtctgctggaatacggctatctccggggcggtgcgcaacggtgaacacgctctcggagtcgagatgttcctcgacatggtgaggggttctacctgcgagcccaattcgttcacgtattctggggtgctcagcgcgtgcgcggctggtgaagagttgggggttggaagggcggtgcatgggatggtgctccggcgtgattccgaatacgatgtcttcgttggaacatccatcgttaacatgtatgtgaaatgtggtcagatgggcgctgccatgaatgagttctggaggatgccaatccggaatgtggtttcttggacaactgcgattgctggttttgtgcaacaggaggacccagtaaatgcaatgctgctgcttacagaaatgttgcggagtggtgtgtcaattaacaagtacacggctacgagcatattgctcgcctgctctcaaacgtccatgatacgggaggctaatcaggtgcacggcatgattataaagagcgagctgtacttggatcatgttgtcaaggaggctttgatttccacatatgcaaatgctggggctgttcagctctgtgagaaggtgtttcaagaagtagatacagttagcaatagaagcatctggtcggctttcatatctggggttagtaggcatagcgtacaaagatcaattcagctgttaaggaggatgttatttcagtgcctaagaccgaatgacaaatgctatgcttctgttttcagttctgttgactcatctgagcttggcagacagctgcatccattggtcataaaagatgggtttattcatgttgttcttgtggcaagtgcactctccaccatgtactccagatgtaatgatttgaaggatagctacaaggtttttgaagagatgcaggaacaggatgaagtgtcatggacatcaatgattgctggttttgcaacacatggccattcagttgaggcattccaggtgttaaggaatatgattgctgaaggttttacaccaaatgatgtgtcgttaagcgccattctttcagcctgcaatataccggagtgtttgcttaaagggaaggaagttcatggacatgtccttcgtgcctacggaagaaccacatccattaaccattgccttgtttccatgtattccaaatgtaaagatttacaaacagctcgaaaactttttgatgcaactccatgcaaagaccagatcatgttatcttcaatgatatctggatatgctacaaatggttatagtgaggagacactctcattgtttcagcttatgttggcagctggttttcatatagataggtttttatgctcatcaattattagcatatgtgctaacatggcaagaccattctgtggtaaattgttacatgggtatgcatccaaagtaggcatactgtctgatctatctgtgagcagttcacttgtgaagttatattccaaaagtggcaacctggatgattctcgtaaagtttttgatgaaatagatgttccggatttagttacatggacagcgataattgatggatatgctcaacatggaagcagtcaggatgctttggcgttgttcgatttgatgattagatgtggggtaaaaccagacactgtcatacttgtgagtgttttgtctgcttgtggccgaaatggtttagttgaagaaggcttcaaacattttaattcaatgagaaccgtgtatggggttgagccagtgttgcaccactactgctgtatggttgatttacttggtagatctgggaggcttgtagaggcaaaaagttttattgagagtatgcctgtgaaacctaattcaatggtgtggagcacactgcttgctgcttgcagagttcatgatgatgttgtacttggacgttttgtagaaaataagatccatgaagaaaattgtgattcggggtgttttgctactatgtcaaacattcgagcaaattctggagactgggaaggtgtaatggaaataagaaaatcagtcaaggatgtggagaaagaacctggatggagttttctggaagaataaatatgcttcaatagatatgtaaaaagagggtgaatactatacataacttcgaaacatgtgcgatgcgttggcataaattggctatagaaactcactgaaacatagtgcagcatatgtaactgtgtactgaaaaaacttcatatctctgaaagtttttttgaaaaacttgtgtgatctgttttctagttagtgaatgtattacagatgtgtttggctgagggaccaactcatgtaggattgtttggttgatcactttgttatggccttgtgggaccattccatgaattttaagtatatttcctgactttctacatattttgttgtaacaagtaatgatttttatctctgc

SEQ ID NO: 2400 - DNA, 1933 bp, Zea mays
  Clone ID: ZEAMA-23APR03-CLUSTER3232_1
atagggcgtgttctaaaagacacaagatcttctctgggcacactagtgtatgaaaaaccacaagggtgattcagcttgccactgtcggctccttctatgcatgcagctgatccctgctgctcactcccatggcgcaaggtgaggagagctcgtggtgcatggcgagcagcgatcatgcatcattcgcccaagcagtcgcgtgtggaacccaaaggcgcgcttctgccgcacaacctgccaatttcttggagttgcaacctgcagcagctgctccttattactttggtgagttggaggaggcccttatccatggcacccgtacatctgttgatcacggcatgatcggaagtgatgtggacacagagcgtaagactgctggataccttgcagctaggccccccacactggagatcttcccttcatggccaatgagtcatctacagcagccatacagtggtaactcgcactcagtagggagcaccactgagtcgagctcaggtcagaacagtatgccacagaccgagctggtgtccccagggagcatgagggccgactctggacagcgtcaggagcttttgatggtgactgttgatgattacaactacgagcaaggactcggagccgcagcaaccacagctccaatctttcagcagcatgcagcaggccaagacaagggaaagcatggatccacaaggaaagacggcaggctgttagacgccaagaccgagaggcgattggcccagaacagagaagctgcaaggaagagcaggctgagaaaaaaggcctacgtacagcagctagagacgagtcggatcaggcttcagcaaatcgagcaggagctgcatggagcacgctcacagggtctgttcccgggaggaggtggtgcgcctggagacttgagttcaggcgctgtgattttcgacatggagtacgcccggtggctagaagacgacaccaagcacatgacggagctccaggccgtgctgcagccccagatcatcgacgcgaacctgggggccatcgtcgaggactgcatgcggcactacgacgagctgttccacctgagggccatgctcgcaagatccgacgtgttccacctgatgaccggcctgtgggcgaccacggccgagcgatgcttcctctggatgggagggttccgtccttctgaaatcctcaagatgctgataccgcagctcgaccctctcgcggagccgcagctgctagggatgtacaatctgcaacggtcgtcggagcagaccgaggaggcgctcgtgcaggggcttcagcagctgcaccagtcgctggcggacgccgtgggcgctagtcctctcagcgacggcgcgaatgtcgccaactacaccgctctcatggccctggcacttgacaggctcgacaccctcgagagcttttaccgccaggcggacagcctgaggcagcagaccttgcaccagatgcggcggatcctgacgatccgccagacggctcggtgcttcgtctccatcagcgagtaccaccgccgcctccgcgcccttagctccgtctgggcatcgtcccgccctccaactcctccaagcgagggcgtcgttgcggccgcagagaatgttagccctacagggacgacgagcgagcaagctctccctccgtaccaccatagccagccgttccctggcttctgatcgaaggttcgatgcatgcatgcatgctggttgtcgcggctagctagggtacagattccgtcgtcagtggtggcgagcggacgacgaggcccggccgagggggacagattgtagtgtataacgttcttctatatatcattcgtcgagaacggaaacatgcatcatcagtcggtattcagtcagtgcatcatcactatgaaaaaaaagaggacacacaaagggtctctgctctctttctctcaaaaaaaaaaaaaaaa

SEQ ID NO: 2401 - DNA, 636 bp, Zea mays
  Clone ID: ZEAMA-23APR03-CLUSTER32362_6
ctaagctctctgctcccctccggctttccgtttccgctactgacggggcgacgcgctcggctcttcgccgggaggcctgctccgcagcacgggatgccttctacgcgtgcatagagaagcacgcggacaaaaagcccaccgagatcgccaccatgggtctcctctaccccgccgactgcaaaaagtcccgcgccgacttcgtcagcaactgccgccccacctgggtcaagcacttcgacaggcagtactgcgccaagaagagggtgcagaggctgctcgacggcgatggggaccgccggggccccatgtcgctgccccagccctacaccttcaagcaataggtagccttcctgtggttcagatcttggtattgagttcaattggatcagtgctacgttggtgtctagatgctataatattggtttcaggctttgtgtcatttagctggatgcatatgtgatgtgtaccagtacattgctctgaatgctaatggatgagcgaatctgtatgtggatctatcaatatcaggatatccctcattggcaatggagttgcattacttttcttctgatggcatgcagattgccagaatccttattgaaacctttcgtccttatttcaactttcaattgatcg

SEQ ID NO: 2402 - DNA, 2117 bp, Zea mays
  unsure (1)..(2117): unsure at all n locations
  Clone ID: ZEAMA-23APR03-CLUSTER323_4
atataccaaaaaatctccgccgcgccgccattagctagctctcgtcgtcttcgttcctccgcaaataatttggntnnntcaagccgaaggaggacgagggcgacgggattggctaatcaaatcgaccgatctagtggctggtgcccaggagaagggacgcgggcagtgcggctcgtcgtggtcagcagcttgtggcgaccggtcgccagggaatcaatcaattcaatcagaaagttgcaattttgattgagctcgattcgtcatccacaagacattagggaatcgaaccaccacaaagcaagaaggcagtccagtgcagagagagagagagagaccaagaagagaaagagaaagggaaagagaagcaaagcaatggatgccgcctccgcttcgtcgtcttggcaagtccgcgcgcctgcaatcctacgacaacagggcgccgctcctcctgcccgtcaagatcatggacgccgccgccgacgacaagccggaaatctccgacgatacggcccaccagattagcgttggtacgttcctctttcctcttgatatgcgcactcctggcttattccttctttccatcttctgctacataaacataaattttcagatccttggtatcaagttggcttcgtcctcacaaccggggtcaacagcgcatacgttctaggatactctggatcaatcatggtccctctaggctggatcggcggcacatgcggcctcctcctagctgccgccatatccatgtacgctaatgctcttcttgcacggcttcatgaagtcggtggcaaacgccatatcagatacagagaccttgctggacacatatatggaccgaaaatttacgggcttacatgggctctgcagtacattaaccttttcatgatcaacactggctttatcatcttagctggacaagctctcaaggccacgtatggactgttcagtgatgatggagttctgaaactcccttactgcattgcgatatcaggattcgtctgtgctcttttcgccattggaatcccttatttatctgccctcaggatttggttggggttctccacgcttttcagcctcatgtatattgtgatagcagttgtgctgtcgtcgagagatgggataaccgcacctgcaagggattacagcatccccaaatcatcgcagtcaactcgagtcttcactacgataggttccatagcagaccttgtgtttgcttacaacaccggcatgctgccagaaattcaggtgagcattttctttttctggataacattttctgttattgttggccgagtatttgtgatatattattacaggcaaccatcaggcctcccgtggtgaagaacatggagaaagctctatggttccagttcaccattggctccttgcctctctatgctgtagtttttgtgggttactgggcttatgggtcctcaacatcaggctacctcctcaacagtgtcacaggcccagtctgggtgaaagcggttgcaaatctgtcggcattttttcagacagtcatagcgctgcacgtaagacaagacagacgccaccatctttgtttacttcttctttcaaacatgaaaaaaaattcatatattatccatcctaactcgcagatctttgctagccccatgtatgaattcctggacacaaaatatggaagtgggcgtggtggcccttttgagatccacaacgtggcgttcagagtagcagtcagaggaggctacctgacggtgaacacgctggtggccgcggtgctcccattcctcggcgacttcatgagcctgacgggcgccctcagcaccttcccgctgacgtttgtgctcgcaaatcacatgtacctgatggtgaaggggcctaagctgggtgccatccagaaatcatggcactggctcaatgttcttgggttcactgcgctggctgttgcagcggcggtctccgcaataaggctcatcatgcgtgattccagcacctaccacttcttcgctgatctttgagatcgatcgttntcttttctttntgttggaatgctgagccagagctagtattttttcattttcagagaattattatccatgtatgtaaggatgacgcatatatatattgaatag

SEQ ID NO: 2403 - DNA, 1714 bp, Zea mays
  unsure (1)..(1714): unsure at all n locations
  Clone ID: ZEAMA-23APR03-CLUSTER3244_2
acgtaaggncaaacgcgaacggaaccctccccagcagatgagcggagtaggtgggcggggttctcttccactcccgctccagctttctctggcccgatcgatgctacattcccgcggcgagccgctcgccttcctccgcgggccttgggctacccaacccatcgccgagccgcctcgcgcggtcccccctccatctttgcccggctctctcgcctcggaggacggacagagaaagagaggatgagaagggactcctcgaaccgcgtcccgcgctcgggctattggaccgaggggttgcggtggatttggagcgcggggtggactcgtcgctgatggtattctccgatgcaagaggcagggagagagcgggacagggcggcggcggcggcggatctcggaggcgtcgccgctagcgtcaggccaacggatacagcagctgtaagcacaaagccggcaaagcgatacccactggccttatggataggcatattgggcctgataataaaaggaaagggagaagccttgtcatgatcccagtattccagacacagaaatcccttacttgcactacccgatgccaaatacttatgataggaaagaatgtgcgtgcacaggggttaggttctttgctatcttgtcaatgcagaggtccgggagtggatgggttgagacgttgttgaatagccatcctaatattagctccaatggagagatcttctctgtcaaagaaagacgcagcaatatcaccgcgatcacgaaaacactggacagattgtacaatctggattggtatagcagtgctgctaagaacgaatgtacggctgccgtggggctgaaatggatgctcaatcagtgaaaattatagggtctaatgaagcaccatcaagagatagttgaatacttcaaccgaaggggtgtttccgcaatttttctactaagaagaaatcttcttcggcgttacgtctctatattagcaaatgctcatgatagtgccatgaaacagttgaatggaactcataaagctcatgtgcactccaaacatgaggctgaaatccttgctcaatataagccaaccattgacaaaaaaacattgattactgaactaaaacggtctgataagttggcagctgatgctctggtgaatttcaagaacaccaggcacgttgtcctgtactacgaggatgttgtcagcaatcgcacgatgctcatggatgttctggattttctcagattgccaaagaggaagctgttcagtcgacatgtgaaaatccacacaaaacgattgtgcgatcatatagataactgggcagatgttactgattttttgaagggcacaccgttcgagagctttttgaatggctcaagaagatgacatggctagctgatgtatatagtgctatagtgagttgtccttctggcgcctcgtaggttttttttttttttgataccatgatgaaataagtatgggccactgagagaaatagttaggtagagatgcttgatccaggctattagagctgtagaataaagattaaaaacaatacctttgtgattatcagatatctaatgcaagaacttgcaaaactgtctggagtcattcgtgtatacatcaaagtttacacttacacttgaaaatgaataggccaagctccgtggcagaggaactgaggaaaaaggcagagtagcctatacaaaactgatgatttttactagc

SEQ ID NO: 2404 - DNA, 1648 bp, Zea mays
  Clone ID: ZEAMA-23APR03-CLUSTER3245_3
cattgggtacctcgaggccggccgggactctgcaaagcgcgcgcccggacggcccggttcgttctcgacctctcgtctcgctcatccgcccgcccccgcccccgaggaaggaaccctagcctagccttgctccgaccggtcgccgcggcgactgcgacgatgatggactgcgctggaggccgagaccccgtggaggacttcctcctcggcggcgccggcgacgacggagatctcgtcgccgtcttctgcgacgacggagggtacggcgatgccgaccggagcacccctttctcgtcctagtatatacttccatgtggactgcgtttaggcttacggaccggtgcatggggttttatactcccgagggtcgttgtcgctgccgctgcggattccttttttttttgttttaaatttgtgggcggtggtagactgattgcttgatttggctggtgtagcttctaaaaactatgtgctaactgaatgcgcatatatctttctctcttttttttctgtccaagggaaagaaggaaggcttgtgtgtatctgccagttttcggtctgcgattctgtagcctaacctatggtcatgcgactatgcgagttagattaatcagcgatctgcagtgctacttggtttgcattatcatgatcccctaggcgttttcttcttatcttttgactgaaatgctagcagcacaatagtttattagatgcttgagcagctactctgcactttcatttcctctgtatgtatttcctagtgtggaatttggtacttactttgcaattgtagcagacttgggattgagggtatccatggagatgcttgtggatttgagcaatctaatttggggaaaaggggtagagatgaaccatgttcatctggcccaacatccaaagcttgtcgtgaaaaaatgaggagagacaagctgaatgacaggttcctggaattaagttcagttatgagtcatggtaaggaagcaaagttagataaagcaaatatattgagtgatgcagcccgtatggtggcacaacttagaggtgaggcagaaaagcttaaggaatcaaatgagaagctgcgggagaatatcaaggatctgaaggaggagaagaacgagctccgtgaagagaaagtgagactaaaggtagaaaaggataggctggagcagcaagtcaaagctatgagtgtagctcctacaggatatgtaccccatctccctcatccagcttcataccatcctgctgcgttcactccatttgcgccgcctccagccaacaaaagtgctccaatcccagcaccgttccctgggatggcgatgtggcagtggttgcctccgaccatcgtggacacaactcaagatccaaagctctggcccccaaatgcttaggggcagctaccttggaatgttgtctcattgtgccttttcatgcatctggtgggcaaatcagtgtcagttaggtccctggagactggagaggaatcaagttcgcaattcgcgccatgtttatgctgtaacagctggtttccagcactagttatgaacttactatgttctactgaagggtggtgcctgtaattaatatatggatctcaaccctctagttggcatgtatatcatttgttctattcgagagctgcattttaagg

SEQ ID NO: 2405 - DNA, 1488 bp, Zea mays
  Clone ID: ZEAMA-23APR03-CLUSTER324_4
aattcggcacgaggctcaccccgcgtcctgccggcggacgcaccccgcccggcatcctgcgacctcggcgcaatccatgcgcaattcccgctcccaccgtatcggcctcgctcgcgcaatccatgtggcctaaccttcaatcaaggctccgggcaaggtttccatcgttggcgaagcaccaacctccatccttctccacgctctcctggaagactatcatccatggtttacggagaaatcacgcctccccagacgtccacccggggctacaccatgaccccgccccctctcccacaccgccggccagcctccatcgtcgatggaagggcgcgatctccgcaatccgcaggccccttcccccacaaatgccgccatggatggcgggtgcagcggatttcgcctccatcccgcttggccccctccgcgcacagccagccgcatgcccgcgcatggcggatccgcctccccctccgccaacgagcatgcgccagcacccgatcctcgctcgctcagccatgccctcgctcggtcccctccgcgcacgcgcaaaccaccgttcccccgcccgctccactgatccccatccccctcagatcctccctgcaaatcaaatccccatgcccgcagcgcctcgcctcggctgctctaccagtctacctctaccccgcgccccctccgagatcggaatcgcggcgccccgccgccctcctccgccatggcgccgtctctgctcgggggcttcaccaagtcgctggccatgactgtgctctccgaggtcggggacaagaccttcttcgccgccgcgatattggctatgcgccatcccaggaaactggtcctggcaggctgtttgactgcactaatagtgatgacagctctatcagcttctctaggttgggttgcaccaaatctgatttcacgtaaatggactcatcatgtgaccactctattgttctttgtatttggtatttggtcattgtgggaaggcttcaaggaagatggagattcagaagaattggctgaagttgaagcagagctggatgctgtctttaagagtaataaaggcgaatctaaaactaaaactaaggcattttctattacattctttggtgagtggggtgacaagagccagattgctactattggcttggctgctgatgaaaacccatttggtgttgtcctgggtggaatcatagcgcaagcactctgcactactgctgctgttcttggtggaaagagcctagcctcccagatatccgagaagatggtcgaactgtcaagcggagtgctcttcctgctgttcggtatcatgtcattgctctctggaccaggagaattgtaatccctgcttgaacccttttcagctggctgattgacatctctctctccttagacctatcttatttcagtagatgaatgatggcgacaaaagccatccatccatatggcgaaccggatggtgattcgatagtttagccgacacatcgg

SEQ ID NO: 2406 - DNA, 2363 bp, Zea mays
  Clone ID: ZEAMA-23APR03-CLUSTER3262_1
aacccaaccggatcctctggtggaacttccagggtgccctcgtcggcggcgcgcttctcctcctctacatcgtcgacgccgccgttggttgaaagctcagaggtcatgcctcactcggcgcggcctccggggaccggagccaacttcaaccgcgcgcgcgaccagcgcggcacccgccgcgtctttctgcgtcgcccgccgcctccgcttcggcgtcctcctcatgtcacagccaatggtcatcgaggcgagggaggcagcggcggcgggggagcgcgtcggagcgcgggagaggaggcgggcgggcggtacacgaggcgcggcggcgtggcggaccgtgaggtggcggtgagtgccagcgcggaccctgtgggacggaatgctgcgaccgtcgccactggtggtgaggctccaccgccgcgggaggaggatggcggcggacgaggtggtgttcttgtgagcaagcgcccgtctgctgcgcccgtgctcccaccgcccaagcggagggcggtctccgtcactcggcagttcccacccgcctccaggtggacctcggctgctcctgctccgctcgctggtgcagatgccgacggaggtttgcggacacgatacgaagggcaacgtgagaacagagcttctgatgcattcaagaagccggcagttgctcgtcccctcgcgggcctcaaggatggtgttggtgttggtgtgatgtcgagagcggtgtcccccaaagctgctggcacgagggttctcaaaaagccgtgtgccagggatggagctgctccaatgtcgaacacagatcgtcatgatgctggattgtatggtcacagtgttgggttttctggtgtgcctcccaccacattggtccgaaccttactagggggaagagcttcaagattggttcactgcagatgttcatggagaacaatggaagcactgaagatatgggtcctcgatcttttcctgtcaaggaggttcacaaaatagcagtactagatattaggttagctaatgctgatcgtcatgctgggaatattctagtgtgcaaggagggagaaggtggcaactacaagctgattccaattgatcatggttattgcttgccagagaagtttgaagatgttacatttgagtggctctacttgccccgtgaagtgatgaagatgataaatttaaccatagctggactggagaaagggcacctgcctgtgatgtcagctgaaggttcaggaggtgtttatttcatgcgagatgcaacaggccagaagaatgttgctgtgtttaagcctattgatgaggaacccatggccaaaaacaacccaaggggtcttcctttgtccactgatggcgaggggatgaagaggggaacaattgtagggggaggtgcattcagggaggttgcagcttatattctcgaccatccagttagtgatagtaaatctggtcacagttttgggttttctggtgtgcctcccaccacattggtccgaacctcgcatagggggaagaacttcaagattggttcactgcagatgttcatggacaacaatggaagcactgaagatatgggtcctcgaccttttcctgtcaaggaggttcataaaatagcagtactagatattaggttagctaatgctgatcgtcatgctgggaatattctagtgtgcaaggagggagaaggtggcaactacaagctgattccaattgatcatggttattgcttgccagagaagtttgaagatgttacatttgagtggctctactggccccaagcccgtgagccattcagtgatgaaaccattgaatacatcaaatcacttgatgctgaagaagacatcaagcttctcaagttccatgggtgggagctgcccccacgatgcgctcgtgttctgcgcatcagcaccatgcttttgaagaaaggtgcagctcgtggcttcacaccatatgacatagggcgcatactatgcagggaaactgtgaatagggagtctgagattgaggacatcattcaggaagcagaggatgctgttctcccagggtccagtgaaaacatgttcttagaaactgtatctgaaatcatggaccgtcacctcgacaaggagtgagtttagaaattcagaataactgatctagttgtttccagctgtatccggtttgttgtttctattgttgacaagcactgatcaacagactaataatttgatttgtttgtacctctcaaatgtttctttcggttgtaatgctcgagtactttgcttaggcacattttgtgaataatatatttgttcagttagacataaaaaaaaaaaaaaaaagggcggccgaagactagtgagctcgtcgaccgggaataatcaggacgg

SEQ ID NO: 2407 - DNA, 969 bp, Zea mays
  unsure (1)..(969): unsure at all n locations
  Clone ID: ZEAMA-23APR03-CLUSTER326_3
gaacttccacatctctgctctgccttcccagtctcccatccctgaaaacctcacaaaaccctcgctcgctccccaccaccccgccgcgccgccgcctgtaccagctgcgtcaagatgagtggcattgtcttctgtagtcggcaccctgaggtgaagtgggctcagaggatcgacaaggtttacatcactgtacagttacctgacgcaaaggatgctaaggtcaatttggatccagatggtgtcttcacattctctggcagtgctggtacaaacttgtatgaattgaaactagatctgaatgacaaagtaaacgttgaggctagcaaaataagtgtgggggtcaggtccatattctgtatcgtagaaaaagctgaagccaaatggtggaagaaactcgttcgagatgatcaaagggcacctcactttgtgaaagttgattgggacaaatgggttgatgaagatgatgatggtgctgatatcaacatggatgggatggacttctcgaatttcggtggcatgggtggtatgggcggcatgggtggcatgggtgatatggctggtatgggtggtcttggtggcatgggtgggatgggtgatcttggtggcatgggtggtatgggaatggatgatttcgaagatgagagtgatgatgaagaagaagtgtcgaaacctcaagctgcggacaaggctgttgaggctgaggagacggagtcagcggaaaccaagattgaggcggctcagagcagttgaagatgcttatgatntaagntagattgtatcctcatgttaattctgctgaatcggaggacaaaccttacatttgtggtgctggcaagtcccagtggcgtgccatgaaaatttacgttccgtcttttaactgggtatcctagtgtcgtgctcagcatattatggatattgtttccgtaatgcttcctttggtcgccaatcatgtggttaagagtttgtttt

SEQ ID NO: 2408 - DNA, 1690 bp, Zea mays
  unsure (1)..(1690): unsure at all n locations
  Clone ID: ZEAMA-23APR03-CLUSTER32748_1
ttacacaacccagcaagtgggccatcatcccagggcacctggtcggatggntccacagatatatgtctgccgtagctttttttttttttgctgatatagagagttggtcagttcctagaccttatatatatagcatcatgtaaatatataagagttattggtcactcctaacagctacctagtttccaaaatcatctcagcagacaccagcaacttaaggacggtcagctagcttctactacttatgtacagcaggctttcgtatattgctaccgatctccatccgcgggtttctcctccagcagcttggtgctgcaggaatgccctttgtcgcggttcagtattgattctctaatctccttgtacttgttcagctcctccagcgtgtccgccgctgtccttgacctcagaagagaagaaggcacccccctctggagtgaagaaggttcttgaggaactgtgccagcactggggactgtcagtagcctttccctgaggcctggggcgttctttaggacgcgcataagaataccgatcgctgcatctggagatctcgttaacgagcctccaagttcctggctcgattcatggtcctccctgtcagagagatcaatcctgttaagctgatcaatgatggtgtctaagatctaccctgctaagctgatactcccgttcgtccagttcatccatgatgaaaagtttgctggaggcatgcggctccttcaggccgcgaaaatacattaaatcatcattaccaaacgataaaaccttatgtgactgcaaatacgactgacaagcttaacagagtttcaatcggagcaaatgcaaagtgtttcatctctgcatctgcgcgggtgaatggctcaacaaatgatgaaatcctgtgcgagaggcttaacggacagatccttccagatgaattgagctcctcgaaaagatggtatgctggcaagagcctgacaaccagatacaatgaccggaacaacactgtcgagccaatgtacgccctcctgtacaagctatgatcctgagaacagctgcttctagcgttcttgtcagtgttcttgataacattgccagatctgctagtttcgtacttaattacccacctctcgatgatcctgctggcctcgacactggcgattctggtgttgtcacgttgcaggaggacaatgtcaatgaccagaggctcgaggttgctctgcctccacaggtcaaaattctcaagcgcggcagggcagtcccggagagcaaggttgaaccaccggtcacgtggctggctgccagccagtggcgacgacggtggggagggccgtgtgaagttccgcgacgaatcatagggtgagcgcgactccaggatgacgtggaggctcttggcgaagaattcagtgatcacttgctccaccattggcggttccgacacgccggcaaccgcagccatggttttgtggctgtccactcaagggttcaattgaagtcccggaacttctgaaaaacgagctgcgccagcaccatggctaaaattgatcttgctccgtaacgaagaaccttatgtgctgcgttctagtggccggcgcgacgaagacctgcgcagctgggcggcgggccggcggctgccgccgcagttaagttatcgcgctggcgaggtgtactggagaagaaaaacagtccggccggcctcgaggtaccc

SEQ ID NO: 2409 - DNA, 2191 bp, Zea mays
  Clone ID: ZEAMA-23APR03-CLUSTER3283_23
actcgatcgtcgtgcacgcccccccaccggccggatcgacagcaccgatcaccctgaccgtctgcgcgcggcggctctcactccggtgacacgcagggcgcgcataggcgagggcctccccccccggcgagggatggtgtggtcggctgggatggcaacaatgcgaggcgcctccgccgccgcgctactggtgctggcgctcgccgccgccgtggcgcgcgcggaggacccctaccacttcttcgagtggaaggtgacgtacgggacgaggaccatcatggggacggcgcagcaggtgatcctcatcaacgacatgttcccgggccctaccatcaactgctcatccaacaacaacatcctcgtcaacgtcttcaacatgctcgaccagccgctcctcttcacctggcacgggatccagcagaggaagaactcgtggcaggacggcatgccgggcaccatgtgcccgatccagcccaacaccaacttcacgtaccactggcagcccaaggaccagatcggcagcttcttctactaccccagcaccggcatgcagcgggcggcgggcgcctacgggctgatcagcgtccacagccgtgacctgatcccggtgcccttcgacacgccggccgacgacttcccggtgctcatcggcgactggtacaccaaggaccacgccgtgctggccaagaacctggacgccggcaaggggatcgggcggccggcggggctggtgatcaacggcaagaacgagaaggacgcgtcgaacccgcccatgtacaacgtggaggccggcaagacgtaccggttccgcgtgtgcaacgtgggcatcaaggcgtccttcaacgtccgcatccaggaccacatcatgaagctggtggagatggaggggtcccacaccatgcagaacgactacgactcgctggacctccacatcgggcagtgcctgtcgttcctggtgaccgcggaccagaagcccggcgactacctgctggtggcgtccacccggttcatcaaggagaagagcagcaccacggccgtgatccgctacaagggctccagcgccccgccgccggccaagctgccggagggccccagcgggtgggcgtggtccatcaaccagtgcaggtccttccgctggaacctgacggccagcgcggcgcggcccaacccgcaggggtcgtaccactacggccagatcaacatcacccgcaccatcaagctcgccatgggccgcggcaaggtcgacggcaaggagaggttcgccttcaacggcgtgtcgcacgtggacccggaaacccccgtgaagctcgccgagtacttcaacgccagcgacggcgtgttcaagtacaacctcatcggggacgtgccgccctccaacacggcccccaccaagatggcacccaacgtcatcagcgccgagttccgcacgttcattgaggtggtcttcgagaaccccgagaagagcatcgacaccatccacatcgacggctacgccttcttcgccgtcggcatggggcccggcaaatggacgccagcgtcgcggagtacgtacaacctcctggacacggtgagccggcacacgatccaggtgtacccaaggtcgtggacggcggtgatgatgacgttcgacaacgcgggcatgtggagcgtccgctccaacatctgggagaggcagtacctcggcgagcagctgtacgtgagcgtcatctcgccggagcggtcgctcagggacgagtacaacatgccggagaccagcctccgctgcggcaaggtcgtcggcctgccgatgccaccgtcctaccgcgccgtctagagcgtcgaccgatcgcgcacggtgctgtacacaactaaaggagagcgagaggggactttttctcgcgtttccttctctagccagccttgtctgtcccctcctcgtttattctctctctctcttttttttcgttcgcttccgaggaataatacccaaaaacaaaaaaacaaaggggctcaagacttcatcatgcatgcatgcataacacctcgagtaggagttgaagtacatgatcattgatggtatatatatagaggaagcatgtctatctaataagtccctcatccaaaattgttctttatgtcatgtatatgtatgtgcatatatatatataaaaatacgtctcctttcaaaaaaaaaaaaaaaaaaggggcggcc

SEQ ID NO: 2410 - DNA, 1777 bp, Zea mays
  unsure (1)..(1777): unsure at all n locations
  Clone ID: ZEAMA-23APR03-CLUSTER32845_1
actcggcggccaatctacagctgaccggattaacaataacagtcgcttgtttctcaagcaagcaagcacgatctcggcaaatcccacggacagaggacctttcgagagatctcccaaaatcatgtgtaaacccaggaaaaagtagcaagaactcggtacacgcacacggaacgcaaccagcgggcagcctagcgcaagagataaacgaaccccgcgtccgcgtgcatcacgactgacgtgtagcgcacccgagccacgagggcgtgcgcgtttctcccaaattccccagcccaagctaaaaaacagagcagacgccagacggcagacgggcgccgcgagtcagagcccttctagaaggtcgcctcgctacccggttcccctatataaacgccgctcccatctcgctaaccgactagcagttgttccccttttccctccccacgccgaacgcacccgatcgcaaacaaagcgagcagcagaaacatgcgagacatgccggttgtccgccgccaggaacccaccgtcgtcaggacggaggacgacgtggtttccggcggtgaggactcggacggcgagttcgagttcccctccgtgagccgggagtccgcggcgggcgttggcgggcgccgcgtctagccgacgagctcttcgcgggcggccacgcccgggcgttctacccggtgtttggccgagtgctggacgaggccgcagcgccggcaccgagggcgccactagggcggctgttccagctggagcaggcgcggacctcgtccgtcgcgtccacgtcctcctcctcctcatcatcatcggcgtcgacggcggcgggcacgggcgcggacctcgacggcgtcggcgcgtcgccggacagctactgcgtctggacgcccgggtcgtcgccggcgtcctcgccctcgcggccgccgcggaagagcgggtccacgggctccatcgcgcggtggcgccgcatcggtgagctcgtcgtcggccgcagccgcagcgacggcaaggacaagttcctcttcctctcggcgccgccgtccccggccagggacagggagcacgcccccgcctccaaggccaaggccaagctgccgcccaaaggaagcaaagccgccgcaaccgagctagacacggtctccgcgggccgccggttgtcatatggcggcggcggcgccaaggcctccaccggcggccggcgcacgttcctgccgtaccggcaggacctcgtggggctgttcgccagcgtgcacgggctcagcaggagcccacacccgttgtgagccggtgagccacgaccacgacgcgccgtggaggacccgttccaaacagtgagacttcaggtttgaaatcgggatttgaaatttcagacatttgacttggagatctcctgcgagccgagtcaaaaagacaaggtgtgaagtcagagaaagcaggggaaatgtgagccttctttcaggattcggctcggaatcgtgctctgcagtcggtggctaaccacctgccatgcgatttgtgtaggcgggtacacatatactacgacaaattggacaagaagtttacatgtgattgttcgtatatgttggtatatatgtagctgtgtacatactgtacattgtatagtattgcaatttaggtatacaggagtaggtgtttgcgaggaattcagaattcctcgtttgcattctacagtttcgtttatctgcgtgttgtcgcatctctaatgtctaatctaactaattgcttttctgcctaaaaaaaaacaaaaaaaaaaanaaaa

SEQ ID NO: 2411 - DNA, 1863 bp, Zea mays
  Clone ID: ZEAMA-23APR03-CLUSTER3285_12
ggtaatggttgatggtatgacagcaatcatcttgttctaatgatggttatggtgccgtttcctcccgtcctgatcttggtcagggctaacgactgccttgccggacagacccaggccgtgagccgacacggcggggccgaacgcgaacggaccaacggggtgccgaactggtcttgccggtctcttgaggattctctggttgacgtcgtccagcgtcgtcatgcggccgtcgtctaaccccagcggcttgacgactgcaaaggggtacagcactccgacgcctctcctctcctcgtccttccctgacagtaacgagtggcaggcagaggcgggcgccgtcgtggcggccgcacccgcacccgcacgggaggagtgttcgcggtcgacgacggaccgcgggcgatcgtcgcgacgcgctgccgcgtgtgccgtccccgcggcagccttttgcagctgcaggggagcagcggctcgcacggtggcggggaagcgacgaggggggactacagcggacgcctttgcctccttctcatctccgcccttcgccgctgccgctggcgttggaagcagcacctgcgcgctggggccccgctgctgctcctccctgctcgatgcacctgccccgtcgcccccgcctgagacaaagctgcagcgtgtctccgtctccgcggccgccgtggtgttcaaatcatggcggaaatctgctcctccctcggcgtcgacgctagaatcccacaagccctgcaagccgggaacaacaacgcggacaagaggcggggacgctagaggttagaaaagaagaagggggacaaggccactgccgggccggccttctctgcatgcttatcgtttctcagcttcctctcgctttgtttggtgaatcgatatggcgatatggacagtgagatgggcttgcaaaatgaagaacagcacggcgactacacacacatatgttgcagtacgtgccgtgcgtatctgcatatattctacgtatatgattcaatttcaacatgaggagctagtagccggcggccggtatgcataccattgccatttgtataggatgtaacacagtaacactaaccgcaagaaggcactgagggtcctcgcagacggtcgccggacgccgagagggaggcgtcgtcgtcgccgccgccatcctctgccgcttgttgcgacggtcgctcactggagcgatggcgtcgtgctggtagccactggacgcctccgacgacgactgcacacctggcgtctccgggaagacggcggcagctccagcgccttcgagagtgtggaacagcagctccgaggcccagtcccagcaatccagcggaggcaacacccaacagtcgtcgtaagagcaggtatctagggccatggcgtgttgttgttgccgccggccaggtgagatggcttgtttgtcatctacatctactgggagaggcgtcgtgtcctctagccctcttaaaacgacacgcccaaaaccaccctcaccaataattctggactcatcaaatcctagtgtagctctctccatctcaaccaggttaaatgttttggcagatcctttatatgccaccaaacttgagctgaaggatggtgatgccgaaataggtctgctttctagcctgttcccaatcattgcagaaacaggacctgcatttccaatgcaatcattgaaggggggtgatacaaacagcatcatggttaatgattgaccaaatttaagtcttaaattttctcaaagatggtttgagtgctttaccaatgaagtataaaactaaatacccacccttacatgcaaacatagttttggacaaaaaaacaacattttttgctttctcctcgagccgaattcgagct

SEQ ID NO: 2412 - DNA, 2207 bp, Zea mays
  Clone ID: ZEAMA-23APR03-CLUSTER3285_4
gtgcaagtattttcctttacgtgtccgtactctaggcctccataatgcataaatattccctctctttttttttggttacaatacattcgactttgtaagggaatcctcaactactagtctttgacccctactctagttttcatggggtcgcagcattagctaacaaaaaactcaaagaatgtagagaaagataaaaccgaccttgccttcgtatgcaaggtaacttatataaactaaaaaaagtggtgattacctgtgcgccaatgaatcgcaggttaatagtcgttttgatcaccaatgaatcgctttgatcacaggttaatagtcgcaggagatactggctgatggtggtggtgactaactgaacttatctccagtatgattttcatatttgcccactgatcttttgaacttcaactggatgggtcatatctgagttgaagctgggcactgtggtatgctatacttgagaatcagaacaaacagagatgaaaccctcagcaagtcagatattctttgtttctccattgtctgtgtcacctgattcctctggcaggagacttagaagaggtaagggcagcagcgaactaagattgcagacgacaatcaatagaggtaggttcccaaaggtgtccctggtgaccccaaatatccgagttagaccagcaccaaccagaccaccagtaacacttccagcattagaaattgacatcaaagttgcaaataaagtggcttccattcctggagggcacagttttgcagctaacaccaagactggcataaatgaagcctgaccaaggactgtgatgattaatgaatcaccaatagaaaaccactcgtcactaatcccaaacttccgatttagcccagttacaagaagcacctgtgtcatcccaagagctgaacctataatggttgtcacgagaaatattttccttagaggaacttccttcagaaaatagttgtagagcccaacaccgagcagggatgcaaaggaggttacaagcttcacacgccctagaaactctggtgtgaatccaagcttatttgtgatgaagaaaaacatagcagaatctgactgtggtgttgcttgccaaagaaatataaacaaggtcggcaacaatatgttaggctgctttactgaagtccaaagctgcctgacgtgctgcttagaactctcaacgaatcctgaaccagagtgtaaggtagtacgttctccagaagatatgcgatgttcatttacaagaactgcaacagcagatgtcatcaggggtaaaaacgctgttacaccaaagacaaatcttactccataagtatccacaagcgaaccgctgaagtaagcactcacaattcctccaaaggcagaagatccccaacagagcgactggagtgatccagatgtgctttgagattctccacgggctctctcaacaaccatagaatccactacaacatctgagaaggcaacagaaagtgagccaagaagaatagaggatgctgcactgtatttactgctcactactgtggccattaaactccatgaaagtgctccaagtaaccctgacagaaaaaggtacgacctccttcgatatccaaagagtggaatggaatcactgataaagccatagaggggcttgatcaaccacggcaaggacgagaaaccagataccactgcggtctcagctggatctagatggagatcatcttttaagtaaaagctcacagcaagccgtgcaagacccagaaccccttgcacaaaatagacaatggcaactgccatattatcaggggacagatccacgccaaacgccgtgaagtatcttggcccgagcttgctcttgcgcacatcatctgtgctaggctgccgccactcagagtgtctactacttgaatcatcctttgtcaagcccacttgatacctaggcatggcattcccaccgggccagtggtcggaggacgaggcggcggcgtcacggctatcgagctcgagggggcggcggacggcggcctcctcgtcgtacgcgtcacgtgcggccgagcccccggaggccatcccgagctaccagaagcccgcggggcgcggcgcggtctccggtgagaccttgagcgtttgagacttgagaggacgcggaggtggagcctgcggagcacaccgggccggagctggaagcttttcgattaggatgttctaggtaatggtctcgtgc

SEQ ID NO: 2413 - DNA, 1943 bp, Zea mays
  Clone ID: ZEAMA-23APR03-CLUSTER32915_1
gcacgagaccattacctagaacatcctaatcaaaactctctctctctcattcatctcgcctttctttcttaccggccggccggccggcggctgggctctgcaattcacccaacttttctctgttttcactacgatctcagggctccggcgaccgtgcggcctcatcatcagctacaacctaccagctgctaccgtctcggtcgccgcctagctctccgcagcggctagctcatccggccggccgccccttttctcttgccgttgcgcagttgcgcccccttccccgcggcttaggaaccatcgaaaagacgcctcaccatctcctttgtgtccttgctaactaactcccccattaaatcctctccttcctcccgcgctggccgtgtggtctctcagccctccgagttgatccataagctagcgccatcatcgatcgccatatatacatagccaaggacgcacgcgcgcgcgcgcgcaaaccagcgggagcgaacaccaaccggccggaccaattaagaagcaggctagcaagtcgaagaggaaagaagagaaggggggtaccgggggtaccggccggtcatcgatcgagcttggcgaagcagcgaccgccgggtcgtcgtcgtcggtacatgcatgcagcgcggcggtgatcaagcaggagcgagcctgggcatggagatgggggtggggtacgccggcggcggcggcggcggcgagtgctcgtcgtcctcggcggctgccgcggccgcggccgcggcggagggggaggagcggcagctgctcaagggggagatcgcggtgcacccgctgtgcgagcagctagtggcggcgcacgtggggtgcctgcgcgtggccacgcccatcgaccacctccccctcatcgacgcccagctcgcgcagtccagcggcctcctccactcctacgccgcccaccaccgccccttcctctccccgcacgacaagcacgacctcgactcgttcctcgcgcagtacctgatgctgctgtgctcgttccgggagcagctgcagcagcacgtccgggtgcacgccgtggaggccgtcatggcgtgccgcgagatcgagcagtccctgcaggacctaaccggggcgacacttgaggaagggacgggggcgaccatgtcagaggacgaggacgaggcgccgatgctggaggtgggcctggatatgggctccgacgggcacgacatgatgggcttcggcccgctcatgcccaccgactcggagcgctcgctcatggagagggtcaggcaggagctcaagatggagctcaagcagggtttcaagtcgagaatagaggatgtgcgggaggagatcctgaggaaaaggagggccgggaagctgcctggggacaccaccagcatcctcaagcaatggtggcaggagcactccaagtggccataccccacggaagacgataaggctaagctcgtcgaagagaccggcctgcagctgaagcaaatcaacaactggttcatcaaccagaggaagaggaactggcacaacaactcccagacgtcaaccctcaaatcgaagcgtaaaaggtgatggaggagagctagctgcaccgtatataccgtgtatgtaacgcacacctgctgacacacatgtacacatgtataccataccaacacgctaatcaaacggagctctgcatggcgactgtactcacggaaataaagaggaccatatcgaccggttcaactgtatatctagccattagtctgaccactggcatatttgtttgctgcggctgatactttgagctgatgatgtgtggctcacagcatactttattcttgttcttattgtgtagacatagtttgtcccccataatattgaggattaaaaaaaaaaagaataaaccgaaagggagggcaacggtacccatgggcctatgggggaggggattacgcgcgctgact

SEQ ID NO: 2414 - DNA, 1650 bp, Zea mays
  Clone ID: ZEAMA-23APR03-CLUSTER32915_2
cccggcttaggaaccctcgaaaagacgcctcaccatctcctttgtgtccttgctaactaactccccattagatccggccttcttcctccccgtctccgtcctttgtgtccagttgcttcataagctacccatcgccaattcgccatatacgcacatacccaacgacgacgcacgcgcgtgcgcaaaccaccaaccggagcgagtaccaaccggccggcccgcccaacaagcaggcggctagccatcgacgaccgagcacatcgagctgcccccggccggtcatatatatatgcagggcggcggcggtgatcaagcaggagggagcctgggcatgggcatgggcgtggggtacgccggcggcggaggcgccgagtgctcgtcgtcctcggtggcggccgcggctgccgccgccgcggcggcggcggaggcggaggagcggcagctgctcaagggggagatcgcggtgcacccgctgtgcgagcagctggtggcggcgcacgtggggtgcctgcgcgtggccacgcccatcgaccacctccccctcatcgacgcccagctcgcgcagtccagcggcctcctccactcctacgccgcccaccacagccccttcctctccccgcacgacaagcacgacctcgactccttcctcgcgcagtacctgatgctgctgtgctcgttccgggagcagctgcagcagcacgtccgggtgcacgccgtggaggccgtcatggcatgccgcgagatcgagcagtccctgcaagacctaactggggtgacgctggaggaagggacgggagcgaccatgtcggaggaggacgaggacgaggcgccgatgctggaggtgggtctggtggacatgggctccgacgggcacgacatgatgggcttcggcccgctcctgcccaccgactccgagcgctcgctcatggatagggtccgacaggagcttaagatcgagctcaagcagggtttcaagtcaagaatagaggatgtgagggaggagattctgaggaaaaggagggccgggaagctgcctggggacaccaccagcatcctcaagcaatggtggcagcagcactccaagtggccataccccacggaggacgataaggcgaggctcgttgaagagaccggcctgcagctgaaacaaatcaacaactggttcatcaaccagaggaagaggaactggcacaacaactcccagacgtcaaccctcaaatcaaagcgtaaaaggtgatggagagctgcgccaccatgtactgcacacctgacacgtataccaattaccaacacgctaatcagacgacgtacggccatgcatggcgactcacaagaaataaagaggatcgatcgattcaactgtatatttctagtcattagtcagagaggtgacaggttcatgacacacacaaacacacgtacactagtctgaccactggcatatttgcttgctgtgattaatattttgagccgatcatttgctcggagcatactttattcttgttattattgtacagccatagtttgtcctcccagcgtacgtacataatctttgaggttgcattcatatatacagtgatctgatctgaccccaccccctgtgcacatatatacagtgacctgatctgaccatctcatctgctggcagga

SEQ ID NO: 2415 - DNA, 1617 bp, Zea mays
  Clone ID: ZEAMA-23APR03-CLUSTER32952_2
gttggtgacaccataaccactcctgttcgtcgtgcacccacgcgggcgaacagtgaaaggcatcgtctcgacgtctcgtgaccgctggactcgccgccgccccaggctagctcgatgattgggtgcgccaagccgctcgcggcgccgctgcaggcatgggctcgcccgccgtctcccgccggtcgccgcctccccccctcgttctgcgcccctgacacctccccagctctcacccgcgccgtcgagagcccaggccagtctcagtctgacgacgccccgccaccacgctcgggtgacgccgcctcgtccctggcgccgcgcgcgagctcgcatctcgaccgatggtcccggtcgcgggcgctgcggtcgggccaccggccggcgctgaaccgcgcggctctctcctcggcctcggtctcggcgccgccggtgatcaagtcgccgcggcccgaggacgctgccgtggcggtggaggatggcgaggacgacgacgtgtgcgaggccgagagggacgccgcggccgggaaggccatctacatagtgtcagacgggaccgggtggaccgcggagcactcggtgaacgccgcgctcggacagttcgagaactgcctcgccgaccgcggctgcgctgtcaacacccacctcttctccttgattgacgacatggatcgacttattgaggtaataaagcaagcagcaaaggaaggggcactggttctctacacccttgccgatccttcaatggccgaggcgactaagaaggcctgcgatttctggggtgttccatgcaccgatgttcttcggcctactgtcgaagccattgcctctcacatcggtgttgctccatctggaattccacgaagctctccgagtcgaaatggtcggctatcagaggattacttccaacggatcgatgctatcgatttcaccatcaaacaagacgacggggctctgccacagaacctctaccgcgcagacatcgtgcttgccggcgtttcgcgtacagggaagacgccactgtcgatatacctagctcaaaagggatacaaggtggcaaatgtcccaatcgtgatgggagtggaccttccaaagtccctttttgagatcaaccaggacaaggtttttggactgacaataaacccagcgatccttcaggcgattagaaagaccagggccaagactctaggttttgatgggcgtcagagcaattacgctgagatggaccatgtgaggcaggagctggtccatgcgaatcaaatctttgctcagaatccatcgtggccagtcattgcggtcactggaaaagctatcgaggaaacagctgctgtcatcttggggatcctccatgacaggaagcagaagtgctccatgccacgcatatcaaaacgatactagtactgtgttctatcccttctctactacaccttgtaatctgtgcatgttttgaataagctttgtgtcaagcaccatagccttcatgtaatttttttttgttggaccaccttctaggtggtgccgtttgtatcataaacataacttgaagtttagtgcaacagaaacacatgtatattgcgtttacgaccttctattggccttaatgccgcacgttatttggtc

SEQ ID NO: 2416 - DNA, 767 bp, Zea mays
  unsure (1)..(767): unsure at all n locations
  Clone ID: ZEAMA-23APR03-CLUSTER32966_6
agtttctccaccaaaaaaaagtgcggcaatgtagtagagccagaggaggaggagcagggggaggacgaggctagggttgctcggcgatggcgtcggcggcgaagacccttgcacgggttggatcatccctcttcggccgcattctcgcgtctccgtcctcgtccataccccgcgccgggctgccgctagccaggctgcagccacacgtcccgccgccggcaccggnggggttggacgcttacgaggcggagaccgtcgccaggctgagctcgctccccggcgagatatccttcccttgcggcctcccctcgctccgcttcttcatcgacgacgcaaatcgaccaagggtgggcgcaaggtgattgcccggagaatcgccaaaggcaggcacagaatctcagtttagctagatccggctcgtagcagccctggatgttttctgtaacacagattcgtatcgtgttctttgtgtgaacgacatatttttaagctttttaaagtttttgcataccaccctgctgaagcatgaagctgagcccccgcgcaagcagctgaaacaaactcttgctgcgaaataaacaagtcaaaggaactggtggaaaattgccgcgccgaatgagttcatttgtagcagctgcgtcccgcatttgtgtttgtttgtgctggaattgccacgtatcagagatgcgtgcgtggtacgcctgagtttgagtgtggtagcagtggcacttgggtcctagtggaaccccccccagagattttattct

SEQ ID NO: 2417 - DNA, 1326 bp, Zea mays
  unsure (1)..(1326): unsure at all n locations
  Clone ID: ZEAMA-23APR03-CLUSTER3303_2
gcacgagaccattacctagaacatcctaatcgaaaaattgttaactgtatatttagatttttatataattcttatagttgtgtcttgacatgaagaaatatcatgttatcttttagaatgttttgttctaaattagagaacagtgtaatcttttagtacagtgtgcggagtggtgacaatctctggtttaagtacacaagtaaatgtgatacaagtgcataatttgttaattctgtttcattaacgatccttttgggccgcctttttgtatgctcttcagtttaggctcttgataataaaattttcagtgacanctgacatagtaatatgtcagctgacaattttattagcaagagccagacaggaagaggaagaaggcggccaagaagacgtgctacgagagcagcgacgccccgccgtcgtcggaccagcaagagaagcggtgcgcccactgcctgtcctccaagaccccgcagtggagggcggagcctctggggcccaagaccctgtgcaacgcctgcggcgtcaggttcaagtccggcaggctgctgcccgagtaccggcccgccaacagccccaccttcgtgagctgcttgcactccaactcccacaagaaggtcatgcagatgcggcaggccgtcgcgcagcagcagtgaggccgcgatggccggccggccggccgagaacgtctcccgaaatctatcgttggaagcgcgttaggggatctcttagaccgtagcttagtcgatgctcagagaggatgagaacagagactttggttatagtagtagtaggcaatcgtcgttagctctagcggtgttctagctcagactgatttgctcggtgtttttagacgtcggattcaatacaatctcgatgttgtcctgaatttgtgctatgggttttcggtcagtggagggcggggcctttggggcccaagaccctgtgcaacgcctgcggcgtcaggttcaagtccggcaggctgctgcccgagtaccggcccgccaacaacgcccccctttgtgagctgcttgccctccaactcccccaaaaaggtcatgcagattcggcaggccgtcgcgcagcaacagtgaggccccgatggccggccggccggccgagaacgtttcccgaaatctatcgttggaagcgcgttagggggttttttagaccgtagcttagtcgatgctcagagaggatgagaaccgagcctttggttatagtagtagtaggccatcgtcgttagctctagcggtgttttagctcagactgatttgctcggtgtttttagacgtcggattcaataccttctcgatgttgttcctg

SEQ ID NO: 2418 - DNA, 1311 bp, Zea mays
  unsure (1)..(1311): unsure at all n locations
  Clone ID: ZEAMA-23APR03-CLUSTER3308_1
ttgctgggtagctccattcccggctcaaacaggggggccttttcccattcccgttgggggcgtcattcagatcctgccatctagggggtcccgtagggaggggtgatcggtgatgactgggggaacagaccaagcccgccctcgctnctacggcttcgaacgagagggtcggggaggggaaagggctcggaggatacgtcaagtccctgactgacgaacagatggaggtgctccgcaagcagatctccatntacgccaccatctgcgagcagctgntcgagatgcatagagtcctcaccgagcaccaggacatcatgcagggatgagcgtgtagcaatctgtactgtgaccctctaatcatccccggcggtcacaagatcacggcaaggcagcggtggcaaccaacaccgatgcagctgcagatcctggagagcatcttcgaccagggcaacgggacaccgagcaagcagaagataaaggagataacagcggagctctcgcagcacggccagatctcggagacgaacgtgtacaactggttccagaacaggcgggcacggtcgaagcggaagcaggccgctgcttccttaccgaacaacgccgaatccgaagccgaggcggacgaggagcctctcgccgacaagaagccgaagtcagacaggccgccgccgccgccgccgccgatccaggataataccaaggctacgggcgctctcagcgccgacagggtctctggtgggacgcgtcacttggacacgggtcatgaccagaccagtggcgtgatgtatgggtgcaacgacagtggcttgttgagatcgtccggcagttcgggccagatgtccttgtacgagaacttcatgtcgaatccaagaatcgatcgtttcccggcgaaggtggagagctcccggagcttcccccatctccaacaacacggggaaggctttggcatgtttggatgacatgcatgctgctgcgctgagttgccgtgtgaaaaatggaggtcgacacagcgtgcgttcgatttgctgacgtgaaagttttatcttggatggtacgtgttgcttatcacggtctggttgaccacctccgcggatggtagctagctagcttgaacgaacctgctcttttggagtagctgtaagaggttgatatatagtagtatttgcacgtagtctaattactctaaattatcagcatataattcttcatgtttgcagatttagcacgagaccagtcctacgctgctgctgctgagcagcaggttgtggttaaaaaaaaaaaaaaaaaannnnnnnnnnnggggnnnnnnnn

SEQ ID NO: 2419 - DNA, 1542 bp, Zea mays
  Clone ID: ZEAMA-23APR03-CLUSTER33157_2
aaaaacagtgcactgactgagtgagtgtcatccagtgcaagctcccagtcccagtcccagtcccagtcccagggtagtagaggactagaggcaggctagagcaaagcacgcggattgcgtggctagcgcaacaatggcgatggccacggccaagctcgtccttctcatggtcctcgtggccggcagctccagcggcggcagcgcgtgggggccgctgatgagccgcctccggatgccgacggcgcgggtcgccccgtcgaggtggcgaaggagcgcctccaggaggactacgtcgtatcggcggctgcgccgctgatccacgcgctgcggccgctgctgggctccgcgggggacctgggccggcgcgccggcgtgccgtgcgacagctggcgcctggccgtggagacgtacaacaagcgcgattggacgacggtgccggccagctgcgagcgctacgtcggccactacatgctcggcggccactaccgccgggactcccgcgtcgtcatcgacgaggccatcgcctacgccgagggcctcaagctgggcggcaacggcaaggaggtctgggtcttcgatatcgacgagacgtccctctccaatctcccctactatgccacccacggcttcggcactaagctatacaacgcgacgagcttcaacgagtacgtgctggaggggagcgcgccggtgctcccggagacgcagcggctgttcaagaagctcgtctcgctgggcatcaagccggtgttcctgacgggccgcaccgaggaccagagggccatcaccgtcaccaacctccgccgccaggggtactccggctggatgacgctgctgctcaagcccgtcggcctcaaggccaccgccatcgcctacaagtccggcgagcgccagaagctccaggacgccgggtacgtcatcgtcggcaacatcggcgaccagtggagcgacatcctcggcgcgccggagggcgcgcgcaccttcaagctgcctgaccccctctactacattggctaagcagcgatgccaacggcgcggcgcggctctccatcagcccatccatcaacccgtcacccggctccagtgcctgtgctcaactactctttgtttgttacccctcacttcttatcatcattaattcctaaggttaattccctgagctgagtggaaataaggccgactcggtggagagctgtcgacttctcaataaataattgctcatgaaaaccacgatggtttatgttattcaaagtcttatatatatataatggattagtaccgggaaaaaaaaaaaaaaaaaacctcaaaaaaaaaaaaaaaaaaaaaaaaaaaaaaaaaaaaaaaaaaaaaaaaaaaaaaaaaacaaaaaaaaaaaaaaaaaaaaaaaaaaaaaaaaaaaagggggggcccgttttagaaggacccaactttccttccccttgtttgccaactttaattttttttttggggccccctaaatcaaatccactgcccgttctttacacaccttcgttcttggaaaaacccttcctttccccattt

SEQ ID NO: 2420 - DNA, 1581 bp, Zea mays
  Clone ID: ZEAMA-23APR03-CLUSTER33206_3
atcaaatcacacacccatcagatcacaaaggcaaagaggagagagagagagagagggatgatgaggacgacgatgagagagatatactactaaactatctatccatcaatcaatcaggtagcccggcagcaatcgcgtgccgcctttcctctcacgtacaccaccacacctcccaggctcagctcgattcgttcgttgccgcgtcaaatcgggacaagaagccagccggccctgttgcagtgttgcttcgcctgccctgctgctgttgcttgcgccacgcacgtacctgaagaaagcagcgacggattgatcgaccggtggttcgctgtcgccacggccggcatgtcgtcctcgtcctcgtcctcgtcgtcctccgccgcctccgccgccacggtgttcccgcggtccccgcagctgccgcctccggtcctggtggagaacggcctcacgccgctgcatcagcttacgccggtagccgcggccgcgccggccgccgagcagctctgctacgtgcactgctacttctgcgacaccgtcctcgtcgtgagcgtgcctacgagcagcttgttcaagacggtgacggtacgatgcggccactgcagcagcttgctcaccgtcgacatgaggggcctcctcttcccgggcacgccgacggacacggtcgcgggggccgcaccaccaccagctgctgacactagtacgactaccaccaccatcaccacggcgccgccgccggccaactcggtcaacaacgggcagttccacctcccccactcgctcaaccaccctcaccaccaatccctcctggtggtacgcgcgtggttcaaagctgccggtggagctagctagctcgctctgatctgatgtcatatatcgcatgcctaatctcttgtttccgcgcgcgcgcgtgcatgcaggacgagatatccagcgccgcgaacccgagcctgcagttgcagatggagcagcacggcggcctcggcggcctgatactcggcggcagcaggaacacggccgcgccgcctccgccgcagccgcctgcagcgggtaaaggggccaaagagccgtcgccgcgcactaatcccgccgtcaacagacctccggagaagaggcagcgcgtgccgtcggcctacaaccgcttcatcaaggacgaaatccaacgcatcaaggctggcaatcccaacatctcgcacagggaggccttcagcgcggcggccaagaactgggcgcactttccacatatccactttggactcatgccggatcaccaggggctcaagacgacaagcctgctacctcagggtcaccagagaaaggacgggcttcttaaggaagggctctacgcggcagcggcggcggccgcagctcatgcggcagccaacatggggattgctccatactaatttacaattactcctactcaagcttgctactgatggtaccttgcttccgagaatctccctgatctttacattagcttgttaaacgttccaaatcacgtacgcatctgctgtgtaaacctgttccttcgatcgagctggtctctagtatatataatctactacgtttttgcgttggtta

SEQ ID NO: 2421 - DNA, 1711 bp, Zea mays
  Clone ID: ZEAMA-23APR03-CLUSTER33219_1
attttgctgtagctttctggcatcgctactaccagacagagaggacaggggaggtcagagtcagagacgctcgctcacgacggcagcagccatggcagcaccgtgcggcggccgcgtggtggtcttcccgttcccgttccagggccacttcaacccggtgatgcgcctggcccgcgcgctgcacgcgcggggcgtcgggatcaccgtgttccacaccgccggcgcgcgggcgccggacccggccgactaccccgccgactaccgcttcgtgcccgtgcccgtggaggtggccccggagctgatggcgtccgaggacatcgccgccatcgtcacggcgctcaacgccgcctgcgaggcgcccttccgggaccgcctctcggcgctgctctccgccgccgacggcgaggcgggggaggcggggggccgcgtccgctgcgtcctcaccgacgtcagctgggacgccgtgctgtcggcggcccgcggcctcggcgtgcccgcgctcggcgtcatgacggccagcgccgccacgttccgcgtctacatggcgtaccgcaccttggtcgacaagggatacctgccggtgagagaggagcgcaaggacgacgcggtcgccgagctacccccgtaccgcgtgaaggacctgctgcggcacgagacgtgcgacctggaggagttcgcggacctgctgggccgcgtggtcgcggcggcgcggctgtcctcggggctcatcttccacacgttccccttcatcgaggccggcacgctgggcgagatccgggacgacatgtcggtgccggtgtacgccgtggcgccgctcaacaagctggtgccggcggccacggccagcctgcacggcgaggtgcaggcggaccggggctgcctgcgctggctggacgcgcagcgggcgcgctccgtgctgtacgtgagcttcgggagcatggcggccatggacccgcacgagttcgtggagctggcgtgggggctggccgacgccggccgccccttcgtgtgggtggtccggcccaacctcatccgcggcttcgagtcgggcgcgctgcccgacggcgtggaggaccgggtgcgcggccgcggcgtcgtcgtcagctgggcgccgcaggaggaggtgctcgcgcacccggccgtgggcggcttcttcacccactgcggctggaactccaccgtggaggccgtgtcggagggcgtgcccatgatctgccacccgcgccacggggaccagtacggcaacgcgaggtacgtgtgccacgtctggaaggtgggcacggaggtcgccggggaccagctggagagaggggagatcaaggccgccatcgacaggctcatgggcggcagcgaggaaggggagggcatcaggaagaggatgaacgagctcaagatcgctgcggacaagggcatcgatgaatctgctgggtcggatttaactaatttggttcatctcataaactcctactgatcgatccttgtattgggtaccatgttccggatgatgagttggaataaatcaaaacttgtgttccagtcgatctacgcttctcatcattcatcatcatcaatggacaacaaaacctacagctacagggtttagaacattaacagacttgcaaaaaaaaaaaaaaaaaaaaaaaaaaaaaaaaaaaaaaaaactagggcccgccataccacgttgcgcgcaacgcttccgcccacgcttccg

SEQ ID NO: 2422 - DNA, 2064 bp, Zea mays
  unsure (1)..(2064): unsure at all n locations
  Clone ID: ZEAMA-23APR03-CLUSTER332207_1
ttttttttttttttttgcagtctgaagaaagtaatcaaatacatggaatgtttggtccacatgaagtaacgctgccccataaagtaatcaaatacatggaatgtttggtccacgtgaagtaacgctgccccagaagtttagggtggagttacctccagttcactgtatttcaaactcaaatgtaccaaataatttctacacaatctctgatgttcaagcacaactggatccaacgctcaagtatgaaaacaccttatcaatcaatatcttttcatccttctctgatgaatatcgtanaacagattgctaacaaaaatgatccttgtgactcatgagttaaatatgatacacatggtacctcaattgtcagctcttcttcaatcaggtagaattagaatgtaatgtctttagcacagagagattgaagagaagcaaccgaaggaacttattagcatttttctctcgatatcttcagcttgagaagttgggtcatgatgggctgngttgatcttgagggactggtagaatgcagttgcaaatagcacctgaataatatcagcatatcaagcaagtccccatgatgcttccttcactgtagggaaacaatggcactatcccaaagtatgagtacatgtttggctcatccagaaacaatggcactatcccgaaacaatggcactatcccaaagtctgcccttatgatctccatataacaaggaaagaaaacaaatgttgtcatgaagagaaaaaaaatttctggttacctcctgtttctagatatcatttctctttaaggttttgtttcaagatgaaatattatatagagatcgctaagatatctgaaataccatgaggaaatggtagcaatttagtagcagagaagtgactatttaagcagtcagaagaataggaagagcaagaacacaatttttatttcctgagcaaagttgcaaagttaagagtggaacagagcacttattacacatacacatgcaaaatcttatcaagttctctcacagtatcccttctttcagatttaatcatgaggctggaattatgttcgagcttgatcgttatgcggttccagaaaatatgaaaatataacagtgtgcatttctcttttatctgagctttcaggtttacccgatgacataaatggctccctgtaactgctgttgcacaattctcaaatccttcataaaaaagcaaaatggaagcaggttccctaatgcaagccatgatgagctacttctttgatggcacaaaaaattcttgactgaaccaactcaaatgaagagcactctcatgaggagaatataagcctttgagggagacgatgcagctgactgctacctcaagaaattccacaaccacctgttctatccgatccataattcccttcaggtaaatccttcaatctggaagaagatcagaaagcagaaattagagcagctcgtcgtcccaagtagcacaaactggagcgctggccaggaagaacgtcccggcaatggcgaggagcagcggcgcccacaaatatgcgacgtgcggtggtgcgcctgggcctgggcaacgcggtccagattggggaaggggtctatggagaggacggtggcgatggggagcgcagtgtaggggacaccgctgacgaggccgtaggggcgcgtggaggagcgaggcgacggcggagagcaggtgtccatcctcccacctcacctgagctccagcggcactgcaacactacctcttccatgctcccaccaaactcgagctcgtcgatccgggagaagaacgacacagcagcagggaaagggcataggagagtggaggcgaggcggagagcacgacatgtcgcgtggggtgtgagagtggaggtggaagggtggatggacgagcatcacgcgaccagagctccatcttcgtgcacgcaggccaggtggcggcgcgcgtgggggcgggagtcacggcgcgccgagggagggggggtgcctggcgcgagcgtgattcgcgggcgaaggaagacgcgcgcgggggccaaaatcacgnccgggggcacggtgcggtggt

SEQ ID NO: 2423 - DNA, 1032 bp, Zea mays
  Clone ID: ZEAMA-23APR03-CLUSTER33283_4
cgcaattaaccctcactaaagggaacaaaagctggagctccaccgcggtggcggccgctctagaactagtggatcccccgggctgcaggaattcgcacgagaccattacctagaacatcctaatcgaaaatcttcctcccttcttacagccgccgccgccgcatcccagcctccatcaccgtttccgtctcgttgccatgggtaaggtgcacggatcgttggcgcgcgccgggaaggtccgcgggcagacccccaaggtggcgaagcaggacaagaagaagaagccccgcggccgcgcgcacaagaggatgcagtacaaccgccgcttcgtcaccgccgtcgtcggcttcggcaagaagcgcgggcccaactcctccgagaagtaggcgccgctcggctcgtaccggttcctcatccttcctgctctccgtatgcttatgctcttgatggtactagtttcgttgttcgcaagcagaggaagaaccttctgtagattcggttttgttgtccatgtgctcagatgggaacttgagattgtatgagaggttgagaaaagagagggaggaaaagagagcgcagcgtgatcggctttttattatgcttaaaaaaaaaaaaaaagggcggccgccatggtggtggtcacggtggccgaggacgtggacggcaccgacgacagcaggtcgaacgactcccagccctgcgtgggcggcgctggcgccggggagggctgctggaagttccgcctctgcgacacgggcggcgggcgcggcgggagttgcggcgcgcgggccttggcgtgcccattcatgtcgccgttggccttggccttggccttgggcgccgccgcgttcttggcgcggatagcgtccagcgtctccacgtacttctgcacccgcttctcctgcgcaatcatcgcatcggttgggttgggctgggcgggcggttgagctctcgagcgcgcgcgaattcgtccccaagaagcggcaaggaattaaggctaccgcgtacgcactgacctgcatcggtcgctgc

SEQ ID NO: 2424 - DNA, 1557 bp, Zea mays
  Clone ID: ZEAMA-23APR03-CLUSTER3329_3
atccgaccccttgaatccgcttgccctcctgcttgatcccgccgccaccatctcaaccgcccactccttcctctccctatagggttccctgccgctcctgcgaatcgagcaatcggagacccccgggccgccctccaatgcgagttcctctccttccccctactcaactttccccttttcggctcgattcactacaatctcatgggaattttgccgcaccgccctctcccttcctctccaatgttgttaataatattggacccgtgcgtgcgtgcgtgtatccccgtaggccgtagcagagcacaatccggtggtatttaggactgatatagatttctgccgatagatttaaagttggatggttgatttgttagaatcgggcaaggacgaccatgagcgacgatggcgaccgaacctgcccgctctgtgccgaggagatggacactactgaccagcagctcaagccatgcaaatgcggctatgatatttgtgtttggtgctggcaccacatcatagacatggctgagaaggaggaaacagtgggccgctgccctgcatgccgcacatgctatgacaaggacaggatcgtcaagatggctgccacttgtgacaggacggtggcagataaaaatgtagagaagaagcacaagacccaaaaggttaagccaaaggcagcacccacagcagcagcaacatcaaccgtagaatcaaagaagcatctggctagtgtcagggttatccagagaaatctggtgtatataattgggctacctgcacatttatgcaacgagagtgtgagttcacatccagatttgatcaagtcgtgtgatgtgttcattgttttcaagtcgggcgacttgctggtcgttctggctgaccgacttgggtgattaatcgcgattaatcacgattaatcagacaacttgggggactaatcgcgattggtccaaaccgacttggacgattaattgcgactaatcgtgattattcggagacttgaaaacagtggatgtgtttttaaattttacttctcacaccaactctactgttattacttgtttaggtgcttgagtgtagggagtactttggtcaatatgggaaagttttgaaggtttcagtttcccgtccgactgggcctccctctcagcaggcatcagcaaacagcagtattagtgtgagatatacgtggagcgtcagaattatatgtgcatctacaagaacagttacaacaattctccatcaggttgatgttcatacatctcagatataaatgtgggggagacggtgcctcatcaatgatgagtaggttgattctcatctagcggcaccattgctcactacaactggtttgcttgagcaacttaatgtcactctcaagaggaccctcctttcgaccgacaccctgaagcaccacacaagctttagaaagtcggaattgtacttcgtatacataaattacatgatattatatgttcatgtaattctatgttgattctttagaaataatatatatgatattgtaatgtgtgttcgacatcaatttattttatttgagtt

SEQ ID NO: 2425 - DNA, 1491 bp, Zea mays
  unsure (1)..(1491): unsure at all n locations
  Clone ID: ZEAMA-23APR03-CLUSTER33329_1
ngtttttcgccccttgggggggaggaggcccccctttttttttgtggggggcgttgtttcacccgtggcgggcgcccccccccgcccccttctgtgcgggcgcctcggctgctgagttatagcagggggaccgtgcccgggtggctcgcgctctcccgggtgttgaattccaccggagggcggcggtcccagccacaggtctggggccgcgctctccgtacccatcccgtcaacatgggcgggtgagaaattttcctccttgcgccacatttgaggcgcgggcgccgctactgtggcgcgggagcaggcccggctccggccggggccggccccttttttcccgttatttttaccgcccacacctccggccgaaaaaagagggggagagccttccccctagccggctcgaatccggcggccggccccccccaccctcggacgccgccctcccgcagccggccgcacgcgacaaccgccaagcatccctccatcaaggaaggcccgctgctctgctgctgctgtggaggcggcggctgcgcctacggcggcgcgtagccctgctgttggtattcctttttattttgacaaagaataaggtgataaattaaaaggcgtgacgtgtgcagttcaaaaatcgcaacaaaacgtgctcctcggcaacagagtaatagcaaagaaaccgatcccaagtgggcacaataaatcccaggattgaattccaccagaaacacggaacatccacaggcagaatacacacacaccgtctgatcccgtcaacattgacagagagaaataaaaaactagggcgacatattatgctctgacaaagctagaatagcacgatagcattccaggctcaatccagttccagctctctctctctctccctcgcatagaaagctagtagtttcacttgtcgccgtgtcgaatccgtcggtcggcccctctcactctcagaagcaggcgtccaggaggcagcagcagcagagggcagccaagcatccctccatgaaggaaggcccgctgctctgctgctgctgtggaggcggcggctgcgcgtactgcggcgggtagccctgcggagggtagccctgcgccggcggggggtagccggccggcgggtaccccgctggcgggtagccgtccttgcccgggtagccttgctgcggcgggacgccgacggggggctgctgcccgtagtagctcatctccctcttcttccttgcgatcggatgcgcggagagggttaggggagctttcgctgcttcgggttgtgggggtgttgggggcgtgacgggaatacggatggacggtggacgggtctgtcaggtcaggtggttttatggaattttcgatgtgtgtttgatgtttcctggtgttttccggctggtcctccggcgaaccgcgtcgtcaacgtggtgctggcgggcatgcctggtcccttaagacaaaagaactcgagcaaccaggcctgggtcgaggtacccaatg

SEQ ID NO: 2426 - DNA, 1107 bp, Zea mays
  Clone ID: ZEAMA-23APR03-CLUSTER3332_3
gacgacggcgacgcttcagttgagtgcgggtgtagtgctcctgcgacttcggcctgtccactttttagggggcgccgaggggcgtgggggtacggccgtccgcacaataatctgcgctgcgcggaagaagggaaggggaaaagcagttaagcttgagcgcgcgcgacagggtcaagtcgagggccggggaatcgccggagaatggaggtgggcagggctccgcgacgacgggtgtccccagcagcggcggcggcggctgtgccttcgctgcttctgttcgccgttctattcgcgggccgggcggcggcgttcggccacctgcaagccgccggcgccggcgcgacggcgctgtacaagcacgcgtcgttcttcgaccgcgacggcgacggcgtcgtctccttctcggagacgtacggcgcgtttcgggcactcgggtttggattcggcctgtccagcgtcagcgctgcgctcatcaacggcgctcttggtagcaagtgcagacctcaaaatgcaacgtcatcgaagttggatatctacatagaggacatccagaaagggaaacatggaagcgattcagggtcatacgacgccgaaggaaggtttgttcctgacaagttcgaagagatattcgccaagcacgccaagactgtcccagacgccctgacgtcggacgagatcgaccagctgctccaggcgaacagagagcccggggactacagcggatgggctggcgcagaagcggagtggaagaccctctacagcctcggcaaggacaaggacggcctcctccgcaaggacgtcgcgagaagcgtctacgacgggacactgttccacatgctcgcgcccaactggaaatctcccgacgaggaggaggaacaggaactaagcgtgatccgggagagctgaaccgagaggtacaagcaaagtctggttgagagataaggactctgggaccctctgaacatgctgtcaagcaacatgtactactagctaagtttttacaatatatattcttattgtgtaattaaactttaaatgggttaatttcacaattaaaatcattgaaagggaaatagttttaaaactatttcttatattttggtgctc

SEQ ID NO: 2427 - DNA, 1393 bp, Zea mays
  unsure (1)..(1393): unsure at all n locations
  Clone ID: ZEAMA-23APR03-CLUSTER33413_2
acacatcattgagcgcaacgcggtcgtgattgcgagtgaatccgtggcgtccaactcccaagcccctaccggcaaccctagcgaggcgatggggaaggcggaggcgaggtcaagggggcgcggcggcggcggcggcggcggcggaggaggaggaggcggaggcgccagcggcaatccggggaagatcttcgtcggagggctcccgcgggacaccacggatgctacatttgtgaggcattttggacagtatggagaaatagttgattcggtgataatgaaggataggcacacatctcagccacggggttttggcttcattacatactccgaccctgctgttgttgataaagtgatagaggacaatcatgttatcaatggaaagcaagttgaaattaagagaaccataccaaaaggttcggtgcaatctagctctaaggatttcaagactaaaaagatatttgttggtgggcttccgtcaacactaacagaagacgaattcaagagtttctttgcaanatatgggactgtggtggaccaccagattatgtttgatcatgaaaccaaacgttcccgaggctttggatttatagtttttgcttctgagcaagttgtagatgatttgttagcaaatggaaatatggttgaccttgctggttcaaaggtgagtctgaagttcattatagaaatgacaccaatggttgtctcctccattgtggatctatggtgtaaaatatgtaaagtagtgttttgcattcttctattccaagtccgcctatggtggggcatatgatcctacgctaggtggttatggatctgctagcacacctgacatgaataggggaagcttcactggaggatatggacgatatcacccatatggataacaagaagagcccttgaaggcttaacacttgcatgcacgtttgctgcccgtcattggagaacacccaccatttctggacaatatccagctgcctgaagcttcaagaacaacttaatgtcatgtgtacatgttttctcgttcccgtgagctttaacttatatatcctatagcatgtagtgtgatccagagtagacgttgtatcgaaggttattgtgtttggcataatatagaattctggtatactttgtagtagtttttaagcttctatgtaagcatactccatctgggagcagattagctgtgtgaacgctaggagggccagtctctactctctaccacttagcattgtacctgattaagttattcacacttttggtttacccattgagagcattgtccgtgatgtcctccttggttcacctagtattagctgtcattagctggggttgaggagattatgagataaatgacatttgtgctctagcttaagtttatcttcattagctggtc

SEQ ID NO: 2428 - DNA, 694 bp, Zea mays
  Clone ID: ZEAMA-23APR03-CLUSTER33436_2
atattccctgaatgctccagcgttgacgccttgacggtgggaacccctattcttagcaggcaggtgtgtaagacatcttcagcataccatctggtccgtccctggaaatgtccggcgtccaggagcagttcgagatcaagttccggctgccggacggcatcgacatcgggccccaggcgcttcccgccggcgtccaccgtcgctacgctcaaggagaccatcatcgcccagtggcccaaagataaggagaaaggtcctaggactgtgaacgatcttaagcttattaacgctgggaagatactggagaacaacaaaaccctgtcagaatgcaaaagtccgatctgtgacttctctgggatgacaacgatgcatgtcgtcgtccgcgcaccgacttcaagcaaacagtctggtaaaagagcagcaacgaaagcgaaaggtttcaggtgcggttgtgccattatgtgacagagaatgccagttttctccctttttccgctcttgctggagtgttgtatcatgtttgaggcgctttctccttttatttccttttcaagtattgtgggtaagcttatgtatacaatcactcattttggtgcatgcgtgcaatcaaactatccagagcatccaatctagatccaacggtttcatatgttagttgttaaaattaaaatttgcttttatattttttctttta

SEQ ID NO: 2429 - DNA, 1244 bp, Zea mays
  Clone ID: ZEAMA-23APR03-CLUSTER3343_26
ttttttttttttttttgccacataaataatcttgtatacactcaaaagttgtgatatgaataaaccaaacagccaaaaggacatgaccgtctctcgatcgatcctgtctctctctctctctctctctctctctgtctcacacgtcacacacacatacatggacgacgtcgtacatacatgctaccatgcacatgcaagcgtacgtgcacacacggagagattttatttagtagtacatagcagtagacaagtagccatcgatcatcacgcgtagattgatagatatcatcatgacgacgatcgatgatccggccggcggcgacggcggaatggttggtcgatcgatcaggcggccgtcgtcgcgcgtggtctaggttttagttcaccctggagcagtcggtggaggtgctgatggtgtaggggatgctgacgccgcacttggaggggatgcttgcgacagttacgacgcccatgcagaacctagttcccaacattattatacaaccaaaactaagtgcactatccaatagctccataatgatttggtcaaactcccctaacaaaagaaaaatgaaactaactataaactataacgcacagatgaagaatctagcccgtgctggtcagctgcaaatgctgctacacataacacatcctcctagaaatcaaaatcgtcatcaatgccattgtaggcttccgcgccaccatcgccgcagcccccatagccgtaaccaccatcatcgaccgtctcgccatcagcgttgtccggcccaaacagtgcgtcgaactccatctcttctttcctactcgcgctctcaacttcatctttagtcttgtataattcgccaacagctccctcattgatcttggaaccaagtcccttccgtttcagcatgttgtatgtggcttctgccggtgtgtcagcaggcgtcgagctcttggtgtcttcgttacgtttccgttttttctttccctcttccacaacaatccctctagctgccaattcagctgccaaagcttccttggctgcttgttcctcaaggtactctttgttcattttcctcccagataatcttttttatattgtgtttcttcctcattgtgaaggtaccaatcaacctctacatcgtcgatgtcagaaaggctttctggatcagcattgccttcacaattttcacctccctcttcaggatccttcggtggcacagagtcatttatggtcgtgccggtcgtgccggtcgtgc

SEQ ID NO: 2430 - DNA, 1758 bp, Zea mays
  Clone ID: ZEAMA-23APR03-CLUSTER334_4
gcacgagaccattacctagaacatcctaatcgaaaaagaaaatacgcacctgctcctcactcttctttatatttttttctccatttggcaacttttgcttgtcgttcatgtatatgcatgaccctttcacacatatgatcagaagataagcacatgcaagacgatctcgcgtggatatgatgcatggatcagacctaacctctatatcatcaccaaacgctcgtagatgatgctatacaattccatgattaaattatatataagtaaaaaaaaaagaaccgtacgtgcatacataaaattaagaattaatggctgccaatggacgacatatgcatggacaggtaagctggtgatcccactgaaccgggaggcgcccaacttccggtccatgatcgggatgatcgacgggaggacggagctgaagccgctgccagccagcggcggcccagaggaccggcggctgcaggtggtgggcgtctccgccgccgccggatccggcggcgatgactactacttggacgtggagagcggcagcgcggcggtgccgctggtgcagcagcagtacgtgaacgggcggctcgtccgcctccgcaccttctccgtgttcgaggtgagcatgatggccgccaagatcgcctacgagaacgccgcctacatcgagaacgtcgtcaacaacgtctggaagttccacttcgtggggttctacaactgctggaacaagttcgtgggcgaccacacgacgcaggcgttcgtgttcaccgacaaggcagaggacgcgagcgtggtggtggtgtcgttccggggcacggagcccttcaacatgcgggactggtccacggacgtaaacctgtcgtggctgggcatgggcgagctgggccacgtccacgtcggcttcctcaaggcgctgggcctgcaggaggaggacggcaaggacgccacgcgggcgttccccaaggccgcccccaacgccgtcccgggcaagccgctggcctactacgcgctgcgcgaggaggtccagaagcagctgcagaagcacccgaacgccaacgtcgtggtcaccggccacagcctcggcgccgcgctggcgaccatcttcccggcgctgctggcgttccacggggagcggggcgtcctggaccgcctgctctccgtggtcacctacgggcagccgcgcgtgggcgacaaggtgttcgcgggctacgtgcgcgccaacgtgcccgtggagccgctccgggtggtgtaccgctacgacgtggtcccgcgcgtgcccttcgacgcgccgcccgtcgccgacttcgcgcacggcggcacctgcgtctacttcgacggctggtacaagggccgcgagatcgccaagggcggcgacgcgcccaacaagaactacttcgaccccaggtacctgctgtccatgtacggcaacgcgtggggggacctcttcaagggcgccttcctgtgggccaaggagggcaaggactaccgcgagggcgccgtctcgctgctctaccgcgccaccggcctgctcgtgcccggcatcgcgtcgcacagccccagggactacgtcaacgccgtccgcctcggcagcgtcgcctcggcgtagcttttggattgcatgttcgtttccatgcatgtgtatcattgcatgcaataattggatgaaataaacagcaataagcttcatcagtattattattgttgttgttgaataaaaaaaaaaaaaaaaaaaaaaaaaaaaaaactcgagaggggggcccgtgtacc

SEQ ID NO: 2431 - DNA, 1332 bp, Zea mays
  Clone ID: ZEAMA-23APR03-CLUSTER33552_2
gcaacgagaccattacctagaacatcctaatcgaaaagcacaccactgccctcttctgcacaccactgccctcttctactctcgtcgcgccggtaactcccgtccctcctcccctctccgcgtcccggctccatgggcggcctgtcggtgatcgcgccccccgcgcgggacacggcgtcgccgcagcaccgccgcgcgcgccgggcgttcctcgtctccaactacctcatcctgggttgcgcgtccgggtgcggcttcctcacgctgtcgctccgcctggtcccctccgtggacggcttcctcctcatcctgctccacgcgctcaccgtggccgccgccgtggccgggtgcgccgtcatcgcggcgcccgacccgccgcgcggccgctgctacaccgcccacatgtccgccaccgccgtcgtgtccatcctgcagggcgccgccgccgtgctcgccttctcccgcacctcggagttcctcgccggcgggctccggtcgtacgtccgcgaggaggacggcgccgtcatcctccgcatggtcggcgggctcggcgtcgccatcttctgcctcgagtgggtcgcgctcgcgctcgccttcgtgctcaggtactacgcctacgtcgacagggagtgcggcggcaacccgctgcgccgcagcgccaaggtcggcggcgaggacggcgccggcacctggccctggcccttccaggtctgagtactggtcacattggccttggctgcgggaaggtggaactgagaaccgtgtgctcttggaagggaaatcaagcgtcgagtgttgttctactggtagaactgtgtgtgtgtgggaatgagatgggatgctgtgattcgtttattggtttattatgtctctcatatttgtaaggctgttatatctatataattatttatgtgtctggcgatcgagaaaaaaaaaaaaaaaaaagcggccgcgcggcgggtcgggcgccgcgatgacggcgcacccggccacggcggcggccacggtgagcgcgtggagcaggatgaggaggaagccgtccacggaggggaccaggcggagcgacagcgtgaggaagccgcacccggacgcgcaacccaggatgaggtagttggagacgaggaacgcccggcgcgcgcggcggtgctgcggcgacgccgtgtcccgcgcggggggcgcgatcaccgacaggccgcccatggagccgggacgcggagaggggaggagggacgggagttaccggcgcgacgagagtagaagagggcagtggtgtgcagaagagggcagtggtgtgcagaagagggcagtggtgtgcagaagagggcagggtgt

SEQ ID NO: 2432 - DNA, 1511 bp, Zea mays
  Clone ID: ZEAMA-23APR03-CLUSTER33589_1
agacacatccccttggcgcgacggccaccccgcgcgctgtacctggtcttggcttgccgtgtttatttttatatatatatgtaggcaccccccagcccccagctgccgctcaaagcgacaggtggagatcggagggaggaagaagaactgagctgcggatcgagggaagggaacaagcaagcagccagagccaggtcgtgggggagccggcggcagtgatcttcttgcgtcgaaggcgaggccggagcgtcggtttgagcgctcgtgcgatatgggggagcaggagaacaacaagatcggcggcagcggcaacgacaacgccatggcggtggacgaagcgggcgcgggcgcggccgcgaacaaggggaagagcctcggcgccgcggacccgcgcctgcaggccatttccgacgccatccgcgtcgtcccccacttccccaagccagggatcatgttcaacgacatcacggagctgctgctgcggccgggcgtgttcagggacgccgtggacatgttcgtcgagcgctaccgcggcatgagcatcgcggccgtcgcaggcattgaaagctatgtacttgagtatgggatggattgtttggagatgcatgttggagctattgaacccggggagcgcgtagtggttgtcgatgatttggttgcaactggtggaactctttctgctgcaataagacttctcgagcgcgcaggagctaacgtggttgagtgtgcatgcctcattgggcttcccaagtttaaggatttctataagctcaacgggaaaccggtttacatcctggtggagtcccgcaaataggacgcagtaaatggtcagacaaaaaagctttctagcttcccgtccaaagaagctcacaacttcactcatttgcacgcgcaagcaaggtggtatgggggcaccgagaaactccgcagtaatctgtgttgaggccacggccagatgatgctatgtatcttcatggagagggtgatggactgggtgaaacgtagtcactgtacctttgtagcacgtcatgtctagtgtttcttagtagccatggctgaagagagtttgtagtattcccggcttcctgcagccaggaacatcagtgttaggcagagaaggaaaaggatcttatgttgctgctcagttttctcgttcgttcaaaaaagctaccaaatgtatatttcttttttctcaaggtgcaccaatatgctccttacatgcacttcagttagctaaaggaaattgaggaagtattccatctcggtctgagggaggaaagacgcaatagaacaaggccagtgtaaaaaaaaactagtctgcctgtaactattcctgtacatgtgactgcagatttttaataaatgaaatggtatcatctagccgatatcttttcctcctacgagtaaaaccgagagcaacctcagcgtgtgtttgaaaacaaagtattttaaaaaccatggtgttttgaggtaaagtatctcaaaccatggtattggtatgcatgtgcaag

SEQ ID NO: 2433 - DNA, 1182 bp, Zea mays
  Clone ID: ZEAMA-23APR03-CLUSTER3370_23
accgcagccgcagcacaatcgcctcgccttcccttccccaccagcccgtctctctcttctctctgactctctctctcgtagccgcgtccacctcgcagcagcaagcaagcgcgaccaaatggcgcctctaggagacggcggagctgctgccgcggcggcgtccaacaacctggtggtgtcgttcggcgagatgctgatcgacttcgtccccgacgtggccggcctgtcgctggccgagtcgggcggcttcgtcaaggcccccggcggcgcgcccgccaacgtcgcctgcgccatcgccaagctcggcggagctggacctgggcctggtgcggcgcgccagggtgttccactacggctccatctcgctcatctccgagccgtgccgctcggcgcacatggccgccatgcgcgcagccaaggccgcgggcgtgctctgctcctacgaccccaacgtgcgcctcccgctctggccgtcgcccgacgccgcacgcgagggcatcctcagcatctggaaggaggccgacttcatcaaggtcagcgacgacgaggtggccttcctcacgcgcggggacgccaacgacgagaagaacgtgctgtcgctgtggtttgacgggctcaagctgctcgtcgtcaccgacggggacaagggatgcaggtacttcaccaaggacttcaagggcagcgtgcccggcttcaaggtcgacaccgtcgacaccaccggcgccggcgacgccttcgtcggctccctcctcgtcaacgtcgccaaggacgactccatcttccacaacgaggagaagctccgcgaggccctcaagttctccaacgcctgcggcgccatctgcaccaccaagaagggcgccatcccggcgctgcccacggtcgccaccgcccaggacctcatcgccaaggccaactagatggccgcacgcccgccgttccaccacgtcactgtccccctcgtcgtcgacgtcctcggtttcggttcattaggtagatcgagtcttagcgtccgtctctgcgcctctacgctgagacggtttgtttgggttaattaagttagctttcgtggatatttcgccccggggcatcaataaaatgttggcatgcgtggtgggatgctatcctttatttttattttattttattttagcttggatcaaaaaaaaaaaaaaaaaagcggcc

SEQ ID NO: 2434 - DNA, 1581 bp, Zea mays
  Clone ID: ZEAMA-23APR03-CLUSTER3370_25
accaccgcagccgcagcacaatcgcctcgccttcccttccccaccagcccccgtctctctctctctctttctctctctcgtagccgcgtccacctcgcagcagcaagcaagcgcgaccaaatggcgcctctaggagacggcggagctgttgccgcggcggcgtccaacaacctggtggtgtcgttcggcgagatgctgatcgacttcgtccccgacgtggccggcctgtcgctggccgagtcgggcggcttcgtcaaggcccccggcggcgcgcccgccaacgtcgcctgcgccatcgccaagctcggcggctcctccgccttcgtcggcaagttcggcgacgacgagttcgggcacatgttggtgaacatcctgaagcagaacaacgtgaactcggaggggtgcctgttcgacaagcacgcgcggacggcgctggccttcgtgaccctcaagcacgacggggagcgcgagttcatgttctacaggaacccgagcgcggacatgctgctgacggaggcggagctggacctgggcctggtgcggcgcgacagggtgttmcactacggctccatctcgctcatctccgagccgtgccgctcggcgcacatggccgccatgcgcgcagccaaggcggcgggcgtgctctgctcctacgaccccaacgtgcgcctcccgctctggccgtcgcccgacgccgcacgcgagggcatcctcagcatctggaaggaggccgacttcatcaaggtcagcgacgacgaggtggccttcctcacgcgcggggacgccaacgacgagaagaacgtgctgtccctgtggtttgacgggctcaagctgctcgtcgtcaccgacggggacaagggatgcaggtacttcaccaaggacttcaagggcagcgtgcccggcttcaaggtcgacaccgtcgacaccaccggcgccggcgacgccttcgtcggctccctcctcgtcaacgtcgccaaggacgactccatcttccacaacgaggagaagctccgcgaggccctcaagttctccaacgcctgcggcgccatctgcaccaccaagaagggcgccatcccggcgctgcccacggacgccaccgcccaggacctcatcgccaaggccaactagatggccgcacgccccgccgttccaccacgtcactgtcccccgccgccccgcccctcgtcgtcgacgtcctcggtttcggttcattaggtagatcgagtcttagcgtccgtctctgcgcctctacgctgagacggtttgtttgggttaattaagttagctttcgtggagatttcgccccggggcatcaataaaatgttggcatgcgtggtgggatgctatccttttttttattttattttattttatttttagcttggatcagttggggttttgaacattgctagtgtcgtgtgattgggaaggctaatgtgatgccttcgatgcagagttttcaatgaatgccttggtgcaaacgtacgattgtgttataaaaaaaaaaaaaaaaaaaaaaaaaaaaaaaaaaaaaaaaaaaaaaaaaaaaaaaaaaagaaaaaaaaaaaaaaaaaagcggcc

SEQ ID NO: 2435 - DNA, 1595 bp, Zea mays
  Clone ID: ZEAMA-23APR03-CLUSTER3370_34
gcacggagaccattacytagaaacatcytaatcgaaaaaccaccgcagccgcagcacaatcgcctcgccttcccttccccaccagcccccgtctctctctctctctttctctctctcgtagccgcgtccacctcgcagcagcaagcaagcgcgaccaaatggcgcctctaggagacggcggagctgctgccgcggcggcgtccaacaacctggtggtgtcgttcggcgagatgctgatcgacttcgtccccgacgtggccgggctgtcgctggccgagtcgggcggcttcgtcaaggcccccggcggcgcgcccgccaacgtcgcctgcgccatcgccaagctcggcggctcctccgccttcgtcggcaagttcggcgacgacgagttcgggcacatgctggtgaacatcctgaagcagaacaacgtgaactcggaggggtgcctgttcgacaagcacgcgcggacggcgctggccttcgtgacgctcaagcacgacggggagcgcgagttcatgttctacaggaacccgagcgcggacatgctgctgacggaggcggagctggacctgggcctggtgcggcgcgccagggtgttccactacggctccatctcgctcatctccgatccgtgccgctcggcgcacatggccgccatgcgcgcagccaagtccgcgggcgtgctctgctcctacgaccccaacgtgcgcctcccgctctggccgtcgcccgacgccgcacgcgagggcatcctcagcatctggaaggaggccgacttcatcaaggtcagcgacgacgaggtggccttcctcacgcgcggggacgccaacgacgagaagaacgtgctgtccctgtggtttgacgggctcaagctgctcgtcgtcaccgacggggacaagggatgcaggtacttcaccaaggacttcaagggcagcgtgtccggcttcaaggtcgacaccgtcgacaccaccggcgccggcgacgccttcgtcggctccctcctcgtcaacgtcgccaaggacgactccatcttccacaacgaggagaagctccgcgaggctctcaagttctccaacgcctgcggcgccatctgcaccaccaagaagggcgccgtcccggcgctgcccacggtcgccaccgcccaggacctcatcgccaaggccaactagatggccgcacgcccgccgttccaccacgtcactgtccccctcgtcgtcgacgtcctcggtttcggttcattaggtagatcgagtcttagcgtccgtctctgcgcctctacgctgagacggtttgtttgggttaattaagttagctttcgtggagatttcgccccggggcatcaaataaaatgttggcatgcgtggtgggatgctatcctttatttttattttattttattttttagcttggatcagttggggttttgaacattgctagtgtcgtgtgattgggaaggctaatgtgatgccttccatgcagagttttcaatgaatgccttggtgcaaacgtacgattgtgtaataatgccttctattgatcagcgcctccaaaaaaaaaaaaaaaaaaaaaaaaaagtactctgcgttgttaccactgct

SEQ ID NO: 2436 - DNA, 1553 bp, Zea mays
  Clone ID: ZEAMA-23APR03-CLUSTER3370_38
aaccaccgcagccgcagcacaatcgcctcgccttcccttccccaccagcccccgtctctctctctctctttctctctctcgtagccgcgtccacctcgcagcagcaagcaagcgcgaccaaatggcgcctctaggagacggcggagctgctgccgcggcggcgtccaacaacctggtggtgtcgttcggcgagatgctgatcgacttcgtccccgacgtggccgggctgtcgctggccgagtcgggcggcttcgtcaaggcccccggcggcgcgcccgccaacgtcgcctgcgccatcgccaagctcggcggctcctccgccttcgtcggcaagttcggcgacgacgagttcgggcacatgctggtgaacatcctgaagcagaacaacgtgaactcggaggggtgcctgttcgacaagcacgcgcggacggcgctggccttcgtgacgctcaagcacgacggggagcgcgagttcatgttctacaggaacccgagcgcggacatgctgctgacggaggcggagctggacctgggcctggtgcggcgcgccagggtgttccactacggctccatctcgctcatctccgagccgtgccgctcggcgcacatggccgccatgcgcgcagccaaggccgcgggcgtgctctgctcctacgaccccaacgtgcgcctcccgctctggccgtcgcccgacgccgcacgcgagggcatcctcagcatctggaaggaggccgacttcatcaaggtcagcgacgacgaggtggccttcctcacgcgcggggacgccaacgacgagaagaacgtgctgtccctgtggtttgacgggctcaagctgctcgtcgtcaccgacggggacaagggatgcaggtacttcaccaaggacttcaagggcagcgtgtccggcttcaaggtcgacaccgtcgacaccaccggcgccggcgacgccttcggtcggctccctcctcgtcaacgtcgccaaggacgactccatcttccacaacgaggagaagctccgcgaggctctcaagttctccaacgcctgcggcgccatctgcaccaccaagaagggcgccatcccggcgctgcccacggtcgccaccgcccaggacctcatcgccaaggccaactagatcatggccgcacgcccgccgttccaccacgtcactgtcccccgccgccccgcccctcgtcgtcgacgtcctcggtttcggttcattaggtagatcgagtcttagcgtccgtctctgcgcctctacgctgagacggtttgtttgggttaattaagttagctttcgtggagatttcgccccggggcatcaataaaatgttggcatgcgtggtgggatgctatcctttatttttattttatttttagcttggatcagttggggttttgaacattgctagtgtcgtgtgattgggaaggctaatgtgatgccttccatgcagagttttcaatgaatgccttggtgcaaacgtacgattgtgtaataatgccttctattgatcagcgactccaatagtctaatgtgcaagtattcttcgtcttggct

SEQ ID NO: 2437 - DNA, 1604 bp, Zea mays
  Clone ID: ZEAMA-23APR03-CLUSTER33846_115
cggacgcgtggcggacgcgtgggcgccacaaccgatcgccaagtcgcccgtatttgaagctctggcacatgatctcccctacctcgatctcgtaaaatgccgcattcttgcaactgcatagcagccgccccacgccgagctcgccgtcgtgcaaggagtccgtgttgcgctcgccactgttcctgcccaagccaccgacgtcgtcgagcctcgccagcgcttcactaaagtcacctcaccgaagcgccaagcagcatgccatcgccgtcaccccagctgactgcgatccatttttgagcttcgaggaatcgacgatcaagcgttggcgactaagtggtcgaactcttcgagttctgcgaggctgaagatcttgagcatctgtttggtgaaggcaagtgtcctctgacccattatgtcccatttactttataattcactgtcccgcatactatgaacaacctaaggattgactagctttctatttaccttggccttgatttccttttgggttactatgctattgctttactttaatcaatgaacatgatgtgaacacttatgatacgatgttgtcattatgattatgatgttggactggtgatattctagggggctcgagcggtttctcgagtgcctctccgtaaggacctgtttgttggatgaccgcccgggaaaacagtggaaccatgagggtggaatgggatgcccttagctgactaattagaggaactggggtgtagttcgcttcgtcgtcgtgctgttaatggggctcggtgtatgcggctcgctctgccaaggttggttcgccccttggggaggagtgcggtgcatttaggaaacctaacgggcgactacagcattagggaatctttgtaaaggcttcgtagtgaatccctggccattcacctcggtagtgaataagggtcttgcacgcccgggctagagagggaatcacgacttgtgggtaaagtgtgcaacctctgcagagtgttatgaaactgatatatcagccgtgctcgcggttatgagcggccaagggagctccattgattagagacacattgatcagagatgttttgtttacagatgatgatgaggatattgctggtttctattatgattatggttatggtttctagtattctttccgtttggaaagggtacttttgggttaacaacttgggttaatgctaaaacctggctctctactagtaataattacctgaccaactaaaagcaactgcttgaccttaactccacataaagctagtccactacagccaaacgggacatttgctgagtacgttgatgtgtactcacccttgctttcacaaaacactaggttgcctttgatgcaatctatgctcaggtaaagaaagagaagaaggcgtcgaggtggatcgccaggagttccaggacgtcgatgagttcgaggattaggctagcgaccttccccagtcagctgcctgtggtgggttgtttacgttggctacatttcgattctgtgtacattgatttatattatgtaaatggctctagtctgtaatattattacttactatttattgttattcgaagcattgtgccaaaaaaaaaaaaaaaaa

SEQ ID NO: 2438 - DNA, 2042 bp, Zea mays
  Clone ID: ZEAMA-23APR03-CLUSTER33846_121
ctgttcctcttcccgaacgcaccggcgcatactgtccccatccgaataccacgcgcacgctcgcggctaattcgccaaccactccgatgtggtcaccgcctatttagtcagctgtactcgccgcgctcctctcacaccgttggagccatagccgtaatccagccgccgccaccgtcggagggacaatgtggaggccgccactagtgaacctcggcttgccaccaaccgcgccctcggagttttgcccaagtgcttccttgggtcgggggaaaacttccgttggccgcgccactcacgattcaccaccgactccgcccgaatttctcaacggagtcggactccgccgcggagccgtgagacgccgtggaccgcgcgcctgcacgcacgaccgttgagaacgatccggtcgaagagcccgaggagctcgcaggagaagcccctgagcagcagtcggttggtggaggttgtcagcattgcaaccactgctcaggcgaagatgaagctgtggaaggagacttccaggagttccaagactacgacgagttctaggtgtgggttagcggcaacccctagtcggctgcctgtgaaggccgtggttatctacgtttcttttccgcactttgatttattgtaaggactatatggacgtctcagacgtatgatgtaatcgactattatttccccttttaatactattttgagcactgtgtgatgatgtccatattatgtaactgctgtgtacgtgaataactgatcctggcacgtacatggttcgcattcggtttgccttctaaaaaccgggtgtgacagttaccacttcaattccactaaacccaagcttcagtacttcagcaattgctattactttggccttcctctgaggctcttcacacattgacttctcttgcatttcagtaccgtactccacagccgctaccatcttgccattatgcgtaatactttgaaaatgatcaagagcatccttgaactgttcaattactgctgaggtgttgacattctgaagagcactctgaaaacgactgtgtgcatcattgaacagctccactgctgctgccatctcgctagcatgctggacgacattttggaagcgatcacgtacgtccttgaacagctccattgcagcagccattgtgctggcatgctgaatggcattctgaaactgaacatttacatccttgaacttgtccagagatgggcaatttgattcggtcctattcgttttcccgtcataattgtatttcttctgactcttaaagcttaacgttgcggccaaggagcgaccagatattcctgtggacatcctgtcctcttccacttcgtcatctccaacttcatttatattttcattctccatgttagcaattgcagcttcagacccttccaacccttccccagcagagctgtccttgccatatattgcatcaaatgtatcgaaatatacaaacgggacaccatacagacccttggctctaggatggtctctgcaatattcatcatatcgttgtttttcacactggatcatctttcttgtgtcatcccaagagaagcctgtcgatgctatcatatccttgatcgaataatacttccgcttcatcactttcagccgagaatcaacatgagggctggctttaataccacgaccaggtagcttttgtgaaagaatgttctctatgccttgagagtaacagttcttaaaggcccccccttcaaccttatatctaggatcagcagatatctcacacaaagctttgacaagctcgtcatcttcatctgatgtccacatccttttatttctacccctgccacgaataattctagaaccttgactgtggttcatctctgatctgtgaagaccaaagttggttgacacgccaagcgtcacaagatgcagacaaggtcagcacttgggcaccggattaggactgtcgagtgctcggctggatcctgagattgcgattcccgctagaggggacgtcttcgtttcagggaatgggtatggcgtccttttgcggacgcgtggg

SEQ ID NO: 2439 - DNA, 1051 bp, Zea mays
  unsure (1)..(1051): unsure at all n locations
  Clone ID: ZEAMA-23APR03-CLUSTER33865_3
aactgcggcttcaggactcgacctcttgcgccgccgccatgaccttcaagcgccgcaacggcggccgcaacaagcatggccgcggtcacgtcaagtacatccggtgctcaaactgcgccaagtgctgccccaaggacaaggcgatcaagaggtttcaggtgaggaacatcgtggaacaggcggccatcagggacgtccaggaagcatgcgtctatgatggctacgtcctcccgaagctgtacgccaaggtgcaccactgcgtctcgtgcgcgatccacgctcacatcgtccgcgtccgatcccgtgagaagcgcagggaccgcaagccgccggagcgcttcaggcgcagggaggatacgcctgctggtgggacaaaggaggcccccgccctggtccctggtggctgctgctccagctccagctccagcacctaagctagaacaagaagcagctacaggagcttcatggaacccggcagtacaacaagcaccaacactggtgcgaacttcatcagcgcacaagtcaacacaagaagcaggaggggcttcgtccaggcctcgcagctgctgttgccgaggaggagcgcagtaaggttggaccaatccgaagatgctgcgttggctcaggttgcaacaggaggagttcatgaatgcctttgaggagcctgagcaggagaggcagcagccacggaacgccgtgtccacagcacgagacactctgagagccatcgcctcccgagccgtccgcctccgtgctcgaggctggcatgtttaatattattctttcgtcaactactttacacaaacctcttgtttgttattctactgtgtaattttttttaaagtaggctgacccaaatttggatggccataatcataatcctttggcgcatggaacatttgctgttgtacacagtactgttcaacacatagccatttgtccgatttttttgtnnnaaaaaaaaaaaaaaaaaaaaaaannnnaaanannnnccccnnnnnnnnaaaaaaaaaaaaaaaaaaaaaaaatactctgcgttgttaccactgct

SEQ ID NO: 2440 - DNA, 1322 bp, Zea mays
  Clone ID: ZEAMA-23APR03-CLUSTER33877_2
gcacgagaccattacctagaacatcctaatcgaaaaatcgatcaccgatggcctcctcgctccgccatttcgcgggcctcggctgtttctccgccgcggcgtctagctctgcctccaccagcttcctgcccggctacgcccccgacttctgcgtattcgtggcgctccgtccgatcaagccgcccgccaccgccgtagcgaaccctcccgcctctccatctccgctggaggaggagcaccggcggcaggccgccgttccatggcacagcgacgacccgccagcaccatccgttcctgcgccgctgcggggtggggatcgtcgggttcggcaactttggacagttcatcgcgggcggcgtgcagcggcagggccacaccgtgctcgcggcctccagatccgactactctgcctactgcgcccagcatggaattcgcttcttcaggagcgtggacgcgctgtgcgaggagcagccggacgtgctgctcatctgcagctccatcctgtccacggagagcgtcgtccgagccatccccttccacaagctgcgccccgacaccatcgtcgccgacgtgctctccgtcaaggagttcccccgcaacctcctcctcgaggttctcccaccaggattcgggatcatctgcacacacccgatgttcgggccggagagtggcaaacacggctggggcaagcttcccttcgtcttcgacaaggtccgtgtcgcggacgacggggatcaggcggcaacgtgcgaccggttcttgagcatatttgagcaggagggttgtaggatggtggagatgtcgtgtgccgagcatgatcgctacgccgcggggagccagttcatcacgcacacaattgggagggttctgtcacagctgaacctcaggtcaaccccaatcaacaccaagggttacgagaccctgctgcaacttacccagaacaccgtaagcgacagtttcgacctgtactacgggctcttcatgtacaatatcaatgccacagagcagctggacaggctggaaatggcatttgagaaggtgagacagatgctgtctggcaggctccacgacttcataagaaagcagatcgtggagagggcggacccttcatgaaaattggcaaatggcaggtccagttctcctgcagcgcaccacttatcgacattaactgaagaaaataagacacgtgtatcccccgctcttactctaacctctcctacgctttaagataaacttgtataaatttgaccatgttttgtttataaaaaatatattgatatctacagatctattcatgccctaaaaccatgctttcattttcc

SEQ ID NO: 2441 - DNA, 1646 bp, Zea mays
  Clone ID: ZEAMA-23APR03-CLUSTER339395_1
aaataatggggggggttaggagtttagggtttctaaccttgggatgaaaactgggatgttacagcgcccaaatcaacagaagggattgcaaggaaagtggacgtcgagctcacctcggttgggcgtggaagggccgacgacgcctgtctcagggtgatggcctcgacctcccactgcatcatcgtgaccgcgttgttgatgtctaaatagacgggggatcccaaggtggggtcccagggggtggcgcggaggaggcgccgaggcggttcgagacgtgaagcatgaggacatcgacgccaaccaccctgatgtccaacgccaccctgacgggcacccagaggacgtcgccctgctccaccgcgtcataagctccctggacggcggcgtggccggcgtagactagcgacacccgttggggcgagagcgtgaggtaccgaatgccatgctcacattgctccgttctcacttgttgcaattcctgctgcaaacttattgcgattcttcctgctgatcagctgcacgtgcaggtttagttgttcctgtaaattgtatctttgggtagcaaattgtagttgtgcttgtaaaagcaacaagttatcatttggtcgcctgacatcaactgtgtacttgtttgtctcaaaagacagcacagattacacgttctaaaaatgtgcactatctgtctagtaatcgtgttttttcagcattattttcctctcatttcctgacggtaaatcgagaaaaggtcgtagagctgcgactttcagttcataaaacaccagtatgtatcagtattcaccaaacagaaaggtagcaattacaaccaatgtcactgtgcaaaattgatccagcattgtttccatgtaatgctttcaacagttctgaactgtgcaaaattgatccaacattgtttccatgtaatgctttcagcagttctcaatttctcaaactgaaagatcaacaatcgaacctactaccaaaacctcactgtatccggagcaatgatacattcgatttctgaagaagatgcaccttgatgctattgtcagaagtcatgctctcgtattcctctacgcatcaacatctggatacaccaactcctgaccctgagcaacaatggaacaaggaaaacatagggacacagttaggacttaggacataggtgctaggccacatgcattgtgttgcaacggctgcaacagctcaaaataagcaattcagtacaggatcaacaaattggttgacaagttataaacagttaaacttctgggcagtgaatcagtgtattggcataatttttttttgaaaaaaaaaataaaaaaaaaaaaaagaaaaaaaaaaaaaaaagaacccaaaaaacccatgtacatcatactacctgaaacaactgcgttctcaaaacttataatctaaaacacaaattcaaagctacagaggtctctcaacatctgaactacagtcacaataaggagttacagattcagttgtcatcagtacaacacttggactattggtcatgttacttgcaggaacaattttaccaacttgttgcagcgaacaccaaacttgcatatgagcaatagtacacaatattgaagctagttatgtaccctgttgtcatcagtacgatcaactgatagagaaac

SEQ ID NO: 2442 - DNA, 1300 bp, Zea mays
  Clone ID: ZEAMA-23APR03-CLUSTER3395_5
atccggtcccaaaagtagaaaagggcaagcgacgagcacagcacagcacagcacagcacaagcacgccttccgttttgggaaggcgaggagaggggaaccccggcccagggagagttgtggggaggggatcggcggcggaggagatggaggagcgggagaagctcgtgtgcctggccaagcttgccgagcaggcggagcggtacgacgagcttgccaagtggcaaaacaagcatttgatgaggctcttactgagataatcgccggtgagggagtttacaaggatagcacacttatgatgcagcttctgaaggacaacttagcattgtggacatcagaactaactggaggtgaagcatccaagggtagcgacgatgtggacatggagggttgatacattctccatgttttaaggaaacacagaaagcacgcaaaaatatccaggctgtgatgctagcgaacctgggtcctcaagttttttctgcatcggaactcactagagccttgtgtatttttctgaagtttctgcccgtcgcggggtttttttttgagaggtctgtttgttcctctcttttgaccatcgtttggtcctggagtcagtcactcactaccaagtgttacagaggtctgaactggtgagcatccatatatgttgatgctttttttgtaagaagtgttttctcttatcaacgcacccactgtcacttttattagtaaatgaactctcatgagagagcttgccaagtggcaaaacaagcatttgaagaggctcttactgagtaaaattctggtgagggagtttacaaggatagcacacttatgatgcagcttctgaaggacaacttagcattgtggacatcagaactaactgggggtgaagcatccaagggtaacggcgatgtcgacatggagggttgatacattctccatgttttaaggaaacacagaacgcacgcaaaaatatccaggctgtgatgctagcgaacctgggtcctcaagttttttctgcatcggaactaagaagagccttgtgtatttttctgaagtttctgtccgtctcggggttttttttttgaggtctgtttgttcctctcttttggccatcgtttggtcctggagtcagtcactcactaccaagtgtttcagaggtctgaactggtgagcatccagatctgttgttgcttttttttccttctgtgcttcagaggcatctttgtacaccgatggaaaactgtttctcttatcaacgcatagactgtcagtgctgttactgatcatgttcggtgactgacgcggctctgt

SEQ ID NO: 2443 - DNA, 2125 bp, Zea mays
  Clone ID: ZEAMA-23APR03-CLUSTER3402_2
tgggaccctcgaggccggccgggccggggagagtgagagagagagggggagagaaaggttaaggaatccgagctaaggcgccgtttcttctcctcctgcttttttcttctcggcaccgtcactggagggagaggattcacgggacgaggcgacgcggaagggatttcgtcgcttgtgtgggcggcgcgtccgctggttgctttgcttccatggagagggatttcctgggtgcgatcgacagggcgtggaagtgcggcgaggcggcgaaggaggagagccgatcggagccaggtcagtgctagctcctctctcgatgccctgaaagcgtgatttacctaaccgtagtactagtatggcagtagcgactcggcgcgtctaccgcctgatccaccgcggtttgcttgccgcgagcatggcacgagaccattacctagaacatcctaatcgaaaaatttcctctcgtcgtctcgtggccgctggtgcccgcgcgtcagatttggcctgctccgctccgcctccgcagtgtgaatttctgagagataggtttctgtgctgcagacagcccggcggcgacgcggtggcagtttgcggcgaggtccggcgtcgcgccggcgttcatgtcgttcaggacggaggcgacgggcgagggctctgaggcgttctcggtctccgagctccggccggccggagacgccttcgacggcatcaagaagcagagctccatgctttcgatctaccagcagcagaggcagtttggccacaacagcagccaggccacggcacagcagcagtaccctgcagcggcgcacaggcagcgctcgcaggtggcggattacggcgcggcggcaccgcatcgtctccctggtggtggtggtggtggatgcaggctagtgcagccggtgtcggtgcgccaccctgtgccgttccatcaggccaacctgatggtcaggtcatcagtgtcgcagagcttccacaaccagcagcctttcaccatgagcaacaacgggtttggcggctctacggccggcgtgtacggggcgaggaacccacggaaccaggcctcgacgcagctcacgatattctacaacggctcggtgaatgttttcgacaacgtcccggtcgacaaggctaaagagctcatgatgctggccagcagggcgtctgttcctggtgctaccccgtcaagtgagccggactcgccgcctgttcctgcccctgcccctgccaaggtcaacgtggccgaggtcttccctggtgctagacagatcgcagttcagaaaccggagccctgcgtgccgcatctatcaagcgcggcaactgcaagcccagtccgcatcgtcgtgccgcaagccgtggctccctccaggagcacgtctcactgcgctacagaggcctgcggttccaagcctgctgctgctcctaccagccagacagtctcgtcgtcccggcagttggcagctgcaagtgctgctgcagctgttacgccaagagctgtccctcaagctcggaaagcgtcgctcgcccggttcttggagaagcgaaaggaaagagtggctagcgtcgagccatacctgacgtccaactccaagagcccgctagagagcagtgacgccgtcggcagcgctagcgctccaacgaaatcgtcatccacagacgtcgccccggcgagcagccacaacggcggcggcgcagagcttgtgcgccatggcggatatcccaggagcatcagcttcagcacaaatttgcagatctgactctggtgttgctgtccatagactaccactaccactacgactccgtgtccgtgagcgcgcccctccctacccatcgacacgaaagctggatagctgtcttgctttgcatccggatgaggcgggaggtataggaagatacgatgagatgagagtataaagatgctgagtgctagcctagccgcccgctgtatagcttttgcagcgcgctgctgacaagatcgagggccgtgacctactcgtttcaggctcttcttgaatggtttttttgtcgtggtccattgttgtatattattcaacttgagaaacagagagtgctgctctgtctctgataaaagtttatatgaaattgataaaaagtttctgctttttcc

SEQ ID NO: 2444 - DNA, 1578 bp, Zea mays
  Clone ID: ZEAMA-23APR03-CLUSTER340_71
ccaattccattctcggaagagaccatttccttcctcctgatctctcacggagttcctctccatggcgacgccccgctctccgagcccccgcgccgaagcgcccctcgattccgcgccgctgctgggcggtgcctccggcggcgggagccgtcgccgaggcggagcgctccgccgaccctcgctccgcggtgcggcgcggctgctgcgccgcggcgggcggcgagccatgcgggagccctcggtgctggtgcgggaggccsccscagagcacctggaggaacggcaggcggactgggcctactcccgccccgtcgtggcgctcgacctgctctggaacctcgccttcatcaccgtcgctgcggtcgtgctcgtgctcagccgckacgaggactcgcccatgccgctccggacctgggtcgccggctacgccctgcagtgcagtcatacacatggtgtgcgtcgcaatctgagtaaccggatgctgccatggccagcgcggcggcgccggcgcagcgcccgctgacgaggtaaaggggcagcgacggatcgtcgtcgtctagtgatgaggatgacagggagctcgatcgccatggtcgccgcaccgattacgccagtattgcaaaacacttggagtctgctaatacaatgttctccttcatatggtggataatcggattttattggatatctgctgggggtgaagaggttatccgggacgcacctcagctttactggctctgcatagtcttcctggcatttgatgtgttttttgttgtattctgtgttgctctggcttgtatcattggtattgctgtctgttgttgccttccttgtatcatagcaattctctatgcagtatctgatcaggaaggagcatctgaagatgacattcgtcaaatcccaagatacaaatttcggcggaccgatgagcctgaaaagcaagatgttgaccccatgggtccttttggtggaataatgacagagtgtggcamccaaatcaacctattgagaaagtgcttgcagctgaagatgcagagtgttgtatttgcctatctgcttatgatgatggtgcagagttgcgggaactcccttgtgggcaccatttccactgcacctgcatcgataagtggcttcacatcaatgcaacatgccccctgtgcaagtacaacattcggaaaagcaacagtagcagtggaagtgaagaagtatgaatgcaaccgcttgacaatgccaatctgtttaaacttcgtgcctgtgtcgttgctaatgtaactccagggcttgagcagtgtaaatttttgtactaaaagaagtgctgatagagtcaattatgtattaaagttactcaaagtgctgtctatatgtcgtataagttaataaatagttgggtgtgcatctgtatttactgtcaggaatgattagttgcactgtaacttgtattctttcgagtgattcgggcgttttcctgctgggctatgatggcagtttgtcttccatggtttctactgacaagaaattttcgactggccattatttacagcagcgacatagctgatgaaagaagccaattggtgatgg

SEQ ID NO: 2445 - DNA, 1569 bp, Zea mays
  Clone ID: ZEAMA-23APR03-CLUSTER34131_1
gccgcacacggcacatctcagcgcctcgcctccaccagtccacctccacaagaccacaacgtcaccttcacctcctcgccgccagacgcgcccgccgccaccccgtgagccggcaacctcccaccatctagcctctgcgcccgcccggccaccgggcactggccacgtctggccgacggccgcctgaggcagtgaggcctgaccacgccctcccttctccactttgtgtctgtgcccggtcttggattcgtggttgtctccgccactgatctcctcctagcacggcagcaccccagagccctagcgcaagcctggcgctccagatctccaccctgaccatgtcggggcggagacaggcctggcagtttgcggccgcgctgatcttcttccacggctccgagtacgtcctcgctgccgctttccacggccgccagaacgtcaccgctacttcacttcttattagcaagcagtatgtattggcaatgggttttgcaatgctggaacacctgacagaaattcttattctcccggaagtaaaggagttctggtttgtcagtaatattggccttctaatggttattatcggtgaaattatccgtaaacttgctgtagtgacagctggacgtgccttcacacacgttataagaacttattatgaagatcagcatcaattgatcacgcatggactgtataggtttatgcgccaccctgggtattctggctttcttatatgggcagtaggaacccaggttatgctgtgtaatccattatcaacagttgcattcacattggtcttgtggcgattcttttcaaaacggataccgtatgaagaatttttcttgaagcagttctttggctctgaatacgatgaatatgcacagagagtacactctggaataccatttattaaatgaaagtatggcacttgcaaaaaagaggatgtaaagggaatgcaggcagagctaatggcccaagctaaaagaatgaatcatgattatcatctggccaatgattctaggcaattcctttatcatatttcatctgctgtattctccaagtgacattttcactgatgtatgctcgataactccaataaaggcataaagcgagagatgctacagctttgttgaatgcaaacaggtttgctcatgttgaattattgtaaggccgcgcatagcagtgcgtgcatatgttgaatgcaaacattgttttgtactgtagactatactatttacagagtagagtttgaaatagagtagagtttgaaatagagtaaagtttgaaatagagtagagtttgaaatagtaagataggagatgaaatagagaggctgttggagatagcctaacgtattacaagtgcagaaacctgctccagtttgcttgggacaaaaggatctgatgccatttttgttcttattccagaacagcacaactcaactatcagggtttttttatctggttataagctgttgttttgtactgagatttcattgttcacttgaagaaacccttgctgggagagcagaatgcattgtgctgtttaaaaaaaacaaaaaaaaaaaaaaaa

SEQ ID NO: 2446 - DNA, 1590 bp, Zea mays
  Clone ID: ZEAMA-23APR03-CLUSTER34138_2
attcattctcttctcgctgcacgccgcactgcgccagcgtcagcatgggcggctgcggcctcggacgcggccgccgcaccgcctgcctgctgctgctcctcccgccgcttctcctgttcgccgtggccgatgccgccgcctcggggaaggagaagcagggggtgtccggtaagctgcggttccggcgggagagcgggacgttcaaggtggtgcaggtggcggacatgcactacgcggacggccggagcacggcctgcgaggacgtgctcccttcccaggtggccggctgcaccgacctcaacaccaccgccttcctctaccgcgtcttccgcgccgaggaccccgacctcgtcgtcttcacaggtgataacatctatggtgctgattcaactgatgcagccaagtctatggatgcagcaattgctccagccattgacatgaaactgccttgggctgctgtgatcgggaaccatgaccaagagggtacgctatcgcgtgagggtgtgatgcgtcaccttgtgggcatgaaaaacacccttgcaagcttcaatccggaaggaattgaaattgatggttacggaaattacaatttggaagtttccggggttgaagggacatccatggatgaaaaatcagtgctcaacctgtatttcctggacagcggtgactattccactgtgccgtcaatcaatggttatggttggatcaaggcttcacagcaagtctggttccaacaaacatcttcaagtctacaggcaaagtatatgaataagaacccgaaacagaaggaaccagcacctggccttgtgttcttccacattccactaccagagttcagcagttttacggcatccaatttcacaggagtaaagcaggagggtatcagctcagcatcaattaactctgggttctttgcctccatggtggaggctggagatgtgagagctgcctttgtgggacatgatcacattaatgacttctgtgggaagctcagtggtattcagctctgctatgctggtggatttggttaccatgcctatgggaaagctgggtggtcaagaagagcgagggtactgtctgtgcaacttgagaaaacagacagcggtgaatggcgaggtgtcaagtccatcaagacatggaagaggcttgatgataaacatctgagcacaattgactctgaggttctctggaacagaggctctaatgacaggaatggtgctccataagggatctctacatcggtgtgtattgttggatggccagtttactatagaatcagaaatgcagaagtgtgtacatgggggagaaggtctatacagacacatacacgcaggtttctgctgttgcatttttccatgttattagaaaataagtaatcaaaattcagtgccgttgtcaattattgcaggtggtctcatagactagtatatagtgtggtcaaaggaaaacgagaatgcaatgtcattgtagtccatctctcgtgtattgttaaactcggtcggaaagggaaaaactgttctcccggtattatattaaaaaaagactgaaacatggtttctgccgagaaaaaaaaatagttctagatcgcga

SEQ ID NO: 2447 - DNA, 1239 bp, Zea mays
  Clone ID: ZEAMA-23APR03-CLUSTER34165_1
cccccccgcccccccccccctctttcgttcccctttccgccgcgcctcccactaaaccctagatctctctctctagaatgccgacgtcttcggctctcagcaagcgcggcggcgacggcggggacggcatcctggccgccctctcccgttcgcaggtggcggcgcacgggcgagaggcggcggccgtggcgaagaagctgctgcggagcatctttcgttcccctttccgccgtgcctcccactaaaccctagatctctctctctagaatgccgacgccttcggctctcagcaagcgcggcggcgacggcggggacggcatcctggccgccctctcccgttcgcaggtggcggcgcacgggcgagaggcggcggccgtggcgaagaagctgctgcggagcacggggaaggcggcgtggatcgcggggacaaccttcctggtgctggtggtgccgctgatcatcgagatggaccgggagcagcagctcaacgacctcgagctgcagcagcagacgcttctgggcggggccccgccgccgccgccgaccaagtagatagatccgtgcatcgaccctttcgtccccccccccctctccctctctagaggtatctgttactatcaagttcatcattcgagttactatcaagttcatcattcgagttactatcaagttcatcattcgagtcgagttgaggctaagggagttaccgagtcgacctgttgtcggttggtcgtaatcaaagaggtcaaaactgctttgttgatgttcgttctcgatgcaacactagtttagtttcccttccatcaattgaaacggattgatcagataagttgagctcgttcgctgctgctgctgctgctgccaggcgctgcgatccgctgcctgcgtttttgcacgctgcagcttgttcttcctatacctgcctgtgttagcgtttttaatgaataaatatacttcttgctgttattcagcttaaggctatcaaaaaaaaaaaaaaaaaacaaaaaaaaaaaaaaaactctttctcccacccccccccccccccccctctacaaaaaacaaacaaaccccacccaaaaaaccccctccccataaaccatacccccacccacacccccctccccacctacccccccccccccccccccccccccccccctctccacccctccaccgcaacacccaccccccaccaaccccccccccacccacacacaacccaccccccccccccacccc

SEQ ID NO: 2448 - DNA, 768 bp, Zea mays
  Clone ID: ZEAMA-23APR03-CLUSTER34191_8
aggagtactcccgttccgagcacactagtcttccctgcgcttgctcgctccttcttgcccccatggcgctgctcgccgtccagggcatggccatgtccaccgccgccgcggccctcccatctcacaaccacggcgccgtctcatcctacgtctccacctcctcctacgcgctcgcagcctccgccgccttcccccgcgcccgagctgcgttcgccgtcggcaccgtcttgtcggccaccgtcactccagttcttgacgttttaaactttatctggtcttgctcagtctactgcgggagaggggacaagaaaacgaaaaggggcaaaaggttcaaccattcatatggcaatgcgaggccgcgcaacaagaagaagggaactgggcctgcgcggctctttgctcctccagctcctccaaggaaggttgcccctcctgctcctccaaggaaggatcagttcgatgatggggagatcatttcaatcgagattgacgaggacatcctggaataggttgtccgagttctgccttgctttatatttgccctgagcttaattggcctagtttgtaccaaatcaaatactacatattttaagtaattatttcctcgcctataattatcgatgggtaggctgccacactttcatttggctagtaatgttcctcctgttaagaaacaaaaaaaaaaaaaaaaaggacgaaggccgtaccgctactacaggatcacagagcgcagcgcacgcgagcacatagctcctcaatagtgtcaca

SEQ ID NO: 2449 - DNA, 1080 bp, Zea mays
  Clone ID: ZEAMA-23APR03-CLUSTER34287_10
atctcccctctcccctcaggcacgcccactgcgctatagcctcagaaccgtccgtgtgcagcccattcaagcacctcgacgtcctttcccgctctccctcctctctccaaaacaactaccacatcgccctcctgcagtaccaagccatggaggtcgcagaccacaattccttcccatggccgcacctccctggcatccctcatcatgtagcaacagcggcggcaagctcgctctggccggccaaggattcttcacgtccggcaagcctcgccgttcgccgtcgtcacaagatcgcaattcgtttccaagcttcgaggaatcgacagtcaagcttcggtgaccaagtgatcaagttcgtcgagttctacgagattgaagaccctgagcatctgttttggtgaaggttgtccacattgtaaccactgctcaggagaagacgaagccgtggaaggagacttccaggagttccaagactacgacgagttctaggtgtgggttggcggcaacccccagtcagctgcctgtgaaggccttatctttactgtgtttcgcttagcactttgatttatctgttaagttgatgactatgtggatgtctatgactcagtgatgtaataagttaatactcttttatgttattattcgagctctgtgcgatgatgttcatttatgtaatcgctgtgtacgtgagttctgatcctggcacgtacatagttcgtattcggtttgccttctaaaaccgggtgtgacagaagctatcgactataaagcttcggcacagtgacatgtctcaagacaaaggggtaaaccgacttaaagataaaatgactaaaagacccatgatattctgtgtcattattgtagttcattgtaaagggcataaatgtaattatacacaggctgtgccctgtgcctataaataggtgaacagtacccctgtactgttcgcgcgcccctgtaattacgcattgggcatttgcttttgcttcaccctggtattttttctttccttcaagtcgaaggtacattttgtaatttgtcattatttctataataatgaaatagaaacgagttaataat

SEQ ID NO: 2450 - DNA, 506 bp, Zea mays
  Clone ID: ZEAMA-23APR03-CLUSTER3437_2
aaagagaaaaaggaaaggaaaggacaaaggagcggcggcgaggtctatggcgtcgacggctgggtacctggcgcggcgggcggcgcagaaggagcgggtgcgcctgctctaccgcagggcgctcaaggacacgctcaactgggccgtccaccgccacctcttctaccaggacgcgtcggatctccgggacaagttcgaggccaaccgacacgtggataacctggacgtggtcgataggctcatcgacgatgcggaggctcagtacaggaacttccagcaccccgatccctacattgttccatgggcaccaggcggctgggaagttccttgtgctaactgtgaaactgtttactgcgacctgcagattttactcttggagtgccctgagtagattttagcaataatatccaacatgtaacatgttacggacatgtacccaaacgtgatccagttttagttaatgtgctccatgcttgacgtttaaaaaaaaaaaaaaaaaagcggcc

SEQ ID NO: 2451 - DNA, 909 bp, Zea mays
  unsure (1)..(909): unsure at all n locations
  Clone ID: ZEAMA-23APR03-CLUSTER3437_5
acgcatcattgcgctactccgcgctgcactccctcctcccgtgtctgtcgcctcgcctcaccttgcccctctcgtgttccctccccccactgctgctgccgtcctccgtcctcttcttctttgccgtgccggtgcaccaccgcgctctttgcttagctagctagctatatatatagccagccgagcaggcttccttttcccagttcaaacagtgcagcgtcggcggntggcggggacgacgacgcgawtgaacgccttcttcacgtccctggcgcgcgggctggacgacctgggccgtgcgggcgggctgtcgtcgctgtcggctctgctgcgggcggccgcgctgctcagggggctgcactcgcagtcacgctcatggtcggccagctccacctgccgccgggcggccgctggctcgacgagtacatggatgagacggcccgcctctgggacgcctgcctcgccctcaagctcggcctcgcctccgtcgagcggtattgcgcggcggcctcctgcgccgccgccgcgctggatgactggctccaggatccttctcctctgtccactcgccaggtgatgccgggcgatctcccgtgtcgaggagggaggccatggcccgcggaggaggagaacccgcgcgctggcggacgcgaggatcgcgccgctgtcgctgcatctcgacgagcgtctgctgctgcgcgccacggacgcgaggctcgccggcttcaacggcttccgggggctcctgtacgcgctgcacaacgcgagctcgctcctcctgctcatcctggccagcggcgcggtctcctgcgccgcggcggccggcggcccgtgcgccgccgccgacgacgccggctcggacggtttcactgcgtccatcgcaatgctgcagcagaggctggcggagga

SEQ ID NO: 2452 - DNA, 758 bp, Zea mays
  unsure (1)..(758): unsure at all n locations
  Clone ID: ZEAMA-23APR03-CLUSTER34439_1
ctncgtaggcccccccccggccaccactacacaggcaaagctatagctaagtgtgctcgcgtgggtacgtgctcgagcggatccatcgatctctgggacgaggatgaaggcgagcaacgcggcggcgctggtggcgctgctgctggtgggcgtggcggcgggtgcggccggcgccatcaaactctgcggcgtggaccggtccgcggtggacgcgtgcacgccctagtgcgtgtcgggcagcgcgcaggccgcgccgggccagctctgctgcgacaaggtgaagtccgcccgctggagctgcctctgcgactaccggagcgctctccccagcggcatcgacgccgcgcgcgtcatggacctcgccaccaagtgcaagtgcgactacccgccggcgtcctgcgacgccaactagctagccgtttattctcagtgtctacactagactagatctagatgccacaccggacgtgtctcgtggccatcaattatcgtgtattggtgctttatttatcatcgtttcagtgctacgtacggtacgggtatagtaacaaactgtgacggcctgacgggctctgcacactgcgcgcaggctgcatgcttgtgcactgcagtcgtgctcgtgctcgtcggtgggctatctatctatctatcgaaaaaaaaaaaaaaaaccctctcgtacgtacgtgtttctttgctgcgtcctactagtactagctcactgctgtggcactgtgcctgtgcggtgcgtccacgtcgtc

SEQ ID NO: 2453 - DNA, 966 bp, Zea mays
  Clone ID: ZEAMA-23APR03-CLUSTER3443_11
cggcggtgcggtcaagttgaaccatggcggactccaaggccacctcggcggtcacttccgcacttggcaagttcatgaccaaccgcctgctggcccgcaaacaatttgtgcttgaggttatccaccccggccgcgccaacgtctccaaggcggagttgaaggagaggcttgccaagatgtacgaggtgaaggaccccaacaccatcttcgtcttcaagttccgcacccacttcggtggaggcaagtccactggcttcggcctcatctacgataacctcgagtctgccaagaagttcgagcccaaataccgcctcatcaggaatggtcttgctactaaggttgagaagtcccgcaagcaaatgaaagagcggaagaacagggccaagaagatccgtggtgtcaagaagaccaaggctggtgacgccaagaagaagtaaacagtcatttatatttctgtattactgtcctgaactctgggtggtcgtctagttgcaatgtcataattatggtcgtgttaggtttcgttccgcactcagcagtaagtgaagtttgtaatttcctggatgtgaacttacccggattggctgtagcatgttgtgagatgagaaggctattttgtcatgcagttgtgtcatttgcaagccaatccattttgtcatgcagttgtcatttgctcacctctgatccatatcagctttgatcgtgctgcatttgcgccaaaaaaaaaaaaaaaaaaaaaaaaaaaaaaaaaaaaaaaaaaaaaaaaaaaaaaaaaaaaaaaaaaaaaaaaaaaaaaaaaaaaaaaaaaaaaaaaaggggggacatttaaaaggttcaatttttatgtaccggggtatgaaaaggtataatgtgtttaataaggtaacaaaaattaaatccaatggcccggggtttacaacaggttaaacgaaaaaaccctggggaaaaccaacttaatccccttag

SEQ ID NO: 2454 - DNA, 1190 bp, Zea mays
  unsure (1)..(1190): unsure at all n locations
  Clone ID: ZEAMA-23APR03-CLUSTER34537_1
ggaaaacagctttggccccatgttcgccaagcgcgcaattaacccttttttctttttcgggaccaagctggtctcccccaagggacaaaaggggccctcccgggggagtcccccccaaagcttggtcagaatcgcacgagaccaccggccccttggccgccaatcgcagtatcggcaccgttcttccccgcttctccagtccagctcaccagccgccccccctccgctgctgacactgcgaagtgcgaatcaaagccaccaccgcgcacaaaccatggcaccggtggaggcggagcagcaccggcggagggcgttggcgctcgcggcgcacgacgcctccggcgccgtctcccccatccgcatctcgcgaaggtacgcctacgcgttcgcgcatgccgcatgcgggtggtgctggcagctggccgtagccagacgacgctgcccgctcgacctgtttctagcagccgcctagctagtgatgggttgctggcctcacccaattgcggtcggttgatgaaatgtgcatcggcgtggaatcgggtgcgtgcatgcagtgcaggattagcaaaccgacgcgcgggtggaaggaatctggcgtcgcgggttgctggatgttttcgcctcccgtctgaggaagtgtgcggctaatttggcttggtttggagttgaggtgcaatgtcggatttttgcaaggttatgagaggcgagcaggatctttgattagttgttgctagctgcgaaattgagattctgtggttcttgttagcgtgggcgtcgatctgcattctgcacctatagctagcgtatttcatgggatgtttagaggtaaaacctcaaatttattattattagcagagggcaccaatttaaaaaaccctattttttactatctcaacgtttctagttgagttgagcatccgtatgcagtgttgcagtggaatgaaagtgtcataaaaaaaaaaaaaaaagctatcgaaccgtcgaaccctcgaggggggggccggntacccatcggcccnataatgaggcgtataccgcgcttccctgggcgccgtttacaacgccgggactggaaaaaacctggcggtacccaactaatcggctggagcacatccccttcccgggtcacatgaatcgtttgacttttaaataggagtatgaaatatagatcccaccaactggattagatt

SEQ ID NO: 2455 - DNA, 2020 bp, Zea mays
  Clone ID: ZEAMA-23APR03-CLUSTER34551_1
cgccagcccatcccgttctcccccgggtaccccctcgcctgcatcccctccaggcagtcacctggccagccgctgcttggctaccgcccccagcaaccccaccgccccgcatcccaccaaaaaaacccaaaaaaacaattggcagcgcaaccgcccacagctcgtgacgaggcgacccaacccccccgtagcggcggcggcggcggcgagcaatcctccggtccggccggcggaaacactagcggcgggaggcagagcgtccaatggcggaggacgggggcaaggccgcggcggcgactgcggcggaggcgggaggcggaggagccaaggagggcggcgaggagaggaccgtcaagctcttcgtgggccaggtgcccaagcacatggccgaggccgacctgctcgccttgttccgcgaggtagccgccgtcgacgaggtcaccgtcatcaaggacaaggccaccaaggtctcccgagggtgctgcttcgtcatatgcccctcaagggaggaagctgacaaggcggtgaatgcctaccacaacaagcaaaccctctctggggtatgcgagcatactactaaccttgttctggcagcaagtcccttgcaagtaaaatatgctgatggagagttggagaggcttgaacataagcttttcattggaatgcttccgaaaaatgttacagacactgagttgactgatttgttttccaaatatgggaatgtcacggatttgcaaattttgagaggttcacaacaaacaaacaaagctggctgtgccttcattaaatatcaaacaaaagatcaagcattggcagctattgaagctctaaacgggaaacacaaaatagagggttctagcgtgccgttggttgtcaaatgggctgatacagaaaaggaaaggcaggctcggaaagcacaaaaagctcagtcacagctatctcatatacccaatgcaagtccaatgcagcagcactcttcagtatttggtgctttacagatgggatatatgcctcaatacaatggatttggttatcagccaacagggacatacggacttatgcagtaccctctatctcctatgcaaaatcaaggccccttccagaatatggtccaacctcttaatcaagggaactcgataagaggagtcaatcctgaagtgtctcccagttcagttcaaaggtcatttaatgcaatgcagctaggcagcccttatcctgctatgcctggtatgcagtatcctggatcatatcccggtggtcccatgggcaaccgtcatttgggaaattctcacaatccgattaaagttccaaattcgaatgccaattccactgtttcttctagtcccagcagcaatgctggtgggcaggttgaaggtcctcctggagccaacctatttatttatcatatcccacaagaatacggtgaccaggagctttccagcgccttccagagtttcggaagagtagtaagcgctaaggtgttcgtggacaaagcaacgggcgtgagcaaatgcttcggtttcgtgagctacgactctcctgcctccgcgcaggcagccatcaacaggatgaacggctaccagttaggcggtaaaaaactcaaggtacaactgaagagagaaaacaacaccaagcacagtagtaaaccgttttgacagacaaggcagcagccgtccggtacccggtacatattaattgaccatcaacacattgcagcagcagccttcagggcctggggagggaagagacccgtgtacccctctttgttcacttcaacattcttggagattcgtcagtcagctcagctcgtgtaattcattgcagcagacataggccgtagcagcagtttgtaccatgatcagatcacttgtacacatgattcattcaattgttactgacagccggctttcatcctagaataattcgctgtgacaaccttatcatttgctgacgaatgaagtcaggtagacttgttcatctatggaatgatggcaactttcgagcaaaaaaaaaaaaaaaa

SEQ ID NO: 2456 - DNA, 1422 bp, Zea mays
  Clone ID: ZEAMA-23APR03-CLUSTER34610_2
cacgagaccattacctagaacatcctaatcgaaaaacaccacagcacaccaaccgcgcgccactgatccatcaactccactccactagctacgtaccttccgaccgagcagccagagagatggagaggatggtgatgaggctggtgaggaacaagcagtccctccgccagctgcaaggggccgccgccggcggcctagcgtcgtcgtcctccgcctcctcgaccgccggcgccgccgcgtcctccttctccaccctgcagcagcagcaggaggaccaccccggagtgctcaacatcagggacaccgccgcccacctcatcggccggacgccgctggtgtacctgaacaaggtgacggaggggtgcggcgcccgcgtcgccgccaagctcgagttcctccagccttccttcagcgtcaaggacaggccagcaatctccatgatcgaagacgcggagaagaaggggctgataaccccaggcaagacgacgctgatcgagcccacatccgggaacatgggcatcggcctggcgttcatggcagcactcaaagggtacgagctcgtgctgacgatgccatcatacaccagcctcgagaggagggtggtcatgaaggccttcggtgcgcagctcgtgctcactgacccggccaaggggatgggaggcaccgtcaggaaagcaacccagctctatgagaaccatcccagcgccttcatgctccagcagttcgagaatcccgccaacgtccaggtgcactacgagactaccggtccggagatatgggaggacacgctcgggcaggtcgacatcttcgtcatgggaatcggcagcggcggcaccgtcaccggcgtcggcaagtaccttaaggagaagaaccccaacgcaaagatctatggagttgaacctgccgaagcaaatgtcctgaacggtggcaagccagggcctcacctcatcactggaaatggagttggatttaagccagatattttggatatggatataatggagaaggttctagaggtgaaaagcgaggacgccgttacgatggcgcaacagttggcactgcaggagggcctgctggtggggatatcatcaggagccaacacagtggctgcgatcgaactcgcaaagaggccagaaaacaaagggaagctcatcgtgactgttcatccgagcgcgggagagcgatacttatcgtcggcgctattcgagggtctgaggaaggaggctgaggcaatgcagccagtgccagtggactaagttggagctatacaatgcatgtagaataaattcactgcaaccatgttgcaagtgctagtcatacctcatttgtgattcttcagtttgttcatcatgtggaagtcgtgtaaacaacagttcaaatggttgaaaaaaggactttacctctctaaaaaaaaaaaaaaaa

SEQ ID NO: 2457 - DNA, 1407 bp, Zea mays
  Clone ID: ZEAMA-23APR03-CLUSTER34639_1
ttttttttttttttttgtgagcaatgaaaatcggggttttcaaatttgaagttacaaagtgctcgagatttacgaaattcaacgaatttcgagcgatttttcgttttcgcagacccaccggaaaatgcgttcaaaacctgcacgtactaattcatcaaagaagattactacgtacgtgcatcgcttttgagaaacgagcagagcaacctgcattgtatgaaactggaaaccgttggccatggttactcagaagatcaaaacggtggcaagcttggccagtagctccttgagaacagcagggcagctggcgttgagcacctcgaagccatccgtcgtctcagtgaaggaggcaagattggcgctagaagagaggaaacgaaagcacgcctccttgagcgcagggcaatggtgtcggtcagctaaaaccagcatcgtcgccaccgagtccgcgcgtatgtgcttgcacagcttctcctggcaaaccagcttcatcctgtcgacgccgtacctgtccgcggcggcaagcagaagctgatagtgcaccatggcttcatcgttcgtcgtcgtcgtcgtcgctgtcggtctccggcggcaacgagtcggtgtagatgaaggccagcagggcgctgaacacctgggcttccatgtcctcaaccggtatgacgacgccggtgcccttgttgctctccatcatctcgccgaacagctgcgctctgaacacgggcgaccgcgccgcgagcacgcaccggtgcgcggagaacgtctcgccggcgtcgaccagctggaacgtgacgtccgcgccgtccttgcgcgccagcaggtcgccgaggtgccggtggaggtcgtcggacgggggcaccgcgacgtcgccgtcgccgtcgccggccgtggccgcggcgaagggcttgatggcgatgtcacagcggacgtggaagcagcggccgccgtcgttgtcgaggtagtactcctgccgctccaggtcgtccctggtgaggaagcccggacactccaactgccacatctgctggatcaggcagttctggaacaaggtggctcgggtcctggacggcaccggcaggcctcctcggtccagcaggctgagcttgaacgaggcgttgaggggctcgcgggtgctgctgtagggaagagagacggtgaaggacgccgtaccagcggcgggatcagcggagcagacgcatcgccagtggtagccctgtatgcagggagaccatgaagagtagtcctcgtccaagaaggcagaactacgctcgagccgggcggccgcgatctcgaacaggtggtgctcactctccatagtggtaccgtctcgtctcgaactcgacggcggaggctcagggggtgctcgtcggttttttgattaggatgttctaggtaatggtctcgtgc

SEQ ID NO: 2458 - DNA, 1759 bp, Zea mays
  Clone ID: ZEAMA-23APR03-CLUSTER346769_1
ccattacctagaacatcctaatcgaaaaattataagcaagcaaagcgcagacttgcataagcaaaccccagccgtcgcagacttgcataagcaagcaaagcgcaggcctcgctcggcctctcgccagttcttcctctcttcttcccgcgacgtacgtcacactgcagcctgcttgctactcttgatttatcatccctcttggtgccgagcaggcagacgtagctgctgcatctcctagctgcctgcctccgttgattatccgatcgacctgttcgacaacaacaagtgaggacgaaccaggcgatccaggtggggcccggccggcaatcaggtgaaaagttgagctgtgttgtcaagacagactgacagagacatcagtttctcgctcgcatcacatgcgtgcattctacgcgggcaagaagggcgatgagagcagtccgtcagctgatgtattagcaaccacaagagagagagggaagagaagagaacaatgagtatttattatccagcaaagagtccaaagggcccagtagcagcgttccctctacggtctgctctcgtcttcttcgtcacatcgttcggcttctacgtctgctacttctcctcacgtcagataatagccctggaaaccgaagcagaaacgacggccagcggaggcggagcagaacccacagagacccgttgcacaaataggcccgcgatcattccacatgggccacagacgcggtacgtgcacttcccgaggcccgccacctacgacaggggcgaatgcgtttgtaacccggtgcgcttcttcgtgatcgtgtcgacgcagaggtcggggagcgggtgggtggaggccttgctcaacagccaccccaacgtcagctccaacggcgaggtgttctccatgagggagaggagacagaacctctcctctgttctggggactcttgacaggctgtacggcatggactggctcaccagcgcggccaagaacgagtgcacggcggcgttcgggttcaagtggatgctcaaccagggactgatggaaaaccatcgcgacatcgtgaactatttgaacaggaagggtgcgatggtggtgttcctcttcaggaggaacacgctgcggaggctcatctctgtggtggccaacaactacgacaggagagcgaggcagctcaacggcgtccacaaatcacacgttcattccaaagaggaggctgaggtcctcgcaaggttcaggccggagctggacgcgccggctctgattccgagcatcagaaccgcccagcgcgccgtgagagcctgcctgcgccgcttcggcagcacgcgccacatggtcctctactacgaggacgtggtccgggacagcaggaaggcgttgtcccgggtgcaggagttcctcggggttccggcgagggagctgtccagcaagcatgtcaagatccacaccaggcccctcccggacctcgtcggcaactgggaggaggtgaggcggacgctcgcgggacagagtacagccgattcctagatgatgatgcagagtaggtcaagtgtcgagtttctatggaggtaatacaagacaaacagtcaagcggagagatggagaaagcgatgggagttttatctccgcctttacattcctgtgtaggtatactggtttaaactcatcattgctgcttgggtagtggggtgccgcgtgggatagcaaaaggtaatgtattggttcaagtgcattacataaaccaaagtcttgaaacaaaaaaaaaaaaaaaaa

SEQ ID NO: 2459 - DNA, 1047 bp, Zea mays
  Clone ID: ZEAMA-23APR03-CLUSTER34703_1
cggctccctgtggcccgcggcgtgagcgtgtcgtgtcccgcagggccacctttgctctctaaccccttccaccacacgcgaccgccgtccccgcgcgagttgccgaacccacgtctcccctcgccccgcgccgaccctaccaaccctcgggcccgcccatggagatctccgcctccgctgcgccggccgcctcctccccgcccgccaggccgctggtcctgcgcccgttcgcctcgtcatcgccccacccggctacgtcctcctcgaccaccatccgccgccgcccatcctcatcggccactgccacggtccgccgccgcgcgcgcacccgtccccgtacagggcggtccaagccccccgccgacgcgggcgactacttctccggcaacgacggccccggtctcggtggttccggcggcggtgacggaggaggacggtggagctggaacagcgggttcggctctggatcagacggccccgacgactgggagcccgatgtgccggcgccccggaggtcagcggcggatgcggcgctcggggtcgtctacgagctcatgtgcctcatcgcgctctccaactgcacccagttcgccgtccgcaggctcgcgggcctcctctccgcccgcgtcgccgcattgcgattcgtccccaccgtctgctgatcatccgtgggggtttgttttacttcctcttcctcctgcccgtctacctgaaatcgcttctgtacatatatcagcctgcaactgcggttttaggggattggggccttgggggaatcaggacctctgcctgttgttcctcggtgcgtgcctcaagcattataccgttgaacagtagcaaaattcgtcgaatccaattggagaaacacaaaaataagatcaacttgtttatcctttgttgttgtactcaagattgattgatgcctattgtgttaggatgcatcatcatttccatgtgtatataaatgtgctgttatttattttcttggtacttcatggaatgtcaagggcagtgcgtttgggcaaaaaaaaaaaaaaaaaaaaaaaa

SEQ ID NO: 2460 - DNA, 1310 bp, Zea mays
  unsure (1)..(1310): unsure at all n locations
  Clone ID: ZEAMA-23APR03-CLUSTER34706_1
nttttttttttttttttttttttttttagagcagaaagataaaactgagtaaaaaattcaactaaagataaaaatgaggaaggtgacaaaactaagggtataaatttaaatatcccatgctgcacgccacaccatcgccaactccagctctcctttctgaatgccggtccaagtgtccaacagatgacgtcacacgaacgacgtctcctggccgtcttcaaagaaggcgccggtgaccccgcctcccggcagcagcgccaccttgaccacgttgcccgcgccttcctcgggcgtcaggagccccgagcgcaaggttatgtcggtcttgatgtaaccaggatgcacgcagttgacgcgcagcgtcggctgctccgccgccaggatcctcgagtacgcgttcatggccgccttgcccaccttgtacgccgcgaacgccgccggccacccgcgcgcgtcggcctcgccggcctcgaagtcctccaggaacgcgtccagcagctcgtccagcctcccctcggtcagcttctcgacgttgtgcagctcttgcttcagctcctcgtttctgaagaacctaagcagcccaaagtcggaggagacgttaacgattcttccgtcagaggaggctcggagcagaggtagcaacgcttcgatcacatgcttggtgccgtagtagttcgtcagcaggccttctttgcagcgtcgtaagtctcccgggtattcctccacagacattcaagcctctgatccctatccatgccgctcaattcttcttcacttgtcactgacccagcagcagcagcagcaggaccccgggcgtattcgacgccgccaaacgcggcattatttatcagaatgtctagcctcccgaaacgggccttcaagaaaccggctagcctagcgatgctcgacgcgtccgtgatgtccagcagatggaaaacgacgtcggaaagacccagcgctctgagctcctccaaggcagctgcgcccctcgtctcgtccctggctgttaagacgacggtgatgccgttcccggccagctgccggcacacctctagcccaatacctttgttcccgccggtgaccacggcgatccttgcgcctggggaagtagagatgactccctccatgagcgtgcgccacgagctctgcttcttctggtcagcctggtggctggtgctgtagtgtatgcgtatgtatatgaatatggtggnnctggtgnnctgtagtnnntatgcnngtatgtnnatatgannatatgagggtacccttctccaaccgcgcacgccgctggcgcggacggcgttgggcgg

SEQ ID NO: 2461 - DNA, 1091 bp, Zea mays
  unsure (1)..(1091): unsure at all n locations
  Clone ID: ZEAMA-23APR03-CLUSTER3473_1
acacacacacgactagcaggcacagcagcaccgactagtcaatctctacttgcctacacagcagaaggaaccagacagggaagtagggaaccagagaaagcatagcaatggtgcggaagccgatccacgctgacgacgccggcgctaagagcacggaggcgagcaaggagaggaaggggttgtggtcgccggaggaggacgagcggctcttcacccacatcacctaccacgtcgtctccacctggagctccgtcgcgcagctagcaggcctgcggaggagcggcaagagctgccggctgcggtggctgaactacctgcgcccggacctcaagaaggagcccatctccaagcgcgaggaggagaccatcatctccctgcagcagtcgctcggcaaccggtggtcgactatcgcggcgaggatgccaggcaggacggacaacgagatcaagaactactggaactcccgcatcaggaagcgcctcaacgccgccgcctccagagctgcaggctgcggcgacggcggtgacagcgcggccgagccatcgggggccgcggccgcgggaggaaaggaggattcggccaacgctgcgccgccgccagcggcccagcctacgcccatcccggcgcggttcccggtcttcgggtgccagctgcccgacggagccggcggcggcatttcgtctcccggcagcggcaagagtccccagtcgtcgactactgcgagtatgcggcagaacgcgggtgacgagagcgatgcgagcgacggtggcggtggcgacagcgacatggtccatttcctctcgttcgatgatctggattatcccggggatttgctcattgatgtgccgggcgccatggacgcgtgggagagccaactgtgctatgcgaatccgatgatgagctcgctctgttgatccacactaccaattgcatatagcacagccattgtcttgttcccgctaatcatatataggttgtatgaattgtttatgtgaaatttcactgggttttttggagaaggaatgcatgatgacgtgtgggtattcctattaaaaagaaattttgatcaatcaagaaattttgnnatcaca

SEQ ID NO: 2462 - DNA, 1713 bp, Zea mays
  Clone ID: ZEAMA-23APR03-CLUSTER34835_1
gcacgagaccattacctagaacatcctaatcgaaaaaaaatcacttcaggtaagggcgaagaagagcattccctctcccggtctccccatctcccgaaccgcgtgagccaaaccctcccagctcgcgcgccctcgatggatgcctccgccgccacccccgcccccgggccttccttctctggcgccgagtcctccgcggccgccgcccagccgccggcggaggctccgcagttgcgcgtccacggcgccggcagcggcagcggcgtcgcgcgagcctgccgccaccacgcgtacagccgcaagcagaagtcgctcggccttctctgctccaacttcgtggcgctgtacgaccgggaggacgtggaggtgattgggctggacgacgcggccaagcgtctcggcgtcgagcgacgccggatctacgacatagtcaacgttctcgagagcgtcgggattcttgtgcggagggccaagaatcggtatacatggctcggattcgggggagtccctgctgcgctgaaagaactcaaggagagggcgctaaggaagatgtccggatcaccggtgttactgtcaatggaggactcgtctactgccaacttatcagatgatgaggatgatgaaaaattgggcgatgctgatgaagatgctgagagcgagaagctcagccaacctgttgacaatacgtctgataagcctgacgcacccagctgccgccttagatctgatcatcggaaggagaagtcccttgggctcctcactcagaattttgtcaagctcttcctcaacatggaggttgggacaatctcacttgacgaagctgcaaggcttctccttggagagggacatgcagacagcaacatgagaaccaaagttcgtcgattgtatgacattgccaatgtgctgtcttctttgaacctcattgagaagacgcagcaagcagacacaagaaaacctgcattccggtggctaggccaggcaaagcgaaagcaagataacaatgtcatggtttctgtacctccatcgatgaaggcaatgcccaataagagagcatttggtactgatcttacaaacattgacaataagcgaggcaagttagactcagcagcggagaacaaagtcaagctcatgcagggtgctggtaacatagtgaagacttttgagaggcagctggtgcaagggaaaaggagtgactttgtttatgggcccttccaccctgctggtgcaaagaaacacgaaactgatgatcaaactgttaagcagcaggagaggaagaacattcaggactgggaaaaccttgctgtgtccttccgtccacaatatcagaatcaagcactgaatgatctttttggtcattatgtggaagcatggaaatcatggtacgtggatcttacccaggaaacggcatcatgaagcagaatgttggcaggtcagttgtaacttgtaagccgtttccagtagttagatcaactgagttgttgatgcttgcttagggaaccaccctgtacaagatggaataaaaacacgaaggcaattttgtctttcgactgtatttactcgaatgctagaagtgaggccattttttcataaggaaaaaggcagggaaaatggggaatcgatcgagttatcaaattgttgctagtggactattctggagtcaaccgagttgtcccccaaccaaaaaaaaaaaaaaaaaaaaaaaaaaaaagaaag

SEQ ID NO: 2463 - DNA, 1428 bp, Zea mays
  Clone ID: ZEAMA-23APR03-CLUSTER3495_3
gtccccatgcatacagcatacttcagcctctctctcggttctcccgggcccctcgcgtgcgctctgtcgccgtcgccgccgccgccaacctacgccaagtgcccagatctccaccctcgggaccttcgccggcagcgaacacccaccaccagctgatatagggcatttacccttttgtgactatggcactagcggctatctataaccttttcatcattaacaaatcaggcggccttatatactacaaggactatggttcagcagggaggatggataccaatgacagtctaagattagcaagtctgtggcattcgatgcatgctatctcccagcaactctcccctacccctggctgtactggcattgatctcttacaagctcataactttgatctccattgctttcaatccctcacagggacaaaatttttcgttgtatgcgaaactggagctccaaacatggaaatgctgctgaaagtgatttatgagctgtacacggacttcgttttgaagaatccgttctatgagatggagatgccgatccggtgtgagctgtttgatcacaacctggctcagatgatccagaaggaccgtgttgcgcttctgggtcggtgaatcttgaaaactcatggtctcagcccttgaaaaccctacttttcccgttttcgacgcttggacttgctctgctggaaccctaaattctaccttgcggcactgctgtgctgtgcataaccgataacttgaatagtgtgttgctcgcttgtaatcttcttgcggtgtgatgaaatgtagagctttgcgggcataaatgccgctgcaaatagtaacaacatggaagcagcttttgttcttgcatgttttccctgcaatgagcttgagcagcttgatcagggctggaagggccgccgcatagatccagggaaagagagacgcgtttgtggtccatccataattcatatgaccggagagcctgaccctgacgccaacggcaagcagcagtggcggcatccagatcctggcgcaccgactgcacccgcccgtccggcaccttctttcggcggcagcggcactccgcgcgacacggggccgtgtccgtgtgggatgggatgggatggaatggaacagtaggctttttgggcatttgcgaggacgcccaggcctgactcctctgaggccatctccatctccagcaggccgtataaacggctgtcgtttaggcatgcattaaccagagtatgagatttatgggagcaccttgagtggctcatggatcccctggactagcgtgcgcggtccatcacgcggtgtctgtttctgaattgagggtacgagggagcaataatggagcagccatggagatttcacccaacaacaacaacaaagaaaaaagaaataaaaagaggagatgaataagaatggtttacctatc

SEQ ID NO: 2464 - DNA, 512 bp, Zea mays
  unsure (1)..(512): unsure at all n locations
  Clone ID: ZEAMA-23APR03-CLUSTER34991_3
gcacgagtagccatgtctttgtgttttggtcccccactagtttccttgtactgatggcaagttgctgaggacggatctgctgctgccgccggcgccgacgtgttaccccgactcgctcgactccgccctgctccgttgagctcaagagctctccgtcgccgtcgccatgggtaaggttcacggatcacttgcccgcgcggggaaggtgcgtgggcagacgcccaaggtggcgaagcaggacaagaagaagaagccccgcggccgcgcgtacaagcgcatgcagtacaaccgccgcttcgtcaccgccgtcgtcggattcggcaagaaacgcggccccaactcctcggagaagtagatatagccatgtctttgtgttttgatcccgcactagtttccttgtactgatggcaagttgctgaagacttatatgctattattatctgtatcgatgtgttactgcaacactatgaaatatggtatgcatcgttganctacaaaaaaaaaaaaaaaaa

SEQ ID NO: 2465 - DNA, 677 bp, Zea mays
  Clone ID: ZEAMA-23APR03-CLUSTER350024_1
attagcagctctctgattcgcttcctgcccctggctgtggtcttcatccgtccccccgcgccgccgtccgtttgcgccgtctgctctagggtttgttcttctcctccctcctcctccccgtattccccatcgcggcttctcttctccccctcgccctccctccccccactcccccattctcatccatgtaacctgtgcggtaagatttgcaacatcgtttcccaattttgcctggtctgtaaccctagcttcactgtctcctgtccgtggctccatggatgcggcggctgagctttgtgcgtgtgctctgaagtgctccgctgccgttgatgcagctcctgacaccgtaagtgcttcgtttacggcggcggttgtagctatgacttctgtgccacatattctcgaagtgacgaagttgtttctacctatgatgttcttcaaactgctgttgcgacggaggaaaagctaagtgtgcattcaatcacgcttgtgccgccgtcgtgtgtggtgaggaggcgttggcatcccccagtaaggtttgcattcagctacttcttacctgaagcagtgaatatctcctgtgtacagcgttgtaatatgtacatttgttactgtctgaaaagcttgaattgatggaattattatgagatagatgatggctgataggaactactgat

SEQ ID NO: 2466 - DNA, 701 bp, Zea mays
  unsure (1)..(701): unsure at all n locations
  Clone ID: ZEAMA-23APR03-CLUSTER35010_1
cccgggcgccctgctgcgtgctgcggctgctgcccttgtgcagttgtgctccttccttccttgccccgtaccccgccggcgcgccctgagccaaatcgcaggttgccatagtgccatggacgaaggtgcgacgacgagcgactcgtccgctgccgagacatttgatccggacctggttcacgccatcttcaagctggtgtggaggcggcgggcggggaagggggccgccggcggcggcggcattgaggacatcgacgcggagcgtgctccagagacatcgaggagaaatcggagcacaactgccaatgcgaatgctcttaaagtcagctgcgaacttctacgaatatttgttacagaggctattcaacgctctgcttttatcgctgaagcggaggatggtgctgttattgaacccacccacctagagcgtgtgttgccgcagctgctcttggacttctgagggtaccccatggagcctccaaaagcatttatctaggcgtgtctgccatggaaggatacagatgcctggatgcatcaatagaatctttccatgctgatctatgtcttgtactctgtaaacacacgagatttctatatggctttataaaaatgcatgcatttcttggaatgtttgcatgcatttcttgaaaaaaaaaaaaaaaaaaagatgcctgctggcaaaaaaaaaaccnatattatta

SEQ ID NO: 2467 - DNA, 1414 bp, Zea mays
  Clone ID: ZEAMA-23APR03-CLUSTER3504_1
agtagtttacacaaaacggaagatcgattatccgctccgtggcctcccgggaaaggggcttaactcgagtcgctaatccttttccttatcgccccgtctccgacctcgctcgccgccatggatggttcgaaggggagcgtaggtggcgtggggccggtcccgggcccgaaaagccaagcgccgagtcgaaccctagtctacacccgccacaacctaccgcggcggatgtcgaagccacggatgacggtgggcccacggccgcggccgcggcagctgccgaggcggccaggcggcccttccatgaggtcagccaggaggaggctgacctcgccctagcccgcgtcctgcaggagcaggagcgggcgtacatgttgctccggatgaacgggggcggtggcgagggcagcgactacgggagctctgatgcagggagctacgaatacgacgaagagggagaggactacgaagaggaactggagcaccacctccgcgtccaccaccacgaacacccctcgggcgatggtgatggagagggcgagggcgagggcgccgaggggagcgattacgacggaaggagtacgaggaggacgaagaaggggagccggaagtagatcccgcggagtttgagaacgatgaggcttatgcgcgtgcgctgcaggatgctgaggagcgtgaggtcgccgcgcggcttatggctctcgctggtctcagcgattggcgaacagtggatgtggagcatgaggaggatcatgtgaatgacccacaggaggcatggcaagaggttgatccagacgagtactcctatgaggagctagttgcattgggtgaagtagttggcacagaaaacagaggtctctctgctgatgcacttgcttctttaccttcagtaacatacaagatgcaaagtgttcaggatggcaacacagagcaatgtgtaatttgccgtgtggaattggaggagggtgaatctttgattgcacttccctgcaagcacttataccatcctgaatgcataaaccagtggctgcaaataaataaggtatgccctatgtgcagtgcagaagtatcaacctccagcaacaaggagccatgattgctctcggatggccatcttgggcatttgatgggattaactagcggcaccactgcagcatctttatgcttcaaacaaaagcataaaggaacgtcttacatacatgcaaggagatcaggaaataatcctcttgtcagtctaaagttttgtcctggttttctgctcactggatttattggccctgcagcttatatggtcttagttcccttcggacgccttatgatccataaaacatgccaattatattatattgttagttattctttttactgatcgcatgatcgtcgtatatatttgcttgttgcccgctccccatctaga

SEQ ID NO: 2468 - DNA, 1184 bp, Zea mays
  Clone ID: ZEAMA-23APR03-CLUSTER350638_1
aaaataaatctcctgctgcagggtaatttccaccttcccgaaagccaaagaggaaaaaggaattgcgcctcccgctacgctattaccgccggcggccgctgccatggacgttggcgcgaaggaggaggagatgggtcaagtgtggtggggccaccgcgcgtggtccctcctctccgctgttcgtgcacgggcgccgctagtgcagtgcatcaccaacctcgtctcaatggacatcgccgccaacgtgctcctcgccgcgggcgcctccccggctatggtccactccctccgcgaggtgcccgactttaccccgcgctgcgacgccgtgtatgtcaacgtcggcacgctctcggaggactggctcccctccatgcgcgccgccgcctccgccggccgcccctgggtgctcgaccccgtcgccgccgccgcctccgggttccggatgaaagcctgcctcgagcttctgtcgctctgcccagcagtcgtcagggggaacgcctctgaaattctcgcgctcgcttcccgctcaaccgccgcctcttccaatttcaagggtgtggacagttcacattgctctgttgatgctattgaagctgcaaaagcgttggcactgtccagcagtgctgttgtcgcggtatctggagctgttgatttcgtcactgatgggaagcaggttatcagcgtgagcaacggtgtgcccatgatgcagaagatcaccgcaacagggtgcgctgtgactgctcttattgctgcatttgttgccatggaaccttctgatgccatagttgcagcggcatgcgctcttgccatctttggtctggtgggagagattgggatggagtcagccaaggggcctgcctctcttaggatgcacctcatcgacgctctctactgcctcaatgaagaaacagtcacttctcgggttaggatttccttgcgaccatgatgcgcggacgcatgccatggctactgttttttcaggtaaatatggagtttcgaataataggaaggctgagttcattttctgaaatgtcttgataaccatgaaaatcatagacactcctttaaccttcacgactgtacgaaatacctagatgtgatgcccaagttgtgcctgaattgtcagctgtacatatttaatacagtaaaatggggaaccttgtttctttacaaaaaaaaaaaaa

SEQ ID NO: 2469 - DNA, 1796 bp, Zea mays
  Clone ID: ZEAMA-23APR03-CLUSTER3508_2
tcatcatcgagtcatccatctaaacatccgatccgaccatggcggcagacgcacttcggggccttctccccggcgtttacgccgtgctgatggtaatcgccgtcacaagcgccgcctccagcgacgcgtcctcggtggtcgtcggcctcgccaaatgcgccgactgcaccaggaagaacttgaaggccgaggcggcattcaagggtcttgaggtggcgatcaagtgcaagaacagcaaaggcgagtacgagagcaaggccatgggcaagcttgatggcttcggcgccttcagcatcccacttagcacggacctccacggcgctgactgcgttgcacagctccacagcgctgcggggaacccgtgccccggtcaagaaccttccagaattgtgccacaatcgtcaaagggcaacttcgtcgtggtccctggaaagacagactacccatcgaaggaatgtgcgtccgcaaccctgtgtgggtcgatcaagaagcacctactagaccatttccacaagaaacctgtgccaccaaagccaaagccagaacctaagccagagctggagccgaagccagaacctaagccagagccagagaaccacccacctacaccaacatacggatcctcaactccgatctaccatcctccatccaggcagttgtttgacaagaaacacatgtttgataacttccacaagcaccacgactaccatcacttctttgaccacttccacaagaaaccagttccaccaaagccaaaaccagaacctaagccagaaccaaaacccaagccccagccagagtaccactctccaactccaacatatgggtcgcccacaccgatctaccaccctccggctaggcatttgtttgataagaagcccttgctagatcacttccataaggaccatgactatcaccacttcttagaccacttccacaagaaacccgtgccacaaaagccaaagctagaacccaagccacagcctaagcccgagtaccaccctccgacacccacatatgtttctccaactcccatctatcacccgcccgctgagacagaaatgaagtatgacaagaagcactttgatcactttcacaaggatcatgactaccaccacttctttgaccacttccacaagaagcctgtgccacccaagccaaaaccggagccagagccaaagccaaagccacaacctaagccagagtacaagccccccatgcccacatacgggtctccaactcctatctaccatcctccagccaagaaagaagtggcatttgacaagaagcacttccttgatcacttccacaaagaccatgactaccaccacttctttgaccacttccacaagaagcctgtgccaccaaagcctaagccggagcccaagccagagcccaaaccacaacctgagcctgagtaccacccacctacaccgacctatggatcaccgactcccatctaccaccctccggccaagcattgatcgatggagttgaatggtggtcagtgatcgacgtcgctagctaagagttgcatgtgtggtctagctagcgtggtttgcagtcctgcttttttgtttctacagaataaattatagctttatttgggtatgtatacttatttgtgtatcggttagtatcatataaatgtatgatttgagtgtgcgttgtttttaatatgcatgttctatgatgtactttattccttttaaaatattattatttatatgtagaagttaaaaggtttacaaaaaaaaaaaaaaaaaagcggccgtagtgtgatttgcttcttttcc

SEQ ID NO: 2470 - DNA, 1858 bp, Zea mays
  Clone ID: ZEAMA-23APR03-CLUSTER35120_1
gaccggcccgggatgtccaccggactttcgcagctctctggcggcgtcggcggcgaccggggctcctcctcctccgccggcccccaccaccagcacagccaccacccacctcccccgccgccgcccaagatcctcctcgccaagccgccgctgccgcacgcctcgtcctcgggcgccgatgacgacggcgggaccggggtcgcgggtggccgcgcgcgccaggcgccgcagccgggttcgctcagcctcgtctccgacgcgtgggaggcccacaccgacaagatccttccgtatctgacggagaacaatgatttcatggtgattggggtaattgggccgcccggtgtaggcaagtcgaccatcatgaacgagctttatggatatgatgcgagctcacctggaatgcttcctccttttcctacacaaactgaggaaaccagattgatggggaaacactgtactactggtatcgacatcaggatatctaatgagcgagttatactccttgacgctcagcctgtgtacagtccctctgttctaatcgatatgatgaggccagatggttcatccacaattcctgtccttaatggtgaacccttatcagcagacttagctcatgagctaatgggaatccagattggtgttttcttggcatctgtttgtaatatagtgttggtcgtgtcagaaggtatgaatgatttgtccatgtgggagctcatgcttacagttgatttattgaagcacgggatacctgatccgtccgtgttgacgtcatcagcttcccaagacaaggaaaacaaaaacgaagaccaaacgggctgcgaagactatatttccgatctctgtttcgtgcatactaggctgcaggggcaagatttttctccttcaaagttcatgcttctaaggagaactcttgagaagcacttcaactcatccacttttagagtcgggagctctaatgcaacgggtcatgcttctgattcgctggttccttcaagcacgaaagttgaagatttaacctccagtcggcaggacatatttcttcttcccctgagagggcacgacgactcgacaaagtttgagtatggaacgtactcgtgcatgctaggcatgatccgtgatcagatcctgtcatggccggcgaggtcattctcgaagaacctctcggagcgtgactggctgaggagctcagcgaggatctgggacatggtgaagaagtcccccgtcatctcggagtactgcaaggcgctccagagctcaggatggtttaggaagcaaccgtagtagtgtctagcagctacttgttgggatgcgcccgctttggccggcttggaaaaccagagaatcgccatcagatcaaatgaattcgcttgctctgttctgttcaatcagtcgactctgatgagataccgtgcatgtgtttgttagtttgttgggctttgtgtaatgagctcagagccagcgacagcaggtggcagtcagtcgtgtacggctcatgcttctctgcgtgtcctgtgctatgatttgaggctgtttcatgcgacgtctcataaatttcatcttctaaaaaatatatatttactgttctttaaaaaaaaaaaagaaaaaaaaaaaaaaaaatgctacgctgaggaagttagctcagtacaaaaggaatgttcagtagagagttacaaaccctaggccactattcgaaaacgtggcagctacatgggctgggtttaggctctattaaaatctaaacatgggctgggtataggttctatcaaaatctaacacagcattttattatgtaaatgaaataagtgtgagcaagtcatccctgcctaaacactagagtgtcatgcaaacattgttg

SEQ ID NO: 2471 - DNA, 3064 bp, Zea mays
  Clone ID: ZEAMA-23APR03-CLUSTER3514_1
gaaatcctccacaacccccatcccggaaccgttccgccgcaccgcgggccgcttccatctccaggggcaggggatcttggagggggtctgctggtgggtccgagcagggcagcggcggcgttggatggagactggggcggcggcggcaccggcatcgagggcggacggcgtgcggaggtgcaaaatactcgtgccctggcgtttccagcccggcttcgtcaggcagccgctcaagcaggccgccaatgacgcagcggtcaacggcgacggaggtaataccgccggcgcgcctgatgctaaaagttgccgagcggatggggcggcgagcgacggcggtgagaccaacgttttccgagacgcaaaaaaattcggatcgggtagggctacccgcgggaagaatggggaagttgacggaggagaggagcattcggagagatgcactagcagtcagagtttgaagagtcctgatgtagaaaatggcggtcgccctggacccggagatgcatgcaatctgggcgagtctgtaaggggaggctgggtgaagagctccccattggaaggtactggaaatagcaggggtgcaaatggtggcgtcgaggctggagaggactacaatctggggagctctaactgtgatgctagttggaaggacgctcgcacccaggaattcaggggtgctggtgatggagcagcttgcgatcctgaggtgattgagagcaatgtaggagcagagaagtgctttgccaagggtttgaagaagccgtttatggatcagaccgggtcaaagagcaatggttcttctgctccaggactcgagtcagaggaccctgagggaaatgttggcttggaagattcctcttatcaagccgcaaaggggtgtagcatgggagatggagcagccaaggagaatgaagcaacagccaatggttgcagctcggcgactcctggcagcattggtaatggaacgtacgtccgcaagggacggaaggcagctgtaccatggagatttcaggccaggtacaagcgatcgttctctgatgcttttggctccaataatgaatctcctgatcttccagcatacatgtttgacagtagttcaacacagtgcaccccagcaactagaagcaccgtgcggtgttatgcgagtgctcattctggtgttagagtttcggctatgaataacttctcagtgaaaggtgatactgaatgtaagaagaggaaaactaataatgattatcaggatgaatcaatgctaaataatggaggtgtcgttgttagagaacgcatcatgcggtctctacaggatctccgtttaatttatcgggaccttttagatgaagaagataattctagggaaaaagtgcttaatgtgcggcctgatctaaaggcttacagaatcttcagggagcggttctgcacagattttgatgatgagaaatatattggcagtgtgcctggaatatatcctggtgatatcttccatctgagggtagagctttgtgttgttggtctccatcgcccacatagggtaggtattgattgtaccaagaaggatgatggtacaactgtggctgttagtatcgtgtcatgcgcacaatctcatgacatcaagtataatctggatgccttcgtatatactggactggtggctgttgcagtcaatcagaggatagagggtaccaacttggctcttaaaaagagcatggatactaatacaccagtccgtgttatccatgggttcaccacttttaatggaaaaaagaaatttcctgcatatatatatggtggtttataccttgttgagaagtactggagggagaaagagcatggagaccgttatgtgtatatgttccgactgagaagaatggaaggacaaaagcacattgacatccaagaaattctgcaaacagggaactctggatcaaacgacaatgttattatcaaagatctatcacgtggattggagagagttcctctacctgttgttaacaaaatatccgatgagcgtccaatgccctattgctacatttcacaccttcgatatccccgtaactaccggccaactcctccagccggttgtaattgtgtaggtgggtgctcagactcaaacaagtgtgcatgtgcagtgaaaaatggtggagaaatccctttcaatgataaaggccgtattgtagaagcaaaacctctcgtttatgagtgtggtccttcttgcaagtgccctcctacatgtcacaacagagttggccaacatgggctcaagtttcggctgcaaatcttcaaaacaaaatcaatgggttggggtgtgagaactcttgaattcataccatctggaagctttgtgtgtgaatatataggtgaagtgttggaggatgaagaagcacaaaaaaggacgaatgatgagtatttatttgctattgggcacaattattatgataagtctctttgggagggcctatcaagatctataccgtcacttcagaagggtccgggcaaagatgatgaaaatgaaactggatttgctgttgatgcttcagagatggggaactttgcaaaatttatcaatcacaattgcaccccaaacatatatgcacaaaacgtcctttatgatcacgaagatatcagtgtgcctcatatcatgttctttgcttgcgatgatattcgacccaatcaagaactagcataccactacaattataaaatagatcaggttcatgatgccaatgggaacatcaagaagaagaaatgcctttgtggctcggttgagtgtgatggctggctgtattgattttttaaaaacttgctgtattacgtttagaatctgcagtttttttaagcataactgaacttgaacttgtttcattttgccttcatctagatcatgttgtgacaaaatgtaaaataagacatcagtgtttttagttgccaatgggggtcaagttttttcctttctcattctattcgttattttatatgtctagctttcaatatgtagaataatgtgtgaatatacatggcaataagttcaagtgaatttgctatatttgacaatttacataaaaaaaaa

SEQ ID NO: 2472 - DNA, 1484 bp, Zea mays
  unsure (1)..(1484): unsure at all n locations
  Clone ID: ZEAMA-23APR03-CLUSTER3518_5
tcagtcctcagtccgaagcgaactctccctccgcatccactgccaccatgagccgngatcgctacttccatcgcctcctcgacctccacctccacgccaacgacgacctcttcttccccttccctacccctgcctcgtcctgcccctacatcaccgcctcctccgcccaccaccgcttcctcctcgacgaccaccccttctacccaacctcctgcccgctcggcatcacctcccgctccccgatcgacgacaccttcgacttcgaccccttcctcctcgacaccctcggccaccgcatctccgtcctcgagcgcgcgctcgccctcgccccaccccgccgcaagtacacctacgccgccgaggccaacggcaggaagctcaagtggaccgccgaggacaggcccgccgggggccgcaacctcaagtgggaggccgagctcaggaccccgcacaccgacggcttcgaccgcaagtggaagtgggagtccaaggagtccgccaccggttccaccaaggtcaagtgggccaaggagatcaaggggaagggctgcctcgagccttggtccaactcctactccgtcgaggagacctacggtgaggatgaccatgccgacgacgacagggagaagaagaaacccactggcgtccagaagaaagtcaagggggaaaacaagcagcagcagaagaagcagggcaatgtggagatcgtcgagatcgaggaccaacactgccggatgcgtcgccatcagaaaggcttttgaaatgaacccactgcaagggcaagaggaaggaactttccccaccaggatgccgcactgctcatccagatgaactacagggcgcacctggcccatcgctcccaggtgctccgttgccttcgcgacctcgccgtcgccaaggccaagctcaaggagatcaggtccttcttctacaacatcacgtaccgccgccgcatcgcatatgacaatgaagagctccagaggtttgctgagaagatcattgtcctgctactgacagttgatgcccttgagggaccggactacatggtccgcaacgcaaggaggtccatgctggaggagctggaggggatgctggagatcgtggagcctcagccgccggggaagccgaggacgcttagccgcaggaggttcgatctcccagaaggcggagccatcgaaaaggagacgcgggaggcgggcaagtgaagtgcatcggtgggtggtggcatgcttgggcagtttggtatatgcgcgatgcggactatagagtttgagtttgtgctgctaccgaaccgtggaccaccttaccccgttgagatgtttgatagctggactttttgtgctgttgtatttgtagaccagaacgttgttctttgtaataaattggcgtgtgctgctttttgctaatattcgcttggctttaaaaaaaaaaaaaaaaaaaaaatattatttgcttaaatttcaaagaaaaaaaaaaaaaaaaaa

SEQ ID NO: 2473 - DNA, 1338 bp, Zea mays
  Clone ID: ZEAMA-23APR03-CLUSTER35193_1
gcacgagaccattacctagaacatcctaatcaaaaacaacgagggtcgcctctgccacaacaagggccgcctcgagagtcgctgaagccatggcgaccacggcgaccactgcaatcctccgcctcactccagccccttctccccgcaccgcgcgccctcctcgctctgctaccttcctccagcccgcgctctccgtttccctctcccactccctccccgactgccgcaaccaccgccttgccgccgcttccaaggacactgctagcagcaaggggcaggaacaagaccaagagcccgcaccgtcggcgccacaggaaggaggaccggagaaggtaacggaggtgggggcagcatcgcccggggagaagagcccggaggcggtggcggcggagctgaaggaggtgctgagggcgcggaaggaggcggaggccgccgagggccgcggcgggtggtgggcaggcgtggcgcaggagatgaccgagatcgagtggccggcgcccgggaaggtgttgggcaccaccggcgtggtgcttggggtcatcgcgggctccactgtcgcgctgctgtccgtcaacgccctcctcgccgagctctccgacaccgtcttcgccggacgcggacttcaggacttcttctccggctgatgaagcggcgtgcttcgtgtactctgtaactatttttttttttcttgcacttggggctagggtcatagatcaaatgttcgaggttggaattatgtccaattttcagttgccaagaaaaagatgatgagtcacttgcgaatttggtaatgttactaatatgtgagtgacattttgttggtaaatggtcactcgggaacctaacttgagttccttctgtttagtggtgagataataataggcttccagattacactaaaaaaaaaaaaaaaaaaaaaaaaaaaaaaaaaaaaaaaaaaaaaaaaaaaaaaaaaaaaaaaaaaaaaaaaaaaaaaaaaaaaaaaaaaaattaaaaaaaaaaaaaaaaagggggccctgggcccccattttttttcccttttagggggggttattgggcccctgggggaatccggggaaaaaatgggttcccgggggaaattggtttccccttcaaattcccccaaaaattagagccgggaagtttaaggggaaaacccggggggccctaagggggggcctacccccatttattggggtgggcccactggccccttttcaagggggaaaacctgggggccccttttttttaataaatggccccccccccggggaagggggtttgggttttgggggctttttccctttcttcgttaattaattggttggcctggaactt

SEQ ID NO: 2474 - DNA, 1180 bp, Zea mays
  unsure (1)..(1180): unsure at all n locations
  Clone ID: ZEAMA-23APR03-CLUSTER352962_1
cattcaccgcaacaacacacaacggcagagaccaagaagccgtgaccgtgggagagctccgagcgccagccgcgtgcggcgtgtccatactccatacacggaggaagaggaacagaggaagagcaggaggagatgtacttccgtccgccgcccaagggcccggagtggtacgccagcgatgcggagacggggcaggcggcgcggccgctgtacccaatgatgctggaggacccgcgtctgcggtgggcctttatccggaaggtctacagcatcctctccatccagatgctgctcaccgtcgccgtagctgccgtcgtcgtgttcgttcgccccgtcgctctcttcttcgtctccacgcccggcggcttcgggctctacatcttcctcctcatcctcccgttcatagtgctttgccctctgtactactactaccagcaccacccggtgaacctgctgctgctcggcctcttcaccgtggccatcagcttcgccgtcggcctcacctgcgccttcaccaaaggggaggtgatcctcgagtcggcggtcctcacggcggcggtggtgctgagcctcacggcgtacacgttctgggcggcgaagcgcggccacgacttcagcttcctgggcccgttcctgttcgccgccgtcatgatcctcatgctgttcgcgctcatccagctcttcttcccgctcggccgcatctcgctcatgatatacgggggactggcggcgctcgtcttctgcggctacatcatctacgacaccgacaacctcatcaagcgctactcctacgacgagtacgtctgggccgccgtcgcgctctacctcgacgtcatcaacctcttcctctccctcctcacgctcttccgggcggcggattcgtgagcacggctacctgccagctcgcgtaggcgcggcgacaggatcttggaatgtgccttgccttgccccgcctccggtgctgtctgccgaaattcctctgtaaaaagactaaagagaaataattgttttggttttgtgctttgcttcgcttgcgaagattgttcaacaaaaaaaatttttttatgtgaaactaactgtcgttttttgggacctatgtatgttttctgggatatttttttcttcttttgttatttttcctggaaaatttgattaatatatgtccaacagnatcggtgcg

SEQ ID NO: 2475 - DNA, 1197 bp, Zea mays
  Clone ID: ZEAMA-23APR03-CLUSTER35328_1
atccgactccgtctccagcaaccccattcggctcctccctccgtctccagcagttctccatccaaacaaaccgcgtgatccgtctgaccgctcgctcgctctcgccgggggtccggagctccccacctccagcgacccagtccatccgcgcgtgcagcgccgcggcgccgatggagtacgacttccgcggcggccgctcgagctcgggcccgggcccctacggcgcgcctccggggggcgcgcccgggggaggctcctcgctctacccgcgcgtcgggcagccctcccacggcgggggcggggcctccacggcgtctccgcgggccgcgccgtaccaccacggctccgggtccggatccggctccgggtcctcggctcccgtcgtaacgccgttggctccaacctccttctcctcgtcctcgtcctcgtcctcgaaagtgggcatacaagttgcgataaagcctgaattccgcattaccccacctcctcaattgccaccagagatggtagagattcctcgcagcaccttcaactttgattttgagtatgagagaatgattcttgctgaggcagagaaggagaaccccaactggactaaatttgtggtagaaagacaggctgcacctcttgtgccacagcaggctagaccagcatcgtcagggtcaggggatccagttgttgacaagtatgtctcaatggggcttgggcgtcaagccgtctcatttgcggtgttgaattatggagataatccaacaaaggtgaaagagttcgtgaaatcctacagcatcctccacgagatgggcttcacatcgccaaacgtccccgagctgctagccatccacgacaacgatcccgacaaagtcatccagcgactgctatcctcgccatcctgatcctagaagaacaagacgcctcgcatttgtgtgccgcatccatgtacagccctgcccctacgctggcaaccatcacagatgatgtatacgcgttgcctgccgttagttctgtgaaccgagtaacacgctttgtatgttgtacttgtataccgtcacccgtttggtgtttttccttcaaaaatgttttcgcatctttttattcacgtttgaattttttgtgagcctatacagtacaacatgattgggttaaagatgattctcgtcgagaaaaaaaaaaaaaaaaaaaaaaaaaaaaaaaaaaaaa

SEQ ID NO: 2476 - DNA, 2524 bp, Zea mays
  Clone ID: ZEAMA-23APR03-CLUSTER35358_1
ccgccggctggttccccctgtcccccgcccccgctggtccccgccgtggcaggcggggagccccccggcccgggccgcggcgtggcacctcttcgcttattgcagaggggggccgtgcacgggcgccgccagtcccttccaaaacaggtgcataccatttctgcaagatgtcactggtgaaggcttcttttacacctgccactggatcgggctctagcagcgctgctagtgacgtggaaccacaaatagtgccaactgaaaatgcagaatgccatggtgtaaaccctacaatgggcccccaagttctccccccccggggcgaccccgctctttttccccccgggtttccgcccccaactctctgttggtgttcccccccccttcaaggggggccaaaaaattggggagttccccccccgggggggggggggccgctttttagaattaatggggttcccccgggggtccagggccccccccccccccccccccgagctcagggcctgggacaccgcgagccaccgcaccgcttcctctgtgtggttcgacacttctgctcttgtgctctctgcagccatgagcgatttagttttgtgccagatttggtgtgatggcaattgcatgatatttttgtagggctcatgctgggtcggtgggagtgtattctgtcgctgctggtgctggacttggcaataagataatcagccagggcagggatgggacttgtaaatgttgggcgattgaagaagctgggctttcaaggtatcatttgctcacgctatttgagttcaaaaaacaactcatttttcttcaggagaggcaggtgcacacatctactttttttttcaaatgaaacatatgaccttaaatttgaaggattatctactatctagtgaaaaataaactctcatgaatgtaaatgaaaagggaaaacctcacatttgtcacacacacatacgtaggcagaaaatattgctaaacttagaagacatatagatgattgaattcattacttttattttttacaagacagcttccaaccttaaccctgaatgcataactactatcatcaggtctttagccctctaatgtcagttatgtatgcaaatcatattctgtaactaccctctgatcatcaactactgcatcaacacatcatcttactgatctgttggttcttagtagatttatggttcatgtgagatttgtgttgtatggattcatgtggaattatatccattttattgacttcttgtaggaagccactacttacaatcaaaacaagtacataccatttctgcaagatgtcactggtgaagtcttcttttacacatgccactgaatctggctctagcagctcagctagtgacgtggaaccacaaatagtgccaactgaaaatgcagaatgccatggtgtaaaccctacaataggcccccaagaacatgatcaatgcactacctctaatgggcataatatgctggcaattgctggtcaagaatcctctcaggttgagctttgggacattacaagtactagaaagatcgtaaccttgccccaaacatgtagtgccaatgcgacagatcatcctactaagaaaaagggactatgcatggctgtgcaagctttcatcccccatgaatccgcaggctacgtaaatattttgtcaagttatgaagatggaagcactctttggtgggatgtacgaaagcctggattacctttatcttcagtgaagtatcattcagaatcagctttatccattgctattgatggattttgcaatggtggaatctcaggaggtgctgatgataaagtagtcatgttcacgctcgaccatccaaagggcacatttattcttaggaaagaaatagaactcgagcgaccgggtattgctggcacagcaattcgtccagacaacaagatcgctgcaaccgctggctgggatcacaggattcgagtgtacaactacaacaaaggaaatgctctagccgtgttgaagtatcacagtgcttcgtgcaatgcagtgaccttctcatctgactgcaagctcatggcttcctgctcggcggataccacggttgcgctgtgggacctctatcccccaaaaccccaaagcaaagcggacatcacagaaacagacgaggcctcctgctagctcatgtagtttgggccttcctgataccttctggcagaattttggagcttccgtgcaatgaaaatctgaacttgtcgcaacagtgcaagcgatttattctttttcgtcaaagaaaagagtaagttatgatgtgccttccacagggaaacgcaaacgtatgcatgtaactgttgttaggaacggttctcttgatttctttatttttcattgaaattctactcggtttcgtggaacagttgtagtgtctcaagagcatgaaattgatttaaaggcaaggcagttgaagaactgactctttgaatactcagatgattgatttgaacaaatttatgcaaataaccagtacactgtaaaaaaaaaaccacacc

SEQ ID NO: 2477 - DNA, 1030 bp, Zea mays
  Clone ID: ZEAMA-23APR03-CLUSTER3539_1
cgaaaaaaaaaccctagcagttcggtagtccctctcctctcgaggtattagcagtcgaccggttcctcggagcacgatgaagtttgttgctgcctacctgcttgctgtcctcgctgggaacgccagcccctccgctgacgatttgactgccattctggagtcagttggctgtgaagttgacaatgaaaagatggaactcctgctgtcccaactgagcggtaaggacatcaccgagctcattgccgcgggcagggagaagtttgcttcagtcccatgtggtggcggcggtgtcgctgttgcggcagctgcacctgctgctggcggagctgctcctgcagctgaggcaaagaaagaagcaaagctgaactgcaagtcaagacagacattagtgttgcaggagtctgctcatcttaaggctgtactggacaacccgcagttccagcttgacccatttgctgcgatccatcagcacctgctggcaacgcagccgcctgcagctgcaaagaaggacgacacagcggggaatcaggggaaggttttcaaggacaagaaaagcaggaggaagaagggcacatcgtcaatctctcaggcaatggatatctgattgtgttccttcagtactagtaacttggtccgatgtcgactgcccgtgttccactagagggagctcatcgaagttcgatatcgatggttggcatagttttagtaccagtagaggttgtactgtaccagccctcgcttttggcagcctgttgattgatgtttgcagaaccggtgccatcaacatttggtgctactttggaaactggggatttgaggagaggattgagggagaaaatgaacttgaggggattgagagggtcaatcctatatgaggtggcaatttccaagcacaacaattcatttgttattatacctggcgactgtttcttaattcaaatcaacaaaagtaggaagcttggaaacaagcgctccaatttcatacgtttgatatggtctcagctgtaaaaaaaaaaaaaaaaaaaataat

SEQ ID NO: 2478 - DNA, 3733 bp, Zea mays
  Clone ID: ZEAMA-23APR03-CLUSTER353_2
accacgatgccagcgcgcacgggagccggctgctccgcctccgcctcctctccgctcccgcaccactagcgcgggagcccgatggcgagcagcagggggaggctgaggctctccccgcgcgcggcggcgccgcagctggacgcgggcaagtacgtgcggtacacggcggagcaggtggatgcgctggagcttgcctacggcgagtgccccaagcccagctcgctgcgccggcagcagctcatccgggactgcgccgtcctcaccaacgtcgagcccaggcagatcaaggtctggttccagaaccgcagatgccgggagaagcagcggagggagtcctctcgtctgcagaccgtcaaccggaagctgggtgccatgaacaagctgttgatggaggagaacgaccggctgcagaagcaggtgtcccgtctcgtcttcgacaacgggtatatgaagaatcggctccacagtccttctgtagccaccaccgacacaagctgcgagtctgtggtgacaagtggtcagcacaagcagcagcaaaacccagcagttctgcatcctccacaaagggatgcgaacaacccagcaggtctactcgctattgctgaggagacattggcggagttcatgtccaaggcgaccggaactgctgtcaactgggtgcagatggttgggatgaagcctggtccggattccgttggaatcatcgctgtttcgcacaactgcagcggcgtagcagcacgagcttgcggccttgtgagcctcgagcccacaaaggttgccgagatccttaaggatcgcgcatcgtggtatcgcgattgtcggcgtgttgatatcctccatgttatccctacgggtaacggtggaacgattgagctgatctatatgcagacttatgcactgacaactctggcggaaccgcgcgacttttggacactacgatacactagtggtcttgacgatggcagtcttgtgatctgcgaaaggtcattgacccactccactggaggtccttctggacctaaaactccagattttataagagctgaggtgcttcctagtggttatctgattcgaccttgtgatgggggaggttccatgatttacattgtggatcatgttgatctgaatgcttgtagtgtccctgaggttcttcgaccgctctatgaatctcctaagatactggcacaaaagatgactgctgcggcgttgcgtcacattaggcaaattgcacacgaatcaagtggtgaaacgccctatggtgctgggcgacagccagctgttctcagaactttcagtcaaaggctcagcagaggcttcaatgatgctgtgagtggctttccagacgatggctggtcttctttgttgagcagtgatggtgctgaggatatttcaattacaatcaactcatctccaaacaaacttattgggtctgatgtcagcccttccccattcttttctgccatggggggcggcatcatgtgcgcaaaagcgtcaatgctactgcagaatgtgccacctgctctacttgtgcgatttttgagggagcatcgctctgaatgggctgaccctggtgttgatgcttattccgctgcctctctgagggccaacccatataatgttccgggtttaagggctggtgggtttatgggcaaccaggttatactaccccttgcacgcaccgtggagcatgaagagtgcttggaggttattcgacttcaaggacatggctttagccatgacgaggttcttatgtccccggatatgtttcttctgcagttgtgcagcggcatcgatgaggatgcgccgggtgcttgtgcacagcttgtcttcgctcctatcgatgaatcttttgctgacgatgcaccgttgctaccctctggcttccgtgtgataccgcttgatgctaagacggatgtgccatctgccacacgtacccttgacctctgcgctcgaggtcggatcaggcggaggtctgtgtgctttaagcgatagcgggtcaggcacgcgcagcacgaggtcggtcctgaccatcgccttccagttctcgttcgagaaccacctccgcgagagcgtggcagcgatggccaggcagtatgtcagggcagtgatggcgatcgtgcagagggtggccatggcgatttctccctctcgccttggcccgcatgtcgaactgaagcatccgccaggctctcccgaggcactcgcactagcttcgtggattggcaggagctacagggcgcacactggaacggagatccgctggtcggacactgaagacgcggcgggctctcccctgacgctgttctggaagcacagcgacgccataatctgctgctctctaaagccggctttcacactcaagttcgccaacagcgccggcttcgacatactggagacgacggtcgcgaacgtccaggacctgcagctggaggcggtccttgatgacgggggacagaaggccctggtcgcacagctccccaagatcatgctgcagggcctggcgtacctccccggcggcgtgtgcaggtcgagcatggggcggcaggcgtcgtacgagcaggcggtggcgtggaaggtggtgggcgacgacggcgcgccgcagtgcctggcgctcatgttcgtcaactggaccttcatctgatgctcctccgctcttgacgttcacagcctcgtgcctcgctcggcagcgctagatcggttgccgcctttatcctatcctatccgactacgtattactagttgctttccgttgcacctgtgtgctacaactgctcgagacaatgcccctgctgtctgtttatggcctaagtctactgtggtggatcgggagttggagaacaatgcccctgctgtctgtttatgtgtgagacttaaccctattactactgctgttttcatgttcgtcaactggtccttcgtgtgagtgaggaccggccccctagcagagccagccagtcgcgcgcgcccgcccgcctagcatttgcagctgttatttgttgaactctgtatccaagtactggtcgctcttgcctttgtccaggcaatcctgtgaaacgcacctgccccccagttcatccgtggaacaaacgccttttgtagttgcttgcttgctatgttatgatggatcctggtctgctgcatctcctaaaaattggcttggaacattgcgtgcgtccccttctgctgaattcgttgcttctcgcttgattaaggaaagcgcggtacatgatgtggccgacctcggacgcagacgtggggacgtggtgggaggatggcagccgctgcggtggttggactcgcaaccgaactgattttgttaggtcaggtcaggtgcgcgtggtcttctggcagaggccacctgagctggcgatggacgtgaaggaaggagaggtggcagaagctacggctgagggcacctgaggacggcgacgggccgcctaatccccccggacccgtcgtcgtcgctgcgtgcgctggcgacggtcgtggcgccaaactcgctgcgtttcggcaaaggattagcgcaaccgcggcgctgtcgaaggtgtacgtgagcgctggatgatctcagattctcagtgatgggactttgttagatcaatccaaggaatggacagggagcgtttgtggttggttttgttccagccatgacatggaattcgctacgtgtcgtggcgcaactgcaaggaccgtgtgtgtgtgatgtgcatcgaagcttcaaatataactgatg

SEQ ID NO: 2479 - DNA, 1887 bp, Zea mays
  Clone ID: ZEAMA-23APR03-CLUSTER354657_1
agtcctgggccgctgctgccgcgcactgcctgcttcggccgagacgagccccccggcccccgtttcgctcccatctcgcgacactctgcccacagctcactcgcctccgtctctccccgtcaaaaaagccacccccgtcccccgcgccgcgccacccgcctttggcctctggctggcaccctttcccccgcctagaaacccgagctctccctctagccttctgccgcacacttccgagttccttccgccacaacatccacacgcaaacctcgcgatggccgcgtcggaatccgtgccgttctgcgtcaaagggggcggcggcggcgcgcccaggccgcacggccacctggtgctcccggcggggcgggtccgcgaggggcttgcgttcgcggcgggcgccgtggtggccgctctcgtgctcctctcctcggcctccgtcctcacgccgccgcccgtgcccaacatcgtctccctccccctgtcgtcgtcgcccgccaacgccaacgccgccatctcttcctcccctgccgtggccgtcggcgagggcccgcgcacgttctacgacgaccgggagctgtcgtacgccgtcggggggcagcgcgtcacgggctgggacgcgaagcgcgcggcgtggctgcggacccggggcctggacggcgcggcggtcgcggggcgggtggtgatggtgaccgggtcgcagccggagccatgcaaggggccggggggcgaccacgcgctgctgcggttcctcaagaataagctggactactgccgcctccacgggatcgagctcctgtacaacaccgcgctgctggagccgtccatggtggcgtactgggccaagatccccagcgtgcgcgccgcgatgctggcgcacccggacgccgagtgggtgtggtgggtggacgccgacgccgtgttcacggacatggacttctccctcccgctggagcggtaccgcgagagcagcctggtggtgtacgggtgggagcgggaggtgtacgaggagcggtcgtgggtggggctcaacgccggcgtcttcctcatccgtaactgccagtggtcgctggacctcatggacgcgtgggcgcgcatgggcccggcctcgccggagtacgcgcggtgggggaagacgctgcgcgaggagctggaggggaaacccaacgacgagtcggacgaccagtcggcgctcgtgtacctcctgtccaggcacctggagcgggagcggtgggcgaacgccacgttcctcgagtccgggtactacttccaggggtactgggcggagatcgtggacaggctcgacggcgtggccacgcgctacgaggccgtggagcgcggccgcgcagggggccgggccgggctccgccgccgccacgcggagcgggagcacctcctgtacgcggcggcgcgacgtgaggcggtgcggcagcagcgagggaccggcggaggcgtgcccgggccggacggcggcggccagaaggggtggcgccgccccttcgtcacgcacttcacggggtgccagccctgcggcggcgcgcccaaccggatgtacacgcggaggcggtgcgccgaggggatccgccgcgccctggcgttcgcggacgaccaggtgctccgctcctacggcttccgacacgccgcgccgctcagcgacagcgtcacgccgctgccgttcgactaccccgccgcacactgatgggcggtcgcgttggtgggcggtgggttcggcaactggctatggctattggctaggttaattaaatgagacaaaaccatgaatgcgatgcaatgtgtcaagtcacagtgtgtgtactatacatttttgatttgggtgtcatccatatttcggcctgggcctgcgtctgcgtcggtacttttagggcatgt

SEQ ID NO: 2480 - DNA, 1796 bp, Zea mays
  Clone ID: ZEAMA-23APR03-CLUSTER35514_1
ataggctcaatctcctggccagcggttcccctcctcgagaggccggaactgagctgccgcggccgctatggcgagcggcgacctggcggctgccgggtaagtcgctggcctcccctgtattcgtctggtccctgcgctcggccacgccgtgacccgccggctccttcgctggtaggtggcgtggggctcggtcgggttatcgtcggatttctcgtgacggtgagtccgtgacacgccggcgccatggcgagcaggtgcctagcggctgcatcggaggccgccgtcgtcttcctcatccggcccatcctcgccatcgttttcgtcttcaccctcatcctcctcggctggtacgtggcgtggacgacggtgctggtgcacgtgccgctggtgcaggagatcgccggcctgcgcccgaagaagccctctaaacccaagccagccaaccgcggccgcgtcgccaagttctaccggaaccaggccgaggccgcacaaaggcatagctgggaactggatacttggatagggatggaagaaaaataaagccaatatcattagcaggatcaatctggtttatctagtaaaaacgggctgtgatcgaaatagtttatgtatcctttcttatttaaaccactatcatgggtatgtattccggaaaaatggctatctgaaaagtcttatattttgatttaaaaaaaaaaaaaaaaaacattggccccgtttgtttcatctttattgcttattctggccactattcgtgctaaagtaaaactgtttgttgaaatttaaagaaaagccaagacatttcaaacttcagtccgtagactggagctataactatgtcacgaaaacacaagttttttttacaccttgtatcgtgaatacctgcagtcctattctctcagaagctgtattttgctattgaattatttaggcatagctgggaacgctggatgcctgtatagggatggtagaaaaataaaatcactatcatttgcaggatcaatgttgtttatctagtaaaaaaatgagttatgattgaaatagcttatgtagccattcttatttgaaccactagttttgcacctcatatattgtacatcatgagcatgtattctggaaaagatggttaactgtaaactcttatgatttgatttatcttgctgtatccttataccttgaagttttcatagtttattaatcttgatctgcaatgccaatattagcattactacaagaaagtaggtggcaccctttggttcatcattcagtttcagttgctccttaatgccattccttcctttcagtgatgggcaagtacacagaacctaaggatgaaagaacattgctatgtggtaccgaatccgttgcttgtaggctacggtagctgttttagtagcctgctgcagcagtggttgggagcgtctccagcttggctaggagaattgtttgatgctttctagaagactagaaccttttgattacccagaggaacagcaaatcagaaggggcatcatcttaagagaaagcagtcaccgccttgtaatgagtacctgccgcagactttgttatgcagttctaattagaatgcaagtactaccagtgacggcgtctttttaggagagaatgtatatcagcatgtgatgggagcatccctgcctgcctgacgatacatcaggcttatgatagtagcgtatcaactgtttattgcatgaccttgtaaagttaaggaccttatgattgtacatatatatacacctgtatacaagaaataaagagaagcacatgtcctttggagt

SEQ ID NO: 2481 - DNA, 2988 bp, Zea mays
  Clone ID: ZEAMA-23APR03-CLUSTER35578_1
ccctcttctcttctcgtctcccctccgccgcttccgttgctcgcagtgctgcctcccctcctctcttcactcgtcaggcccttccgccgtcccggaggctcgaacccctcggcccgcggacgggaccctaaacccgccccaccactcgcgcggggttcgcccgcgacccatgcgcggcggcggctggtaccctcggcagccggcgatcgccggaaatctgcggggacagtgcggcggcttgcacgagtgccggacacggcgggagtggggaacgtaggggagatggcggcgggaggaaagggctgggcggagcgggtacgccgcggggcgaggaccgcttggttcatggtggccatggtggcctcgctgctcgtggcgtcgtcgccggcgctggtggcggcggtcgacatggcagtggcgctctggctcgaggcgcggctcggctgcttccgaggcgacggcctgcggggccacctccagcgctaccgttttcggaactcgcttgccgacatacctctcgtctccgtcgttcgatccatcgtcatcacctgtaagccctcccgctgcctgctaactcattgatgctttagaatgggcagatggcctaaaaaccaacccgttcgcttgagttcgatttccttttcttctactatttctcccctttgtggtttatttgctctggtgatgtagagagtgtttactgtttagaatcatttttttgggtgaggtcttagcttgagaagatcttttcgcattcctctatgaggatttggtgatctgaaagctacagtactcactacggctgtgcttgtcttcttttgcttgcacggagctttcggcggaatctgcgtgtatctgcagttattaatcacagagtatagctgttgcctgctctcttttcttgggaggtagttaaactaagcctgttgtttagctggacctggactggttgtaagaaattgggaacctctcgaataccaaattctgctctgttcttaatttgagggcaaagactaaccttatgttctgcggcttctgcaggtgtgtacctcatgtctgatacttctggcctctctcatggtccttaccttggaacaacaactttctgttccttggcttctctgctcatcttgttaattaaggcatctgtttatagtccggcgcaggacattgggcctgagctctcgccgtcgttaccagatcacaagctcaatctcaagaatctatggggaatgcctgtacttttcctgtcttccttggtgtttgctcttggccatgttattgttgcttacagaacaagcggcagggctcgacggaagcttctcatgtggggcattgaccctgaatcgattttagcatacaagaatgccttttctggatgctacaaggttccacggtctcctacaccatacagcggaaagctttttacaaggagtgaaagtgagactaagagaaaatcacttatccaggacgatcgtgatttgccaatcagttttcttgcagacagtgatagcatgttcattgcttgccaggggatcactatacactacaaagtttccgatccagcagccagcctaccttcatcccctggcttcttttcagagagagatactcatcacgatgtaatttcatcaagcatttctcctagaagacagaggcatgagagtccaccatctgcttcctctaatacccgtcgcgttctgaataggagctttagccatcaataccataatacttcgctatatgcaccactattggtagaaccagtggcatctccaactttgttggatgatattcctctgatgtgtattgatgatggcaatgctgatggatgtctgagtcatgtgggctttgaccttgaggctggagggcagggtaaattcgctgtagttttggtgcatggatttggagggggagtattctcgtggagacatgtttccaatttgttagctcgacaattgggatgcactgtgatggcatttgatcgcccaggatggggattaacatctcgacctcgtaggaaggactgggaagataagaagttaccgaatccatatgagctggagtctcaggttgatcttcttatttcattttgttcagagatgggcttgcactctgtggttttagttggtcatgatgatgggggcttgcttgccttgaaggctgcggagaagctgcgcacttatggaggtgacagagaggttgaagtgaagggagtagttcttattggtgtgagcttatcaagagaagtcattcctgcatttgctcgtatactcctgcatacacctctgaggaaaaagcacatggttcgaccacttctacgtactgaaatcgttcaagttatcaatcggcgggcatggtatgatgccacaaagttgacgacagaaatacttaacctatacaaggctccgctatttgttgagggctgggatgaagcacttcatgaagtaggccggctttcgttttctactgtcctgccatcaaaacgagcagcggatctactaagatcagtggaagaccttccggttctggtggtagcgggctccgaggatgctcttgtttctctgaagtcggcacaagccatggcttcgaaatttgtaaattctaggatagtaattatatcggggtgtggacatctgccgcacgaggagtgccccaaggcgttgctctcggctcttgctcctttcatctctacattggtaccctcagaagatttgttgcaaagactgtagaatatactcgttcctttttcgtttttttaagaacttttttctagctggtgagtttgtatgagcccattgtagcgcgaagtagtagtggagcctgacccaaaatctcaagggttcctagagctcccctgatttttttgtcacatgttaatggttccccctgaacgatttcaattaagcaagttgaatgtgtacaaaaaaaaaaaaaaaataaaaaaaaaaaaaaaataggtggggagaacaggcttagtccaatggc

SEQ ID NO: 2482 - DNA, 871 bp, Zea mays
  Clone ID: ZEAMA-23APR03-CLUSTER3559_6
aaatccagttccgttccaatcgccgagaagggcagcaaaggggagaaaaaaaaggaaatctatggcggcgagaacagcggcgctggccgagggcgagggcgagttctacctgcgctactacgtgggacacaagggcaagttcgggcacgagttcctcgagttcgagttccgccccgacggcaagctccgctacgccaacaactccaactacaagaacgacaccatgatccgcaagaggtcttcgtctcgccctccgtcctccgcgagccaggaggatcatccaggagtccgacatcatgaaggaggacgacagcaactggcccgagcccgaccgcatcggccgccagagctcgagatcgtcatgggcaacgagcacatttcattcaccacttccaagatcggctccctcgtcgatgtccagtccagcaaggacccggagcctccggatcttctactaccttgtccaggatctgaagtgtttcgtgttctcgctcatcaaccttcacttcaagatcaagccaatccagtcttgagctccatcccaagccttcatgtagctggtttgtgagactgcgagtgttttgagagagaaccttttaaccatgtaagatgatgttgatattgtggacgatgcgtgcgatcggccctgtgtggtgcatttagtggaagtggaacccccctttgcatttggtttgtgcaaactgccgagtagtagtgaacgtgatatttgtgcctttttattccttccagttttttttttttggttgggtggggatcgagtgctctttttcgtttggcacactattcttctctgtttgtcagtgctctgctgaaggaggcacatcatagtaaatatggatatggtttgcct

SEQ ID NO: 2483 - DNA, 1256 bp, Zea mays
  unsure (1)..(1256): unsure at all n locations
  Clone ID: ZEAMA-23APR03-CLUSTER35600_2
accgatcaacttcaaaagatttcttctgcagtttctcaagtcgagaagctagtgggggacgacgccaccgagagggaacgcgacacgagatcgccatcgccatggggggaggagtcatgcgcaccgccgcgaaggtcagcatcgccgggggcgcggcggcggcgaaaagcggccggttccgcaacgccgctccggtcttcgccacggcccccgccgccgcgggttccgaagcggcgccgcttgtctccgtctcgagtggcgaggtgccccccgccgcggcgcagtgggcggcgtcctgggagctggacgactgggagtttgcggactggagggacgacgccgcggcggcggcggcggtagtggagagggaggcaacggcggccgccgccaagcccaggctggtcttcgcgccgccgtcgagggaggaggccgaggaggccacgaccgagctcagggacgccgtagagagggcttatttcaacgagtcgccagttgaggttgttaaggaacaagataaagagtttaataaactggcaactgatgccatgattccttctatcctggacatgtggttcaagcttttacgttgctgaaatcaagcacggaggctcagagtgttgtcgcctcccttgcatcagatagaaatgtctgggatgcagtattgaagaacgagaaggttatggagttttataagactcaccagacaactctagttcagacatcccctaacgaagccgtcacagtagagttgccggggaagctggaagatgctgcctctgaaaacacatccagcggcgaactccccgctggctcaggcccgagtttctccgatttcgtggacaatgcgaagaagacagtgatggacgtggtccataacataaccgacttcttcaaggacttgttcgacgactcagccaagacccagactggggcaggcccttcagcagctgagaagggcccttctacggcagatatggctgtcggcggatccttcatggctctggccatagcggtcatcctagttgttatgttcaagagggcatgatatagccatgagtatcttctgggatccacggtgctttaaatctgtcgaaaattactcgtctatcgtttggtcaagaactcctgactgtaatgtaatgtacagcttgtgtccttgtccttggaaacagtacactaaaaggctatctatgatatacaacggtgtgtatcttggtttctccaaaaaaaaaaaaaaacccgcgnccgcgggtttt

SEQ ID NO: 2484 - DNA, 1570 bp, Zea mays
  Clone ID: ZEAMA-23APR03-CLUSTER35636_1
aaggcgcacgccaattcctccctctctcgccgaaaccctcctggacactcgctgcgatgggcaggaaaccctcctccgccgccgccgccgcggcgatggaccacgaattccttgcggccgccatgcccgccgacctcctggccgcggccgactgcggtggcatccacgggcatgctctcttcttcgacgccctcgtgcagctcatcccgccgcgcttttatctcccatccggcgacgaggaccgcccgtggcaccagggcctgtccaaggcggcaaaggcggccttgaaggccaagtcccgcgccaacaccaaggccgcccgccgcgcccgcctcaatccctccacgccgcccgcctccaccctcgacctcctgaagaagtccgtcgccggccaggcagcggaggaagaggaggagaagtcagaagaagagagcggggcatctggggatgaggaaagctccgaggatgatattgatgaggaagccggggatcaagaggatgaaatgccgattgcacccgctgcagtggtgtctgaggatcgttccgtgacctatgaggagctgcgagaacgccttcaacgccgcattactgtgcttcgaggcaaccggtgcaccaggcctgagttcttgaataagcccaggaaggagaagggtaagaagtcaaaggcgaagaatgaaaagaagggcaaaggtgagggcatgaagcgtaagcgtgatgatggcaccgaagatgtggatgtcaaggatgggaagaaggtaaagaaggaagctgaggagaagccagatatcatgtacgcaaatgtgtttgttgacccaaaggaagcaaggcgcaggaagaagaggagggttaagaacaagaagaaggcactggagcaggctaaacggttgcaggaggcaaagaaggatcctgagaaggcaagcaaaattgcttgggatgtggccagaagacgtgctgctggtgagaaggtccatgatgaccccaagctgattaaggagagcttgaagaaggaggaaaagcggcagcagaagcatgctgcgcagtggaaggagaggcagaaaactgtagataagcagaggaaggacaagcagaagaaaaggacagagaacatccgggatcgggcacagcagaagaagatgcgcaagattgagaagcgtgagaaaaaacttatgcgccctgggtttgaggggcggaaggatggttatgtcaacgagtaacatctgtgtccaagtttgtctggatgatgaattactatgtcctcgtttagagtttcatttgcccctatgggtagttggtgcttgtaataggttaccagatcatggctgctgaagtgccttaattattgaatgaaccgaacttttgttatatagcagttctacagatgattttggagttgctatagttaaaaaaaaaaaaaaaatttaccaattcatgccttttgctagttctttctaagttctgacgtaagagttcatgaactggaaacgctgaattgtgctgaggtggatgcctgttttgacacgatggataatagtgtttctgagataatgtttgggtatataggtatatagtg

SEQ ID NO: 2485 - DNA, 674 bp, Zea mays
  Clone ID: ZEAMA-23APR03-CLUSTER356_13
atccccactcctgcagtccttctccacctagctcccccgcgccaagaacacgccagctagcaagcgcgctcgatcgaataccgttaccgtgtcgccatggccgccaccgcgtctctatcagccgtcgcggcgccgctgtcggtgcccgggctcaggaagccgctcggcgcgtcgtcgctccggcccctgcagccgagggcggcgaggatgacgacgacggccgtgcgggcgtcggcgtcgccctcgtccacgtccatcaaggagaaggctgcggccgggctgaccgcrggcggccctggcggccgcgctggtgctgccggacgtcgcgggaggccgcgcagtccggcggggctcacgccgtcgctcaagcaacttcctcctcagcatcgtgtccggtggggtcgtgctcgttggtattgtcggcgccgtcgtcgccgtctccaacttcgaccccgtcaagagggcctgatcggaatccatcgtatcgatcgtctcgcctgtgtcctgtcctgtgcctgtgctgtctgtatcgactggtggtgctatatcccctgtgtgttaattgattttggagaatgttcagacgtatatctatgtctaagaaatggagttcgagttaaactttgctgagacttctcttgtctatataatattattagtaggaatcaatcttc

SEQ ID NO: 2486 - DNA, 1645 bp, Zea mays
  Clone ID: ZEAMA-23APR03-CLUSTER357013_1
ttttttttttttttttgccttaataattcttaacaagtaagatgattacattatgtaatttctataatcttacactatattattagtacaaacttgtgtcattgaaattctagcctgatttatagtcttttttgtgctcaaaaccttttaaaatgagtcggtgggtcttttggttgaccaaaaaaaaatctagtttctctatcataaaaaaaagaattattcgtacatgcattggcatccctatgcatgcgagaaatggaaagacgattgatcagaacgaagaaaatcctaaccctagcctgcaatgtgatgactcggctgccatttttgctgcttcagcttcacaggtggagacgttgacagcggcatcatccccctgtaggtcggcattgacgtctacattggcgttcatgtccatcgccttcatgtcgatgccaatgccggcattcatatccaccgtcttgatgtcaatgtcaacctcggcgttcacgtctgccaccggctgcaggtcctgccggatgtcaaaggcgtcgacgagtgacgccgcctttatctcgaaataatctttgtggtcaatttggcaattcatgtcgaggtgctgatgatgccttatttccccatccccagctgccggagccagatccactttctcggcggcggcacaactatcgtcaaaatcgaattgttgcatgttgtcgaggttgatgtctatggtaggcttgctacttgcatcgtcgctggcggtggcatcgtaatagaagtagtcgaagagctgctgctgttgctgctcaccgtgatgatcatcggtggggctgtggcctccaccgtggcggtggacgacctcgtcggtttgaaggatggcggtgtgagcttcgtgattcacgtagagtgcgtcaacgacttcttgctgctcgttggggagaagcggctggttggaggacgtgacgtcgaggtcagccatgccaccgccttgctgttgcggtgccatcacggtggttgtcgtggtagcctggcggcagaacgccaagtggtggagcacggcggtgagctcggcagtatcgatctcgagctggcgctccagactgaggacgaggcggtagcagccaccgacgggatcctgcgcgcgcatgtcggactggtagatgagcgtgcccatggcgtcggcgcagagttccggcttgagcttcttcagcgttttgaggatgttgctgacaccgaagagacggtgggcgttgaggaagcgccgctgctggtcggcagggaagtagggcgcgagcgggcagtccgggctgcacttgcgacgctggtacttgcacgccgcgcacgcctggttcgtgctcccgctgccgctgccgccgccaccgcctgtgcctccggtggtggtgctgctgcgtggggagctgctcgccgaatgatggcaggagcgcgcgttgatggggttctggtttgaggagggcgttgtgattacagcagaggtccccgtggctgtggcggtaatatgcagttgggaagcggatacggtggaggtcattctctcgccgcgcgcccgatcgtggagggtggcggcaatggcgatcgtcgggctaccaccaccgaggacgggggcgtcggtggagggctggccccggcgccgtcgtaggaatag

SEQ ID NO: 2487 - DNA, 1952 bp, Zea mays
  Clone ID: ZEAMA-23APR03-CLUSTER35731_1
tctttcctttctccgccttttggctttgttctagtaccatgcacttcaaagatagtttatagcacagataagtattgaagtactagtataaaaacaattaatacagagagatagcacacaacacagagcagagcataaagtataaaaacaattaagacagagagatagcactacaacacagagcagagcacattgatgctggcggcggctgctgcctggaggcagcggcagagcttatgatcatcgagacctttgatacctgattggtaggagttgtgtttcctatactgacgatatgcttccgttgcaacgcacgggcatccacctagtataaataaagtattcaacgcagatagcagatccactaacaacgctgaaacgcatgctcagcctccattgaccaaagcctgcctcggacctccactttggaaaaatggagaaggaagaacatcgctatcaacatcatcttccatttcatcctgtatctaaactttgtcaaccatttgcgcaggccgcagacacactcatacatcagtcccttttgattagtccatatacacccactaccagaaaagcagcagcccccccaccacaaagtgtatggctagctagtgcactacagacccggaaagaaacattatgagagcatgccagactcttttagcagctccctctctccatcactcacactcatagggggcattgaaagatggaggagcatgagcaggttattgcttaccatatccttgcaattaaagcacctttgaacaaaagatcggaaagggaaaggcgatatcatataccatttggtacaacttcaagtggagaggatcttttaggtcttttttccctgcctcctccttgttagtgaatcgaagccggcatttctatcttacgctttgattggtaggttaacgcctgctaacagccccgaaaggatgcaagttacgcttgctgccactatactaggaaggagtgttgggttctggttttactggttgtccgtcctgcgaatgttgcgtgtcatagattgccatggcgagcgagatgggcatcatgcagagtgctttggactggaggaattgcatcgctgccccaatgtcttcttccatcagctttgcgacctgtctttctgtgccgtccgttgaccacttctcccaaatctgctgtttgctcccactatcacttgcttcccccttaactgaaagtgggatatcagcaaccagctgtgccacagcaccagcaccacccagcctgctcatgcttagaaccttgacttgaagcctcagaaacttcacataatctaggatctcatctagcatagctgctctatctgtcttgtttgtattgggcaccaattcctgtagggccctcatcctttctgctattctctctcttcttagcctctccgcgatgctgtgggggtcggtcgcctgcccacgccgcgcccgcacctttggcctcggtgccggcggttgtggcccgactgccgcaccgccttgcttcggctgctgcgcgtggaacacctgtgtaggcggggtggcgcggaggtggggtggctgcacaccgccgccgaacgccggcgggaagagcccagggagctgtatagcctcccggtcctgcttgccaccgtcggcgtgcttcccgcttccggaaagccgccggccgtcatggagaagaactggtcgaagaaatcgtcttcggggccctgcggtggcggttgcccggccatgtcctggcaccaagtggcccactgtgcccgccggcaactgtaactggtcgctcggcctcgctctccagctgccgccgacggcgcggaacggaggccgtttgctcgtcggcgagtgaagtagggggatcactgtaactggtcgctcggcctcgctctccagctgccgccgacggctcggaacggaggccgtttgctcgtcggcgagtgaagtagggggatc

SEQ ID NO: 2488 - DNA, 2593 bp, Zea mays
  Clone ID: ZEAMA-23APR03-CLUSTER3574_1
ataatcgcaaaccctcctcacaattgcaaaccctcgtgccgtcgcgatgcatcggtgcgcccacgagataactcacgcggcgcaccctgtcttcgccggcgaggcggatggggagcgcctagccggcgcgcgcccgcagcccgccctctccgccccgcgccgccgtccgctcccagccctccagcccccgccccgggcccctcccccgccgcctcccagcggcgcccccccctcccggtccaaccccccccctcgccacccatccaactctcctcgagattcctccgaccgggaccgggtccgggacagagacagagacagagaccgagacagggacagaggacgggaacgccgccgcggcgaagaatcccgccgcgaccgggatccggaacgaggaaggggaccggaccgccaacgcgactgagatgactcggcccggcgccaccgcgaccggggacgggaccggcggcgccgcggccgggaccgtgaccgggatatggagcgggagccagatcccgaccgggagcggggggatcgcggggaccggggaaaggaccggcttggagaagttggcggagcgggagcgcgagaaggagctcgacgcgatcaaggagcagtacctcggctccaagaagcctaagaagcgtgttatcaagccctctgagaagttccgcttctcgtttgactgggaaaacaccgaggacaccagccgcgacatgaacgcgctctaccagtcgccgcacgaggcccgactgctctttggccggggcttccttgctggcatcgaccgacgtgagcagaagaaggcggcagctgcgcatgagaaggagacccgtgcagagctgcggcgcaaggctggtgtggaggaccgtccagaggatgacgctgtagataagaagaaggccgccgctgctgaaatgtatgacgcttttgatatgcgtgtggacaggcactggtctgagaaggcgcttgaggagatgactgagcgagattggcgtattttccgtgaggatttcaatatctcctataagggttctcgcataccccgaccaatgcggaagtggagtgaaagcaagcttggcaccgagttgcttcgtgctattgacaaggctggatatgaaaaaccatcaccaatccagatggctgccattccgctaggtctacagcagcgtgatgttattggtattgctgagacaggttctggaaagactgcagcctttgtactccccatgttgtcttacattacccgattgccgcccataagtgaggagaatgaggctgagggtccctatgccgttgtgatggcacctactcgtgagcttgctcaacaaattgaggaggagactgtgaaatttgcaacctatctaggcatcaaagttgtctcaattgttggtggtcagtcaattgaggaacagggtttcaagattaggcagggctgtgagattgtaattgctacacctggtcggcttcttgattgcttggaaaggaggtatgctgttctcaaccagtgcaactatgttgtgctcgacgaggctgataggatgattgatatgggctttgagccgcaagttgttggtgtccttgacgcgatgccatcgagtaacttgaaacctgaaaatgaggatgaggaacttgatgagaagaggatttacaggactacttatatgttcagtgccaccatgcctcctgctgtggagcgtcttgctaggaagtacctccgaaacccagttgttgtgacaattggtacagctggcaaggccactgatctgatcacccagaatgtgatcatggtgaaggagtctgagaagatgccacggctccagaagatactcacagatctcggagacaaaacagccattgtgttctgcaatactaagaagacagcggacatgcgtgctaaggatctggacaagtcaggcttccgcgtcacaacccttcatggtgggaagtcacaagaccagagagagatcagccttgatggatttagaaatcgtcggttcaatgttcttgtggctactgatgttgcagggcgtggtattgatattcctgatgttgcacacgtgattaactatgagatgcctagttcagtcgacacatacacacatcgcattggaagaacaggtcgtgctggaaagaagggggtggcaacttcatttttaactttagagaacactgatattttctttgatctgaaacagatgcttatacagagcaacagtcctgtgccacctgaacttgcaaggcatgaggcatcaaaatttaagccaggctcgattcctgatcgacctccaaggcgaaatgatacagtctttgcaaatcattgaagcaatcttttggactattatgagctcaacttctaccatagagggaggaatctagattagtatttatgaggtacaaaacttcgatggttagaaatatctacttatgaggttgtaaaactatgacgattatctttggttttatttctgtttggaaactggcctcattgtcataactttaatatgttttggtggtgatttagctgtggacatgtgtagcttatcataattttgttctattctgcaagatttgaccatggctggattttagc

SEQ ID NO: 2489 - DNA, 1302 bp, Zea mays
  Clone ID: ZEAMA-23APR03-CLUSTER3578_3
acggatttggcggtttgcactccacccgacgttgctttgcccgcaacctctgcttgccacgacccacgatgcagtgcaggggggcagccaaatgcccagatccagttcctgtgcgtcctcctcctcctcctcctcctccattccggccctctcgcccgtccgtctcctgcccccgtccctggtcggaccacgagagccccggactgcgttcacctctgccttttgttcacccctgcacgcattctctgccgctcttgtctcgtgcgtgcgacaacaactgggcgaccgccgccgccgccgccgccgccctacgccaggtgcgcaggtcttcgtcggatccttcgccggcgaggcgacgagcacccaccaggactggcgtcctgccatggctccaggccaagatcgttgatcccgtgctgcaggtcatcagaaggggagcagaacccaagcaactggccttctctgctgccctcggtgtcacgattgggatctttccgatatgtgggaccactgttattcttggtgctgttgttgtagcaatgttgggaagtcgttgcaatgctgttactcttatggttctaaatttggccgccactccaattgaactaagcttgatcgtccctttcttgcgtttgggtgaagccgtcactggcagcgggcacttccccttgacagccgacgcattgaagaatgttctcaccggtcatgcctcaaaggatgtgctaatgagcatcgtccatgcgatgctgggttggcttattgctgcaccaattgtactggtcgtgctgtacgccgtttcgttcccttgtttcaaggtcctggtcaacaggtttggtggtattccttcgagccccaggaccccaatcaaagcggtgtagccagtgcctggccggatcctctgcagttacatccgtggacatagctgcagatgggtcgctgacatccggggccggccatggcgtggccccaaacgtcagtgaccggacgtaattgcagaggaaacggtttcagccagtgaggcatgctgaatgctactgaaattgtgtgcaccaagttctttgtgatcccgtcgggttgagatgggttccggcatcatgttgctcggccatcccaggcactggcgaataaatatgatgacttgagaggcatgtgtcctctgtgattgtgtatgctggtttcacaaccatatatagcgagatgcgtatttatgaatttatgaagtcttgataaataaagctaggaagcacaggggtcacggaccattgtgccattcttcccctaaaaaaaaaaaaaaaagcggcc

SEQ ID NO: 2490 - DNA, 1094 bp, Zea mays
  unsure (1)..(1094): unsure at all n locations
  Clone ID: ZEAMA-23APR03-CLUSTER35822_1
gcacgagaccattacctagaacatcctaatcgaaaagaggaggaagaaggggcagcagcatttacaaggcgaggagagttgcgctcctcaagtcacggcagcaggccctcacttgacttcaatcctgcgcagaagagcagaagtctgcggcccctccgttcctccagctccagaccatgccttgcgccgccaccgagctcgtccatggcgagggaggcacggtcaaggtaggcacaacgggcaccatcggctcgctcatgacaagggagctggactccaccaaggtggcggcgccgcaggcagccgcggccgcggccgcgggcgccccaccgctgaggcgccaaggcggcccggtctcggtgccgtgtggcgccaccactccccggaagctcatgctgaggaagagctcgtccgacgtctccagcagcagcaacagcaacagaaccggccgcgtgggcaccgtagaggcgtgcaagccgaggagggcctcgcggacgaacaccttcnactcaccgatgctgcggcccgacggcggcgcgctggtggaccgggccccgagcgccggcagggcgaagaagaaggggacgagcgtgggcgtgcacggcggcggggtccaggtggtggacgtcaagtgcggcaacccgatgagcatgagcagccggctcaggaagctcggcttctccaagctgtcgcagacgtttgcgtagcttcaattctgtgcagtggagcttggcgagggcaaaggaccagcgccagcatctgaattgaagggtctgcttgctgctgccctttccttgagggcgtcttcggcttcggaggacatctgccatgtgctggatttagtgcagcaatcattcactaacagtgtgtgagtgtccattcggtccggccttgtgggctgccatccagttcgcatctagctgtagtcgctttttctagctgttttttctccactatgtggaaactgctgttgcgctctgtgtatggatgatgtgttcgactgtaggtgcaagagcaccttgattagatcttctatttttttatctgctttataatatataaacagttataggagggtaaaaaaaaaaaaaaaa

SEQ ID NO: 2491 - DNA, 869 bp, Zea mays
  Clone ID: ZEAMA-23APR03-CLUSTER3589_2
agatcggagctagcaccggcgacctcgtaacgaactcagcgcgccaaggaaatctcgcgtggtcgttacgtgccgagctcgcctcctcgcgcctatataacctggccatctgttcctcctccttgtctcatgaggtcgcgatcgaagccaccatctaccgggagcagagggtgtcgccgccgatgaacttgcgatgggccaacgcagggaccccggcgtgctgctcggggggttttccggttccgagggtcgagaagggtgtcttcatgaagccgatgcagtggagcgccctgtggtggcttgattcctcaccggacttggtgtccgccgcggaaccgcgctccgccccagtaagctcctgaagccgttctggctggcgcactggacagagggcgacgcgcagaaggctcaggcggaagatgccaagcagaagctggcgctcctggaggcgcagctcgacgggaggaggtttttcgggggcgacaccatcggctacgtcgacatcgcagcctgcgtgctagctccttggctcagcgtcgtagaggaggtgactggagtggccgtggttgacgaaggtgagttccctgctttgcgccgttggtccagagagtacagctcctgcgaagctttcaagcagtgcgtcccggacagggaccagctcgtcgccttctatactgaaaggaaggaggcgtacaaagtgttcgctaatgcatggttgcagcagtagtttggttttgtgtgtggaataataatgtatggatcacagattgtctgtgctgaaataacagtaatgagcctagctagataagtaaataaccaaaaaaaaaaaaaaaaaaaaaaaaaaaaaaaaaaaaaaaaaaaaaaaaaaa

SEQ ID NO: 2492 - DNA, 1156 bp, Zea mays
  Clone ID: ZEAMA-23APR03-CLUSTER3591_1
gcgcccctcgtcgcggcggtgcccgcgtcgcctccgcgtcgcgctccgcgtccgggctcggggcgggtctgaccggtgaagggctgtgggcggaggatggtgggggaacgaggaggagggatgggtcggcggcaggagcggcaggccatgatggtgacgttcgcgttggcgctgctcacgggcatcgccgtctccttccgcacctggcccctccggtccagcgacccctccttcaacgcgggcgtgagaggtggacggagtttcggattcggaggtgatctgacctgtgaggggctgaggaggaggaggaggagggatggggcggcggcagaagcggcaggctttgatggcggcattcgcgttggcgctgctcatgggcaccgccgtctacttccgcatctgggcccgccagtccagcgacccctacttcaccgctgacgaccgcgaggagctccggaggcaatttgaacaagcaaacctagaagccatggatgaatctgccgaatggaggatgcaatatgacaaagaagtagagaaaaacaggcacttgcatgatgagctttcaaaggttaaggcctcattagctggcacagcccggcgtcttgagttgttgcagaaggataacgagttgcagaagaggcagactgaatcgctgaggcagcaatgcaattgcactctccattgaaagctatgcaagattaagggcatggaaggagtttttcagcttctttggcggattagctattttttttccaacaccaagggaggaaaaccagattgagttctaggaatgagaactggcatatgaaaatgattgagaacatatatagtgtatagaccatagtgttcgtcctttataccgatggtgagctgcacagttcatccaaagtgatcggtgggaacttcattggtgacaatgcaaagcgcagaagtcaaaacgtaaaagatggcgccatatggttataagctcctaatttctgagtgattttgcagtggcagtttgcatgagtacctgactatctgtagatatacattgtacactgggtgcaaaaagatggtgacaagtttgaaatctgggaccgtgccaatacttattggcaggaaacttaataatccatattgtattatcgatacttgcatttccttttcatggtac

SEQ ID NO: 2493 - DNA, 522 bp, Zea mays
  Clone ID: ZEAMA-23APR03-CLUSTER3591_4
gtgcctctcttctcgacggagctcgagtcgggtccgagaggtggacggcggagtttcggacttggaggtgatctgacctgtgaagggctgagggcggaggatggtgggggaacgaggagggatgggtcggcggcaggagcggcaggccatgatggtgacgttcgcgttggcgctgctcatgggcatcgccgtctacttccgcatctgggcccgccagtccagcgacccctccttcaccgccgacgaccgcgaggagctccggaggcaatttgaacaagcaaacctagaagcgatggatgaatctgccgaatggaggatgaaatatgataaagaaatagagaaaaacaggcagttgcatgatgaactttcaaaggttaaggcctcattagctggtgcagccaagcgtcttgagttgttgcagaagaataacgagttgcataagcggcagactgaatcactgaggcagcaatgcaattgcactctccattgaaaactaggcaaggttaagggcaaggaaggaat

SEQ ID NO: 2494 - DNA, 1639 bp, Zea mays
  Clone ID: ZEAMA-23APR03-CLUSTER35984_1
gtgcccaagtcccggcccaacccatctgtagcactaggcaacagcgaagctgagcagagagctgtcactgcatctgcctcatctaccagtacgatggtgatgatgtcgggacttgctgcctactgttcactaagtatgacaacgaccgggactgcgccgttatcatggaatacacgggcacaccgccggcgcgactcgctttccagaggcggcggcgcatgagtacgatcacggccacggtcacgtgcaggcgcgacgcggcgatgacggccccggagaaggcggacgtgctgcggtcgctagacgggtgggcggagtcgaacctgctgccgctgctgaagccggtggagcgggcatggcagccgcacgacctgctgctgccggactcggcggccgccggggtcgcgaggcggtggacgagctgcgggcgcgggcgcgagagatccccgacgactactacgtgtgcctggtgggcaacatggtgacggaggaggccctccccacgtaccacgccgccctcaacagcttcgtgggctacgacagcccctccagcgccgatgcctgggcgcgctggtcccgcggctggaccgccgaggagaaccgccacggcgacctgctgaaccgctatctctacctgtgcggccgcgtcgacgtccggcgcgtggagcagaccatccaccacctcatcaacgccgggatgcgcctcgcctccgacaagtgcccctacaggggcttcatctacacggcgttccaggagcgcgccaccgccgtctcgcacggcaacacggcgcggcgcgccatggcgctgggcgacgccagcctggccaggatctgcggcgccatcgcgagcgacgagaagcggcacgaggcggcctacacccgggtggtggaccagctgttcgcgctcacgcccgacgccgccgtgcgcgcgctcgagtacatgatgagggagaggatcctcatgccggcctactacatgttcgacggccgggacccggacctgttccgccactacgccgccgtcgcgcagaggctcggcgtctacaccaccgccgactacgccgacctcgtccagttcttcgtcgacaggtggggcgtggcggacctaggccccggcctcaccggcgaggggaggcaggcgcaggactacgtctgccggttgcctgagagggtgcgcaggatggaccagctggacgcgcgacgaaggctgcagccccagactcgtcaggtccccttctcttggctgttcgacaggcacgtggagctgctgacctgacttgattgatcggcagtctgcagcccagctagcggtccttttgccccctttggcagagcccagagctatcaattctgttactgcgtctccttctcctctacttctacttcttcctcgttggccactccgtagttccgtatgtgtctaccgtcaagtgactgactggaaccatgtactgtgtgtcagtcatcattcaatccatttggtgccacagcgtgtcaaaaaaaaaaaaagcaagcagcccaatgtcagcgagtactgtggctccaacgatatcccaaacttttacctcaattcctagtgtacctaagcagatcaacctgtgtctggtggtacaaactgaaaaatgcagctttacttttc

SEQ ID NO: 2495 - DNA, 1524 bp, Zea mays
  Clone ID: ZEAMA-23APR03-CLUSTER359_32
cttcgtcgtctcaatcccacgccacatcctcccctccttcctccttgggttcccagcccgtgcgccccgcctgtcgcagtcgcagtcgcgccgcagccgccggccatggcctgcctcaccgacctcgtcaacctcaacctctcggacaccacagagaagatcatcgccgagtacatatggatcggtggatctggcatggatctcaggagcaaagctaggaccctcccgggcccggtgaccgatcccagcaagctgcccaagtggaactacgacggctccagcaccggccaggcccccggcgagtacagcgaggtcatcctgtacccgcaggccatcttcaaggacccattcaggaggggcaacaacatccttgtcatgtgcgattgctacaccccagctggcgagccaattcccaccaacaagaggtacagcgccgccaagatcttcagcagccctgagctcgctgccgaggagccctggtatggtatcgagcaggagtacaccctccttcagaaggacaccaactggcccctcgggtggcctattggcggcttccctggccctcagggtccttactactgtggaatcggcgcggagaaatcgttcgggcgtgacatagtcgacgcccactacaaggcctgcctgtacgcaggcatcaacatcagtggcatcaacggggaggtcatgccgggbcagtgggagttccaggtcggaccgtccgtcggcatctcttcgggcgatcaggtgtgggttgctcgctacattcttgagaggatcaccgagatcgctggcgtggtggtgacgttcgacccgaagccgatcccgggcgactggaacggcgcgggcgcccacaccaactacagcaccgagtccatgaggaaggagggcgggtacgaggtgatcaaggcggccatcgagaagctgaagctgcggcacaaggagcacatcgcggcctacggcgagggcaacgagcgccggctcaccggcaggcacgagaccgccgacatcaacaccttcagctggggagtcgccaaccgtggcgcgtcggtgcgcgtgggtcgcgagacggagcagaacggcaagggctacttcgaggaccgccggccggcgtccaacatggatccctacgtggtcacctccatgatcgccgagaccaccatcgtctggaagccctgaggcatcccgtggccgtctcgtgtcggtttgctccgcgtacggcgctggccgttgcatcgcagggcccagcggttgcgcaactattttcccttccccgttctgtttgcttgtactactactctaccgctagtcctgcatagcattttagctagaacacaacaacagcccaaaaaaaaaacattgttgcttgcttcggcttcgacgcttcccaccacttccattccatgccgtccgtccgcttccttcctgtgtaatcctcctccaataatagacgtgtcatgctgcatcctctgcattgtataaaagtggcgtaattcttttgctacgcctccaaaaaaaataaaaaaa

SEQ ID NO: 2496 - DNA, 1245 bp, Zea mays
  Clone ID: ZEAMA-23APR03-CLUSTER359_37
aaaatcgcgaatttctctgcttgcttgagaccacagcagtcgcaactcccaactcaggtcaggtgaggggtaggtgaagtgggaaggcgcgcggaggggaggataggagaggaggatggctgcggcagcggggaggaaggtggcggtcgccgccgtgcagttcgcctgcaccgacgtcgaggcggagaacgtcgccaccgccgagaggttgattagagaagcacacaagaaaggtgcaaagattgtactcgttcaggaattgtttgaggggcactatttctgccaagctcaaagactggatttctttcggcgcgctaagccttacaaaggcaatccaactattataaggatgcaacagcttgcaaaggagctggaagttgtcatacctgtcagttttttcgaagaagcaaacaatgcacattataattcggtggctattatcgatggctgatggcgctgatcttggactctatcgcaaatcacacattccagatggaccaggatatcaagagaagttttatttcaaccccggtgacactggctttaaggctttcaaaaccaagtatgccaccattggtgttggaatctgctgggatcagtggtttccagagtgtgcaatagcaatggcacttctgggggctgaaatactgttttatcccactgcaattggatccgaaccccaggattgtaacctggattcacgtgaacattggaagcgggttatgcaaggccatgctggtgccaacttggtccctcttgttgcttccaaccggattggcagagaaactgttgacactgagcatggcaagagctcgataaccttctatgggaattccttcattgcaggaccaaccggagaaatagtgaagcttgctaacgacaaagacgaggaagtgctggtggcagagtttgacttggatgagatcaagtcgattaggcatggttgggggatattcagggaccggcgccctgaactatacaaagtgctactgacgttggatggcgagaaacaatcataaaccccggtctcacgcttaatagtggtaaggcacaggcaggctccagctccacatcaattttagattttttttttctccttttttaccttgtccaacgatgccatgcctgcatttgtacaagccatctgcgcgtgttcgccatttcacattcagcaaaataaataattttcgtgcaatgtcattctatgtcgggggagaatttagagctccagttcatgactgcacc

SEQ ID NO: 2497 - DNA, 1490 bp, Zea mays
  Clone ID: ZEAMA-23APR03-CLUSTER359_41
cttcctcttcttcttcttgcctactaagcaagctctctctcgtgttcttctcgtcttctgcccgagtgatggccagcctcaccgacctcgtcaacctcgacctgagtgactgcaccgacaggatcatcgccgagtacatctggattggaggaaccggcatagacctcaggagcaaagcgaggacggtgaaaggccccatcaccgacccgagccagctgccgaaatggaactacgacggctccagcacagggcaggctcccggagaggacagtgaagtcatcctctaccctcaagccattttcaaggacccgttcaggaagggtaaccacatccttgtgatgtgtgactgctacacgccacaaggcgagccaatccccaccaacaagaggtacagcgccgccaaggttttcagccaccccgacgtcgcagctgaggtcccgtggtacggtattgagcaggagtacaccctccttcagaaggacgtgagctggcccctcggctggcctgttggtggataccctggtccccagggaccatactactgcgccgccggtgccgacaaggcctttgggcgcgacgtggttgacgcccactacaaggcctgcctctacgccggcatcaacatcagcggcatcaacggcgaagtcatgcctggacagtgggagttccaagtggggccgtcagttgggatctctgccggcgacgagatatgggtcgcccgctacattctcgagaggatcaccgagatggccggaatcgtcctctccctcgacccgaagccgatcaagggcgactggaacggcgccggcgcccacaccaactacagcaccaagtcgatgagggaggccgggggatacgaggtgatcaaggcggcgatcgacaagctggggaagaggcacaaggagcacatcgccgcgtacggcgagggcaacgagcgccgcctcacgggccgccacgagaccgccgacatcaacaccttcaaatggggcgtggcgaaccgcggcgcgtccatccgcgtcggccgcgacaccgagagggagggcaagggctacttcgaggaccgcaggccggcgtccaacatggacccctacgtcgtcaccggcatgatcgccgagaccaccatcctgtggaatggaaactgatcaagcatgcgcattctagagggagcccactgttttccttctgcacaacgcatccgccgtggtgtcgctttggttttgaaatttagtttccgttgtcctaaaatttatcactacggtctccggtgtattgctcgggaacaatgaataacgactgcgatgttttttttttgcttgcgtcgtagatgtacgtttggctgtgcttccagtttattgggtaaatgaaaaaaatgtaatggtctatcggtcttaaaatagtagtcattttagctctaaattttatgtttatatttatatagacgattataaatctagacatatatatacaatacatacattaattattgtatg

SEQ ID NO: 2498 - DNA, 3875 bp, Zea mays
  unsure (1)..(3875): unsure at all n locations
  Clone ID: ZEAMA-23APR03-CLUSTER36074_1
tcacctgtacgggcgacttcacctgcacgggcgcatccttcagccgatccgaagacaccatgcctccagggaggaagggaatacgaagcacaagggaacccccaccagaaatcacttctactgagtatgagaaacaaaggtggcggcagcttctgtttccgataagagtgttcacacttatcggggggactacgcatggtcaggcaaggcattgcgggtcgtccatcactgtgatacaaattgagtaaacccgggcagcaaatgtgatgaggaacaatcagatgttccaacggcttgggattaatcagttacgcacaatgatgactgctacaagagtaaagagcaaatatgatggtccagaggaatcagggtctttgttcgatggcgaggatagtgaaggctctgagcaagaggaggagttcgttgttggcggtggagggagtaggctttagggggagtaagttgctgttttacgcatgtgttgtaggaggtgttagaatggctttttgacctgtggaggggttggccgcaagatgttatggtgctggggaaaatggtacgcagtaaaaggacaaaacggaatgggagaaccctggtgaacacagaattaataaagaatgtcaaaaactcttcaaccaacccattaataaccacttgccacgctatttactccacttcttgccactcagcagcatctttccgtcggcttggggattacttcgccctcaatttgtcactcagtggctagggctacggtccattatatcattgaaaaatgggtaacgactggaagaattaggggaaaacaacttgaataattgcgtataaggttccttcttaagatccgaaaacaaagctctattgggaaaggaaatccatagccacctatttagcatgtaaattttgcattaatgggaggattgatatagaaacaacatattccaatttttacgcaatgcaaggtgtgcaacaacctttcgatcctcattaaagtttgaaactcaactggggcacccgttttttgattccacctgcagttcgtcatctgtctgtttaaacctattatttaccacagctgaagagcaaatccaggttgggaaggcttcaaacattgttagtcctcagacgctcgtcattatcttcaggtcatttgcctagaaaacttctggccaaatttaagaacttgcgggtcctggatctgagtggatctgatattgtagaattgccagaaagcattaatcagttggtacatcttcattacctagctatctgcagtataactaacaaacttcccaagactatatacatgcttaaacatcttgaggtgtgtgatatacctatattcttatttcatgatgatcatcctagaggtgttggtaaatctgttacagttaaacgtctcaaaacatgctgtggcaagcaggcaagatcagttaagtccttgattgatgtgtaaggactgttataggaattggattaaccttcacgacttattagtcattcgatcagccgatgtctgactttcagaatcaaattttacagtaatcccagcagcaggcatgaagtgcaatttttcttttcaattcgacaccttcaagctctagaatccatttctactcagcctgtttatgtgatttggtgtcagaataactccagtttggtggatcaagaatctggttgtgttggtttgtttgatagtcccaggttggtactttgcaacctttcaagccctctttattgcaggactacttggctgttttgcctatccgcaacttatgtatagttattttatttttacttttattttttttatttccatttgtaaggtattccattttggttttcactgccaactggtgcaaacaagaccgttgcaacagggaaaaaatagactatgataccataactaaaaaaaaaaaaaaaaaaactcgagggggggcccggtacccctttcgagttttagaacttttatggttaaagaactttgagccttgtacctttgtgtgaaaaaaatattatgcttgaaatatatggatgttggaaaaaaaaaaaaaaaaaaaacccaagggggggcccggcacaacccaactcatgttgctgaaaaacctacgcaacaaacacgaggttctaaaagggttgtggcccctggtgtacatggacaacagattagattcactaggcaaaggagtgctgccataaatcaacaatccttcctaagcctaactaccactacacaagctggttcaagagccaccacaaaccaagaatccacccaaaacttggctgctgcaacacaatttacttcaagtgttgccactgagcaagattacaccgcaggcctgactactactgcacaacctacttctcccacacaagctgaggtcactgaccacaatagagatgaagaattggtaccaaggcaaagaagtaggggcaaacaacttgaatccttgagcagagggttaggcactaagattccaatccaaatttatgatggaaagcgaaggccagagccccctattcaggtcgcaaagtttgcatcggagggtgggatcatactgaggcaacacattccaatatttccgcactggaaggagtacaagaagcaagagaacgagggtaaaattacagactacattgggaagcttgctggtcaattcaccatggatgttgagagtaatgcagtaaaagatgcatgtgttgatatgctaaagggtggacagcgccaaatgaggtataggctgaaaaaaaagtacttcactggagttcctgcaaatcaagtgaggactacatcacctgtttcatgtatgactgatgatcaatggagagagttggtacaaatgtggtctagcccaaaccacaagaacaattgtgtgaagaacaaacttaatcgtgagaaggtgcaatttccacagtgcacaggatctcaatcatatgttgcaaaagcttatgtagtgagacaagaaaaatataaagatgtcgaacctagtgcaattgatcttttcaaggagatgcattgcagcaagaaaaaaggatttagtgaagttgttcagaaagccataggtgatatggaagcaatggtggcaacaccagctgaagatggacagcttgcaaagtctgcaacagaagttgtttccaatgtactgccgggttcaagtaaatttcttcacaatgctggccttttgccctcctccaagagaagcaacacagggactgtttcagcaagaatgcaagagcttcagtctcaattggacaatgagaggcgagaaaaagatggacttcgagaagatatggataccttaaaagccaagtcacaatcatctgaggcaaccattgctaatcaatcaactgagattgcagatttaaagaagtccttagcagaaaatagcatcctacttcgacagatattaagtattagtcgtgatcagctgaatccttaagcatgcttgctaagatgctggtgtcaaccatcctgaatacacatctcacaaaactgtggacctctttttatccttatgtttgctatatggaactgcaacttacagtctattatatgtgttctcttgctatagagttttagtacttgtctggttaaagaattatgaaccatgttcttttgtgtgttggacatattatgcttgaaatatatggatgttggaaaaagttgtgnnnnannaaaaaaaaaaaaaaaaaaaaaaaaaaaaaaaaaaaaaaaaaaaaaaaaaaaaaaaaaaaaaaaaaaaaaaattttttattttttttttgaaaaaccttgccaatttttttacaccaccaccgggccccggccgaacggaggtttaacgttcccgggacgtttggaccttaagggcaaaaaaaactttttttttcccccc

SEQ ID NO: 2499 - DNA, 1575 bp, Zea mays
  Clone ID: ZEAMA-23APR03-CLUSTER3607_5
aagctcctgcttttccactgctctgcgtctgcgtctgcgtctgcgtctgcactgcttcgcgtctccctccccccgcctccgccccgggaaaaaaaaaagcaaaacacggccatggaaggctacgaccgcgagttctaccagttcagcgaccagctgcgcctgcagacggccgccttctcgggcctctccctcggcgactccatctggtcccccgccggccggcgcaacaacagcaacgacgtcctcttcgccgcctcggcgtcgcccgccgacgccgccgccaagaccaacgccgtcgtcggcctcaagctcaacgacggagggcccggcctcatcggctccgggaagctggccttcggcggcggcggcaccaaggccgaccgctacaacaacaacaacctctccaacaccgacaacaagaccgtgtacaacagcagcagcagcttcatgggcaacggcagcagctacgccaagaacaacaacaacgccggcatgctggcgttcgacgagatggggagctacggctacaacagcaacaacggcggcggtaataccaacaacaacagcaacggcgtggaggtgaagagctacttcaacaagtccgccgggagggcggcgagcaacaacaacaacaacaacaacagccacgccggcggcggcaacaagaagggcggcgccggggagtacggcaggaagaagcacgccaagagcgagggcgcggcggcggcggcggccacggacaagcagcggttcaagacgctgccggcgtcggaggcgctgccgcggggccaggccatcggcgggtacatcttcgtctgcaacaacgacaccatggacgagaacctcaggagggagctgttcgggctgccgtccaggtacagggactcggtgcgggctatccgcccgggactgcccctcttcctctacaactactccacgcaccagctccacggcatcttcgaggccgcgagcttcggcgggaccaacatcgacccgacggcgtgggaggacaagaagtgccccggcgagtcgcgctttcctgcgcaggtgcgggtggcaacgaggaagatctacgacccgctggaggaggacgccttccgccccatcctgcaccactacgacgggcccaagttccggctcgagctctccgtcaccgaggccctcgccctcctcgacatcttcgccgacaaggacgacgcctgatccccatcggatctgtcgtcgggccactcgaagctcggatgcatgaatgaatgaacaaacaataaaaacggatggatgggcatgtatatcgtcatgcgcatgtcccacgacgagacgggaatataccacggtggagtagtatattaataattaatatagtatgtccacctttgtttgatactactaagggctatgtattgagggacgcgtcccatttccttgtttttataacacttgtacgatccttgcaggaaaaaaaatattaataattaatatagtatgtccacctttgtttgatactactaagggctatgtattgaggcacgcgtcccattgttttgtttttataacacttgtgcgatggttgccgcc

SEQ ID NO: 2500 - DNA, 1869 bp, Zea mays
  Clone ID: ZEAMA-23APR03-CLUSTER36083_2
gcacgagaccattacctagaacatcctaatcgaaaaaaaccctaccctttggcttctccgtcctcgcccccgcccccgccccgcccccgcctatccgcgcaccagccgaatgtcgtcgggaggcggtggggggcagcagttccgctacacgcagacgccgtccaaggtgctgcacctgcggaaccttccgtgggagtgcgcggaagaggagctcgtcgagctctgcaagcctttcggccgcatcgtcaacaccaagagcggcgtcggcgccaaccacaaccaggcctttgtcgagttcactgacgttaatcaggcaatctcgatggtttcttatttcgcatcatcttcagaaccagcacagatacgaggcaagactgtttatattcagtattcaaataggcaagaaataattaacaacaagagtcctggagagactgctggaaatgtcttgcttgttaccatagagggtgttcaatctagtgatgtcaccattgatgtgatccatatggttttctcggcttttgggtatgttcataaaatagccacctttgaaaaggctgcaggttttcaggcattgatccagtacactgatgcggctactgcttcagctgctaaagaatccttagatggaaggagcatcccaagttacttgcttccggagcatgtaacatcctgctgcctgcgaatttctttttccgcacataaggatttgaacatcaagtttcagtcgaaccgcagcagggattataataatccgtatcttccaatcaattattctgccatggatggtacattacagcctgctgttggagctgacggaaggcaagtggaggctcaaggcaatgttcttcttgcatcaattgagaatatgcaatatgctgttactgtagatgttcttcatactgtgttctcatcatttggttcagtccaaaaaattgctatttttgagaagaatggggggacacaagctttgattcagtaccctgatgtatctacagctgctgtagcgaaggaatcattggaagggcattgcatctacgatggtggctactgtaagcttcacctgtcatactctcgtcatactgatctgaatgtgaaggcacatggtgacaagagcagagactatacaattccagctggcgtaatccaaggggtgccacctggtgtacaagctacatcctctgggtggcaaggtaacgttcaagcagctggggcatatgctgccccacccggtgccccttcgcaaagccacggtgccaatggacatgtgcagaactggaatcccggcaactcagtctatcccccagccccaggaccaggaacatatccaggccagatgtactcatctccctcacagtatgcagcgtcagggggcttccctaataccccatccactgctccgccacactatgcagcatcagggggcttccctaacaccccactcccagctcttcctggtgctcctacacaacagttgcacgcttcgcagcagatgctgcctcagcatggaaatcagtcgggaggcgcatccggaactagccaaccggcgccaccagcatcatactaccgttgagttgaaatcttctttcgctattgtccttaacctgttttgtcactgagtttgttattcatcatctaaaactgcaacactgttgtccgtagctgtgtttagatgatgttgggggagaacaacaacatagcaacatgattatattggtggttcttcctctcctaagcttgggaaaggagaagatattgcgagtgtttcatattggtggagtttgaaacattgttgctggagatagttttacataagcaaacataatcttcagttataaaggaatataagagccattgctattcatgaac

SEQ ID NO: 2501 - DNA, 2409 bp, Zea mays
  unsure (1)..(2409): unsure at all n locations
  Clone ID: ZEAMA-23APR03-CLUSTER36083_8
gggtacctcgaggccggccggtgccagcacacacaactcgtcctcggtcctccgtacccttacgcgctccgccccagcacgaaacgccgaaaccctaccctttggcttctccgtcctcgcccccgcccccgccccgcccccgcctatccgcgcaccagccgaatgtcgtcgggaggcggtggggggcagcagttccgctacacgcagacgccgtccaaggtgctgcacctgcggaaccttccgtgggagtgcgcggaagaggagctcgtcgagctctgcaagcctttcggccgcatcgtcaacaccaagagcggcgtcggcgccaaccacaaccaggcctttgtcgagtccactgacgttaatcaggcaatctcgatggtttcttatttcgcatcatcttcagaaccagcacagatacgaggcaagactgtttatattcagtattcagataggcaagaaataattaacaacaagagtcctggagagactgctggaaatgtcttgcttgttaccataggaccaaaatcctcctaattcaccaattttagaattcccattctcattttctctctctttctatttctccaaatttgcctaaagattttacattttatcttcaatccttccttgatttacgtttgaaatatttcgacccaaaactatactgatggagagaacaaacagcattgagatggatcgagagagattaacggcggagatggcgtttcgagattcatcatcggccgttataagaattcgaagacgtttgccggatttattaacgtccgttaagctcaaatacgtgaagcttggacttcacaactcttgcaacgtgaccaccattctcttcttcttaattattcttcctttaaccagaaccgtgctggttcagctaaccggtctaacgttcgatacgttctctgagctttggtctaaccaggcggttcaactcgacacggcgacgagacttacctgcttggttttcctctccttcgttttgaccctctacgtggctaaccggtctaaaccggtttacctagtggatttctcctgctacaaaccggaagacgagcgtaaaatatcagtagattcgttcttgacgatgactgaggaaaatggatcattcaccgatgacacggttcagttccagcaaagaatctcgaaccgggccggtttgggagacgagacgtatctgccacgtggcataacttcaacgcccccgaagctaaatatgtcagaggcacgtgccgaagctgaagccgttatgtttggagccttagattccctcttcgagaaaaccggaattaaaccggccgaagtcggaatcttgatagtaaactgcagcttattcaatccgacgccgtctctatcagcgatgatcgtgaaccattacaagatgagagaagacatcaaaagttacaacctcggaggaatgggttgctccgccggattaatctcaatcgatctcgctaacaatctcctcaaagcaaaccctaattcttacgctgtcgtggtaagcacggaaaacataaccctaaactggtacttcggaaatgaccggtcaatgctcctctgcaactgcatcttccgaatgggcggagctgcgattctcctctctaaccgccgtcaagaccggaagaagtcaaagtactcgctggtcaacgtcgttcgaacacataaaggatcagacgacaagaactacaattgcgtgtaccagaaggaagacgagagaggaacaatcggtgtctctttagctagagagctcatgtctgtcgccggagacgctctgaaaacaaacatcacgactttaggaccgatggttcttccattgtcagagcagttgatgttcttgatttccttggtcaaaaggaagatgttcaagttaaaagttaaaccgtatattccggatttcaagctagctttcgagcatttctgtattcacgcaggaggtagagcggttctagacgaagtgcagaagaatcttgatctcaaagattggcacatggaaccttctagaatgactttgcacagatttggtaacacttcgagtagctcgctttggtatgagatggcttataccgaagctaagggtcgggttaaagctggtgaccgactttggcagattgcgtttggatcgggtttcaagtgtaatagtgcggtttggaaagcgttacgaccggtttcgacggaggagatgaccggtaatgcttgggctggttcgattgatcaatatccggttaaagttgtgcaatgattggttgaaccggataatcatatatgtaattgtgttcttcttgattttattttttaattgttgatgtaagttgtcgattgaaaatcatataatttaattaatttgaaaggaaaaaaaaagagagcggggaagaaagaggggnnnnggggttaagt

SEQ ID NO: 2502 - DNA, 1086 bp, Zea mays
  Clone ID: ZEAMA-23APR03-CLUSTER36102_1
cgaaaagagtaattattagtataaataaaaattgccaaatcctaacgggcgagaaaatacaacgatcctctcagatctctacgcggtccacgagtattcacgtctgggttttagcccaactcgaatgttggctcggccttcggtccacagccaccgcccaggcgcccaccagaccgtcagactcggactggctccgagcctccgagtgagtccgtggttccaaccagcatcgcattcttcctgctgctcgcctgctccagaatgttcccctccagctccgccaccggcccccgcttccttcgccccttcaccgccaccgcaccccgccgtgccatggcggcatgcacgggcgccccaagcgacccgccgatgcagcagtcttctcccaccaaggcggtgcgcgtggtggtgaagggacgcgtgcagggcgtcttcttccgggactggaccgtggagatggcgcgctccctggggctcgccgggtgggtccgcaaccgccgcgacggcaccgtggaggcgctactctccggggacccggacaaggggacgagatggtgtcccggcggatccccgtcggcccgcccgccgccgtcgtcaccgctgttgtaccctcccccgctgaaccggtctcccccgacgatggcttccaccgcaagcccaccgcctgatttatggctggttcatcggccatccgtggggcgtggtcattggcgagcggcgccactcgcctgtggtaatcaatctactgaagaactgtgagaggcgctactctccggggacccggacaaggtggacgagatggtgtcccggcggatccccgtcggcccgcccgccgccgtcgtcaccgctgttgtaccctcccccgctgaaccggtctcccccgacgatggcttccaccgcaagcccaccgactgatttatggctggttcatcggccatccgtggggcgtggtcattggcgagcggcgccactcgcctgtggtaatcaatctactgaagaactgtgagttttcgattaggatgttctaggtaatggtctcgtgcctcaactactacttaatatagcaattatcttctgatatgacag

SEQ ID NO: 2503 - DNA, 1038 bp, Zea mays
  unsure (1)..(1038): unsure at all n locations
  Clone ID: ZEAMA-23APR03-CLUSTER36129_3
acccattccttctggtcccgtgacaagcagcgcgctagacacacacgcgcgcgaacacgaacagggacacgaggccgcggcggccatggcaagaggcggcggcgatcggagtcgggaggatgatcccttctccgacggcggcaccaccgaaaccgactcggacgagtcctctccgcgtggggtgggggcccgcggtcccggctccacctccaacccgatcctgacacgcctcgcggtgtcgcggaactcgagcccgctggccgcggccaccgcggccccaggggtctgcctcctccgcttcgcctgggagtccgccgcgggctccctcgtcggcgccgtcgttggctacggtaaaggtttggttatgatgaaggggattaaaggatcatttgctgatgctgcgtcatctgctaagatatttgctgttcttgctggtgttcaaagtttagtagcctgctctttgagaaaactacgnggaaaagatgatggaatcaatgcaaggagtcgcaggctgttgcactggccttgctctgagctttccaggtgcaccacaaactctgattcaccagctgcttgaccttttggactttctcttacatcattgagaagctaaacaagcagcaacctgcgctggcgctcctgcctgcgacaggtgtgatggatccgaaggctggacaaagcgttcttcctcccttcacacttcctcctctggataccatggacgaattttctaagttccaaaactttttgtcatccaaatttcggggaaactgagttatcctggtggagtgacgcctagttatctactctggaacgtgtccttgtaaatgcgtcaatggtcaatctgagtttttttccccttgtttattcttcgccaatgtatgtttccaaattccaaggtagtgtttttggtagtgttgatgattctaccttgacatatcgaacacaattttgtaaataaggcgagcagcttgtcctttgtttcactgattgtaaataaggggccccgtaaaaaggaaaaacatgccccttgtttcc

SEQ ID NO: 2504 - DNA, 700 bp, Zea mays
  Clone ID: ZEAMA-23APR03-CLUSTER361574_1
gcacgagaccattacctagaacatcctaatcgaaaaatccgccatcgggcctcgtcgatcgccgcctcctgctcggcttcttcccacctgcggttgcaccgatcacccagggagggacagggcagctcgccggtccaactccgacgaccggccggccatgagctaccaggctcctcctcccggcaccgcagcctacccgccgccaggccagcaggcgtacccgccgcctgcctacggtgcgccgccacccatggccgccggcgggtacccgcccccgccgcctccgcagccgcaggactccaagcgcagcaacgacggcttcttgaaaggatgcttggccgcgctctgctgctgctgcatgctcgacatgtgcttctgagactgagttgccgtcagggatggggtggcgctggcgccgcgtccagatccatcctgcagtcgcggcgaatgcatgaggatgttttcggagtcatcactagtcatgaactcacgatgatacatctgtttttttttctcccattccgtgtatgttctccagttctatgaatttcactagttaggccagaacagaaccagcagggattatttttctggcattcatgtgcgtgtgttcttaccatccattcttttaaacattacccacctacgaatgtttaataggatcgaaaagttttcttgaaaaaaaaaaaaaaaagcggcc

SEQ ID NO: 2505 - DNA, 4571 bp, Zea mays
  Clone ID: ZEAMA-23APR03-CLUSTER36294_1
acggaaagcaccaagatgatcatgcgatatcttgcttacatgggtgggaaggctgcttccgaagggcgaactgtggagaagcaagtccttcagtccaatcctgttcttgaagcatttggaaatgcaaagactgtcaggaacaataactcaagtcgtttcggtaaattaggacttcacggatatcaacagaaagggaaaataacacgagaaccttgccttccagtttttacaggattagcgctagtgaagtcctcgagcattttatgctgctagatatcttgtcagatcatttattgatttgttgtatattttttggatcctttctaccacatgtgcctttttttagttatcttatccttttgagctagcttttgtaaaaattcatataggtatttgttagggttgggatgggattccgcccttacagttagaaaaggccttatcttttaaagcggggcaaaagaaatctttcaggttaatgcggctattctccacttggggaatgtcgagtttgcagaaggggatgatggtgattcatcaaaacccaaagatgagatttctctttctcatttgagaacagctgctgagctcttgatgtgtgatgagaaagctttaaaagattcattgtgtcagcgcattattgtgactcgcgatgagaatatagtgaaaactttggatcctgaagctgctaagggaagtagagatgcacttgccaagactgtgtactcacggttgtttgattggcttgtgaataaaatcaacaactctattggccaagaccccaactcgaaatgcttaattggagtgctggatatatatgggtttgaaagcttcaagacaaacagttttgagcagttttgtatcaacctgacaaacgaaaagctccagcaacacttcaatcagcatgtgtttaagatggaacaagaagagtacaccaaagaagaaattaattggagttacattgagttcattgataaccaggatgttcttgatctcattgagaagaaacctggtggaattattgcccttctggatgaagcttgtatgttgccgagatcgacacatgaaacatttgctcagaaattgtatcaaacttactcagttcacaagcgctttgctaagccaaaattatctcggtcagacttcaccatatgccattacgctggagatgtcacctatcaaacggaattatttctggacaagaacaaagattatgttgttgctgagcatcaggctttgttgagtgcttcaaaatgtgcatttgtttcaggccttttcccttttctatctgaggattcctcaaaatcttcaaagttttcatccattggttctaggttcaagcaacaattccaatctctgttggaaactctgagtgcaactgagccacactacatccgctgtgtaaaacccaataatttgttgaagcctgcaatttttgagaaccagaacgttcttcagcaactcagatgtggaggagttatggaggcgattaggatcagttgtgctggatatccgaccagaagaacattctatgaatttatagaccgttttggtattcttgcgcctgatgttttgagtggaagttctgatgaggtcagtgctgtaaggaggttgttggacaagatagatcttcaaggttaccagattggcaagacaaaagtattccttcgtgctggtcagatggctgaacttgatgctcgtagaaatgaagtgctagggcgttcagctagcatgattcagaggaaagtgcgttcattcttggcacagaagaatttcattgcattgcgaagatcagctttacaaatccagacagtttgtcgcggtgaacttgcaagaagagtttatcacaacctccagagagaagctgcttcactcaagatccagactttgtaccgtatgtatactgccagaaaagcgtacaacgaactttctgcttcagcagttaccattcaatcaggattgcgcggcatgtgcgcgcgtaaagagctccacttcagaagacaaacaagagctgcaatcatcatccagagtcgctgccgtcaattcttggcgagattgcattattcaagaacaaagaaagctgcaattactacacagtgtgcgtggagagggaaggctgctagaaaggagctccgcaagctcaaaatggctgcccgggaaactggtgcattgcaagctgccaaaaataaacttgagaaacaagttgaggagctcacgtggcggctacagttggagaagcgcatggcagctgatctcgaggaaactaaatcacaagaaaatgcaaagttgcaagctgcattgcaggaggtgcaacaacagtacaaagaaacaaaagaaatactagtacaggagagggaagcagccaaaaaggctcgagagatagctccagttattaaagaggtccctgttatagatacagagctaatgaataagcttagagatgaaaatgacaaactgaagactatggtcagttcgcttgaaaagaagatcgatgatactgaaaagaaatatcaagaaacaagcaaaatcagtgaggataggctcaaacaggcaatggatgctgagactaaaatcgttgacttgaacatggcaatgctaaggcttcaagagaaaatatccaccatggaatctgaggagaaagtgcaaagacaagcgcttctaagcacgccagtcaagagcatgtctgaacatttgtcaattccaattgctccaaaggcacatcatttggagaacggctttcatgaggttgaaggacttaaggaaccccaaagtgcacctcctgctattaaggaatatgggaacggtgatcctaagatgaaaaaatctattgttgacagacaacttgaaaacgtggatgcactcattgagtgtgtagggacaaaccttggatactgtgcagggaagccagttgctgctattaccatatacaaatgtcttcttcattggaaatcattcgaggcagataagactagtgtttttgaccgtctcattcagttaataggatctgctatcgagaacgaggatgacaatgacaaccttgcttactggctctccaatacatctagcttattgttcctactgcagagaagtctcaaggctgctggtgctcctggtagcgtttcacgaaagaaacctcctcaaccaacatcattatttggaagaatggcccaaggcttgcgttctgcatcttttgccaacatgcatgttgaagcgacagatgttgtgcgccaagttgaggccaaatatccagccttgcttttcaagcagcagctaactgcttatgtggagaagatatatggaatcgtccgagacaatattaaaaaggaattatcatctttgatttcgctatgtatccaggctccaagaacaatgaaagctagcatgctgcgagtttctggacgattatccagtcaatctcagagtcagagcaaccactggcagaaaatcattgagagcttggataagctcttgaagatactgcaagataaccatgtgcctccggttttagctcagaaaatatttacccagatattttcatacattaatgtccagctattcaacagtctattgcttcgtcgtgagtgttgctccttcagcaacggagagtatgttaaggctggtctagctgagttggagctgtggtgtgcaaaggcaacaactgagtatgcagcatcttcatgggatgagctcaagcatatcaggcaggctgttggatttttggttatattccagaagttcagaatatcttatgatgagatagtcaatgacctatgtccgatcttgagtgttcaacaactgtacagaatatgtacacaatactgggatgacaagtataatacccaaagtgtttcatcagacgttcttagtaacatgcgggtgctaatgacagaggattctaacagtgatgaaagcggttcgttcttgttagatgataattcgagcatcccgttctccgtggatgatatcttgtcagatcatttattgatttgttgtatattttttggatcctttctaccacatgtgcctttttttagttatcttatccttttgagctagcttttgtaaaaattcatataggtatttgttagggttgggatgggattccgcccttacagttagaaaaggccttatcttttaaagcggggcaaatgattctttgtagggcaacatgaaatcaatctttttacccaagggtgtggtgagaaggggtagatgcaatgtttgtagcctccccagttatagattgtgtaaattatatactgtaaatcaacagtgcaatggaaaagaaaggaaagctatatagcaagtgcagttatgttgtcaaaaaaaaaaaaaaaaaaaaaaaaaaaaaaaaaaaaaaaaaaaaaaaaaaaaaaaaataagaggacgcgtacatgaaaaaaaaaaaaataatgtcaagggggggcctccataaaattcactgttcgtggcttttcaacgcagggccttggggaaccctttggttccccaacttaatataaatggcccgcgttcccccttttttagccgtggggaaaacccgagggttccccatctgattgcccttccca

SEQ ID NO: 2506 - DNA, 1647 bp, Zea mays
  unsure (1)..(1647): unsure at all n locations
  Clone ID: ZEAMA-23APR03-CLUSTER362_3
gcacgagaccattacctagaacatcctaatcgaaaagatactgatacacggctcagtggctcacccaagccaagaccaagaaccccgggcggacgaaaagatggccgccgatgccgcacgcacgccggcgccgcacgcgctgctgctcccttacccagcgcagggccacgtgatcccgttcatggagctggccgaccgcctcctcgacaggggcttcgccgtcaccttcgtcaacaccgagttcaaccaccgccgcgtcgtcgtggccgccgccggcggccgggcgcccgatggccggctncggctcgttggtgtcgctgacgggatgggcgacggcgaggaccgcgacaacttcgtccgcctcaacgcctgcatgaaggaggccatgccgctgcggctcgacgcgctcctcgacgccgacgacgagcgcctcggcagggtcacgtgcgtcgtggtcgacgtcggcatgtcctgggcgctggacgcggtcaagcggcgtgggctcccggccgccgcactctggcccgcgtcggcggccgtgctcgccgtcctgttcggcgccaagaagctcatacgcgatggcgtcatcgatgacgacggagctccagtgaagctggagaaccactcgttccggctggccgagtcgatgccccccatggacgccgtcttcctggcgtggaactacatgggcaaccgcgacgtcgagcgcatggtcttccactacctgaccaccactgcgtgggccgccgtggctaaggcggacgtcgtcctctgcaacaccttcgaggacctcgagccggacatcttcggcgcccactccccggcggccgcctccatcctcccgatcggcccgctgcgcacctggcagcgccggacgagcgaggcgccggccgggcacttttggcgcgccgacgacgaggcctgcgcgtccttcctggacgcgcagccccgtgggtccgtgacgtacgtggcgttcgggagcctgacggtcatgagccccgcgcagctccaggagctcgcgctggccctgctggcctccgcccgccccttcctgtgggtgttccggccagggctggcggccgagctcccgcccgcgttcacggatctcctgccacgccatgcgaggggcaaggtggtggagtgggcgccgcaggagaaagtgctcgcgcaccctgctgtcggctgcttcctgacgcattgcgggtggaactcgacgctggagggcgtccgccatggcgtgcctttgctttgttggccctactttagcgaccagttcacgaaccaggcatacatttgtgatatctggaaggtggggttaagggtggtgcccgacggtggtgatggcattgtcgccaaggaaaggatcatggagaggttgacgagcctaatgggtgacagtggtgtgaaggaaagggtgaaaagattgaaggaattggcagagaggagcatggggcctgagggcaaatctttgaagaacatcaacgccttcatggaatccatgacgaagtgattgttattgtgttattgttttattttcgggaatgactaccactgatgtccaacgcatgttccaacatccaacaagatcatacaagatatctggagaaaatatcttcaacgatttatccaaatacatgttgcaatatc

SEQ ID NO: 2507 - DNA, 1778 bp, Zea mays
  unsure (1)..(1778): unsure at all n locations
  Clone ID: ZEAMA-23APR03-CLUSTER3641_1
tttttccgacgtcacctcacctccctccncggcnattaatcctcgtcccccccgcagtgcccgcacccacccggttgtcatcgtcagccgctcgctccctcggtcactcactcactcactcccctctagtacatcactcaccgcccgccaagcgcgaagctgtcactctgctgaccgcttgacagagcagagcacggcacctagccgccctctcaccgacccatggccatgggcggcgcgttccccttccagtggcccgagggccccgcggatcctgttctcgacgacgtgaccttgcctccgctgcccacggcggcgcccgacgccggggtcgccgcgtactacgcggacgcggcggacgtgcacgcgatgcacatggcgctgcccgatttcgcggcggcgctggctgcgatgcggcgggaggaggaggaggccgcgggcatccgcctggtgcacctcctcatgagctgcgccggcgccgtcgaggcggccgaccacgcgggcgcgtccgcgcacctggcggacgcgcacgccgcgctcgccgccgtctcgcccacatccggcatcggccgcgtgtgccgtgcacttcaccgccgcgctgtcccgccggctgttccctcccacgccttcgccttcgcctccgcccccggccccgcacgccgccgacgccgaccgagccttcctctaccaccgcttctacgaggcgggtccctacctcaagtttgcgcacttcacggccaaccaggccatcctggaggccgtccagggctgcaagcacgtgcacatcatcgacttcagcatcatgcagggcctccagtggccagcgctgatccaggccctcgcgctccggcccggcgggccgccgtcggtccgcctcacgggcattgggccgccgtccccgccagggcgcgacgacctccgcgacgtcggggtccgcctcgccgacctggcgcgctccgtgcgcgtccacttctccttccgcggcgtggccgccaaccgcctcgacgaggtgcggccctggatgctgcaggtctcgcagggcgaggccgtggccgtgaactccgtgctccagctgcaccgcctcctcgccgacgctccctcgtcgggcgacgcccgggcgcccatcgacgccgtgctggagtgcgtcgcgtccgtgcgccccagggtgttcacggtggtggagcaggaggcggaccacaacaagtcggggttcctggaccggttcacggaggcgctcttctactactcggcggtgttcgactccctggacgcggcgagcggcggcgcgggcgacgcggcggcggaggcctacctggagcgcgagatctgcgacatcgtgtgcggcgagggcgcggagcgcagggagcggcacgagccgctgtggcggtggcgggacaggctgggtcgcacggggctggccgccgtgccgctgggggccaacgcgctgcggcaggcgaggatgctggtggggctcttctccggggaaggacactgcgtggaggaggccgaggggtgcctgacactgggctgacacgggcgcccgctcttctcggcgtccgcgtggcgcgcggaagagaacaatcagagtgacagcaggagcaggagcagcggcagtgaggagagcaatatcagctgcagcagctagagcgtcgctactttactgtaaattccttcggtgagaggctagtagcggggtttactgtaaaatcgcggtgcccgcgatccaaatggttcgattgagagagcgttggcatcggtcgtcaaaaaaaaaaaaaaaa

SEQ ID NO: 2508 - DNA, 3643 bp, Zea mays
  Clone ID: ZEAMA-23APR03-CLUSTER36527_1
tagtatatagagatttttaactagcatccaacattcaatgtcatatgtgctaaaatttagcattggaaatgaacgggcctgtaccagcgacgaagcgacaatcctacccgttccttggttcgtctgcatccatcgcggccctacgttcctttgcagcctttacccacggcccagcctctgtcgccgttttcgtgcgaggcaccggcggccgcatagaaactcagcttccgtctctaaaccctcaaccctagcccgtcatgtggcgccgtctccccacccgccgcctcgcctccgccctcctctcctcctccccactccagcgcgccaccgccacgcacgctcctcctctcgagcgccacttccccactacggcctccggtctccttccgccgtcactcttgcccccgtggcagcaggagccgcgatggttctcatcctccgccgccgcggaggctgtgtcctcggaggatgccgaggagctgcaccacgcgatagaggagatcgtccggccgcagccgagtccgaatctgcctcaacctcaggcggtggcagaggagtatcaggcacccgggcgggaccaccgtagccggcataggagaagtgggcgcgggcggcatgcggaagtgttggcggcggagcacgggatgacataccacaggtacacctcccttcgccggcgacaaatccgcatcgagacggaggcgtgggagcaggccgccaacgagtaccgtgagcttctcgcggacatgtgcgagcagaagctcgcccctaacctaccctacgtcaagtcgctctttcttggctggttcgagccgttgcgggatcagatcgccactgagcaagaacttgtggcagaccccgggtcccgggcctcgcacggtccatttttcagtatgctccctgcggacatgatggctgtcatcaccatgcacaagctcatggggttgctcatgacgggcagtggggacggcagtgttcgagtcatccaggccgcgtgccagattggcgaggcaattgaacacgaggttcgaattaacagatttctggagaagacaaggaagaaaaacaacaaagagatggaaaatgaagaagaagctggtgacacaaacattgctgtagaacaacagcgtctaagaaagaaagtcaccgacctaatgaaaaagcaaaagttacggcaagtcaggaacatagtgaagaatcaagataaatccaggccgtggggtcaagatgctcatgcaaaagtcggtagtcgtttgattgatctttttattggaacagcacatatacaaccaccggcaagccaatcatcagatggtctgcctgacatccgtcctgctttcagacatgaaatgagaacaatggtgaaagaacagcagaagagtagtcgcagatatggtgtgatcaagtgtgatccactggtccggcaaggcttggatagaacagcaaagcacatggtcattccgtacatgcctatgttgattcccccaatctgttggacaggatatgacaaaggagcacacctctttttaccatcatatgtaatgcgcacccatggtgctcggcaacagagggacgctgttaaaagagctccaagggaacagatgcaatttgtttttgaggccttgaatactcttgggagcacgaagtggagggttaacaaaagagttcttagcattgttgacagaatctggtcaaatggtggccggcttgctgacttggttgatcgtactgatgttcctgtaccggagaagcctgacactgaagatgaaaccttgctaaagaactggaaatggcacttgagggcagccaagaagaagaacagtgaaaggcattctcagagatgtgatgttgaactcaaacttgctgttgctagaaaaatgaaggatgaagagggattttactatccacacaaccttgattttagaggtcgggcttatccaatgcacccttatctgaaccatttgggttcagatctttgtcgaggggttctagagtttgctgaaggtcggccacttggcaagtcaggattgcgttggctgaagatacaccttgcaaatttgtatgctgctggtgttgataagttgtcatatgatggccggattgcatttgctgagaatcatttggaggaaatatttgattctgctgataggcctttagaaggcagacgatggcggcttggggctgaagatccattccagtgcctggcagtatgcatgaatctcactgaagctttaagaagctcgtctccagaaacaacaatctcacatattcctgtgcaccaggatggctcttgtaatggtctgcaacactatgcggcacttggaaaggataagttgggagccattgctgttaacttagtcgctggagaaaagcctgcagatgtttacaccggaatagctaacagggtgatggaaattatgaggatggatgcacaaaaagatccttctgtagaacctgatgcagctcgtgctcgtctgatagttgaccaggtggacagaaaattggtgaagcaaactgtgatgacatctgtgtatggtgtcacatatattggagcacgtgaacaaataagaagaagactaaaggagaggggggtcattcctaatgactccgaactgtttggtgcatcatgctatgctgctaaggttactcttacagcacttggtgagatgtttcaagctgcccgtagtatcatgaactggcttggtgactgtgccaaggtaattgcttgtgaaaatgaaccagtgagatggacgactcctcttgggctcccagttgtacaaccatatcgcaaacttgggaggcatcttattaaaacgtcattgcaggttttgacccttcagcgggagacggataaggttatggtgaagcggcagaagacagctttccctccaaactttgtgcattctcttgatggttctcatatgatgatgactgctgttgcttgcaaaaggcaaggtctgaattttgcaggagttcatgattcatattggacccatgccagtgatgttgatacaatgaataaaatactccgggaaaagtttgtggaactctatgatacacctattctggaaaatctgttggagagctttgagaaatctttccctaaattaaaattcccaccgttgccggagaggggagacttcgatatgaaggaagtccttgagtctacgtattttttcaactagcacaatcaatgttaacagttgcattatacacgctgctgcccggacatatctgagttctgagtgtagatctaccaactcgaatgatgaaagctaggtcatacatgagcataacccgaagagtggctttgcagaagttatcagaagctaagttggtactctgagcattcacaaatgcatcggcatcatttatcgcgttgaagttggcaatgaggtttgctaaataaaagtgggaaccatatcaaagttaaacgagaatccctgtaaatgtaattatgtaatttttttttgtctttagtgtttttattttccttgatcttggtactgtcgagagaaattcggctgaccggtagtttgtcggctggtgctgactagagattatttcatactttgtagtttaacaatataatttagtaataaagtgatatactagtatttttctaaagaaaaaaaaaaaaaaa

SEQ ID NO: 2509 - DNA, 897 bp, Zea mays
  Clone ID: ZEAMA-23APR03-CLUSTER3653_10
aaagcacagggcccatactacggtgccatcgctctcgctctctctctctctctctctctctctccagactccacgactccaccgctcctctgtcctctccccagtccccaccacctccctgtatccctcctccccttctggccgacgaaaccctacgcgcgcgcgctgccaagacctcgccgccgacgcctactccgactccgacgccgcagtcgtgatgtacgccgacaggacctcgggcaggaaacgctctgtaatggaccgcctcggctcgggcggcggcgggagccttggcgctcagttcctcaccctccgtgcctccgttcactcgccgccgtccggccgggacgatgaacaggccgaggagtgggagtggccagaagaaggggaagcgcgggggaggaggaggcggtgggctcggcgcggcgctgaggaagcaggtggccaggctctgcatcatccgggagtgcgtcatcatgctcctcttctaccacgactgatcccactgacgatgccctttgcggttcttcctggccattgactacctttatctttttttttttctcgatgtgcctcgtgtatgtacatacagggtggtggtggtggtggtggatgttcttgttcttgttcttgctcacgtgtgtgtctgtatctccatcattttttggcactttattgcttcctcttgctgcctgctgagcatgcagtacctagcttcgcttgcgttccctcgctggtgcttgtgctagttgcgtgtgtaggacagcggactcctaggtatctatttgcttggctgctccgccatgtcggtgctctgctgtctgctcatacatcaccaggctcctggagctctcttgggtgctctgtgccatggtgtttgtacttatatataagtgc

SEQ ID NO: 2510 - DNA, 865 bp, Zea mays
  Clone ID: ZEAMA-23APR03-CLUSTER3653_9
aatctctctctctctctcgtctctcggctcacatgcgtcgcgtcaatgcgtgcatgcaccaccaaacaaaaacctaaagcgaccacccaagccctgaggcgaggcgaggcgagatctatctttatatatagccttgaagcccttggaacacttcatctccaaattaagtcgccgagctctgaagaatctagctaggagcaggccgcctacgccatcggccgtccacagcaacatgtgctccggctcctggttctggagcagcggcggcggcggcggcagcgagaagcgcccgtctcttgtcgtcgtcaacctcgagcggcagctaaagaagacgctggccgtcaggagaaggaggaggaggttgaggctgaggaggttgcgagccggaggagcagaggccatggagatggtgaacctgaagctgtacctggagaaccggtgcatcatcgcggagaacgagaggctccgggagagggccagcgcgctccgccgcgagaacctcgcgctgctccagaacctgtcgtccaggacagcggccgtgccagagccaggagcgggagctgcgtgagtctgctgcttcgatcctctgccttcctgtctgcctgctgaacatgaagtagcgagctcgcgtcaccctcgttggtgcttgtgctacttgtgtggagtgtggacaggagacacaggccagtggactcctagccctaggtatcatccatctgcttggctgctccgccatgtctgtgatctgtgctcaactgctcatacataaaccgccaggttcctggagctctcttggggtgctctgcgccatggtgtctgtacattataagtgcgcggcacggattaacgagattttgttggcaag

SEQ ID NO: 2511 - DNA, 1127 bp, Zea mays
  Clone ID: ZEAMA-23APR03-CLUSTER36560_5
ttttttctttgcatgtgaaggagtgagaatgagacagtggggacagcgtgggagaaggggagcaatgccgttcgtgtccgagtgcgagcggcggggcggcggcagtggcagctccagcgggtcgtcgttgtcagcgcggcggggaagtgacagcagggctggggtgctgcaatgggatgaggtagaggagatcgatggagaggtgcagagctcgtacaggggacccttcgacaccatggacgcgctccaggacgcgctaccaaacaaaaggaaaggagcatccaaattctacaatggcaaaacgaattctgtagcagatgctgcccaaccggcaaaaggcactgctgatcctgtgaacccatcccctaagaagcgcaagggcttcctttcattcggcttcagctggaccaagtcttggagcagacgtggtgcaaccagcagctcagagaacttcgggaagacgctgtctgcagcccttacaggcagtgctcaaggcaacagcaggggcggtagcaatgagcaccagggctgtcaagaccctgctgcccactgcctgcatctgcacaggaggtccaacacgcctggcgtctctgcttccccgcctggacctggtgcccttcggcctcagctgatctcagtgcagatgcagtcagtgtctgtggcaggtgtggaggacgtggcggagtccaccgcctcagtttctcccagagagaagcgcaggaggagcttgcagtagtgacagtttcgtctgtccagttcagttagttgctccacccactggtgcccgttttaagaacgcggaatccagttgccggtgctcccagattctcagtgcaatggatgctttataatgcaaggttgaagctgcaattgtgtatagtggtgctatagctgctaagtttcttacccttattatacatatataaaataatggactaatgatagatatgctgaacttggaaaagtgatgcgtgatcttatgagagaggtggcatctaaaggacgtcatgtcgaacgtgtgaagaatttttttaaaaatatgtatatttgtgcgaaactttttagaaacctgacccccttttattttttatgttactcccggctttgtttcccaccccttccaatgg

SEQ ID NO: 2512 - DNA, 1488 bp, Zea mays
  Clone ID: ZEAMA-23APR03-CLUSTER3656_2
aaatctctcgcgcctcccactcctccccgccactcgccgccagcgaccaaccatcgcccgcccagcagcagcacggtcccacgccaggactcgacccacgcgcggctagctaagctcccgccgccatgatcacggccctgcaggtctccggcggcggcctgccgctcctgttcgcccggcgccggcgccgggcgttccggccgccccaagcggtggcgtccgacgccgccgccgccgccgagggcacggcgagggaggatggcgggaaggtggccctgggcgggtccggcgtctccgtcaccaagctcggcgtcggggcgtggtcctggggcgacaccacctactggaacgagttccggtgggacgatacgaagctgaaggcagccaaaggagcgtttgacgcgagcatcgactgcggaataaccttcttcgacaccgccgaagtgtacggagcaggggtatcgggagcgattaattcagagagtttactaggaaggtttatcaaggagaggcagcggaaggagcaggtggacgtggctgtcgcgaccaagttcgcagctcttccatggaggttcggtcgtgggagcgtcatctgcgcgctcaaggcctcgctggatcgccttggcgtctcttcggttgagctctaccaactccattggccagggatatggggcaacgaagactacctggacggccttggagacgctgtggagcaagggcttgtgaaggcagtcggggtctcaaactacagcgagaaacgtctccgagacgcgtacgagcgcctcaggaagaggggggtcccgctcgcctccaaccaggtgaactacagcctgatataccggaacccggaggagaacggggtgaaggcggcctgcgacgagctcggcgtcactctgatcgcgtactccccgatcgcccaagatgctctgacgggaaagtacacgccggagagtcctcctaaaggccctcgaggacggatatacacgccggagttcctgacgaagctccagccacttatcaaccggatcaaggagatcggaggaagctacgggaggacttcaacccaggtggtgctgaactggctggtgtgccagggcaacgtggtgccgatcccgggcgccaagaacgccgagcaggcgcgggagttcgctggcgctctcgggtggagcctggcgcccgacgaggtggaggagctccggtccatggcgcgccaggtcaagcccgtcatcggcttcccagtggagaagctgtgaccacccccatggcactggtatatatcaggtgtatagtaggactgtaggtacgtagatgggcaaagcataccatttccatcgcgagactgcggacgatgtatgctacattgctactgaacgtagcgtcacgccgtcgaccagatcacagtagctgtctgtgctaaggacgcgtttgactacttgcgaaaatcatgggtttacatgaaaaaaacataaaaagataatgtttttattc

SEQ ID NO: 2513 - DNA, 1424 bp, Zea mays
  Clone ID: ZEAMA-23APR03-CLUSTER36703_1
ttttttttttttttttgcataaacttctgtccattgctgacagagaaaccaattatctctcaagcatattagcattggtctgtagacctacttggcagtatgatacttacaaccacaattaagcataaaattagctttgctctactaaataactggaaaaaagagccctaggaacctaatacagatgctgaaagaaattgaaaaatcacatgtcataatataaatgtagtagctacaaagaattgataaaacaaggtgagaaaatgtccacttctgcagctaaaccctgatgaaacgaagagcaagcttatcctgctatagatcttcctgcaggagtttgttcaacagagtggtcaggagtgcatcccttttttcagctcgtgcttcttctctcatccttcttcgctcctcccgttccatccacgagtgttccagcaacaaccgctcctgctccagcctctgcattgtcagccgccattgttgttcaaaaaccacccgctcctgggcgcgtctctcgatcatctcccgccaccggacatcaatgtgctgttgctgcaccaggaaatcctgcagcagttcatggatgctcgaaattcctgttcttgacttctcagacattctttgatgttgctgtttcttgtcgtcagctttcctcttcctgttgtgcatcggcttctcatcatcactttcttcaccaccatcgtccttgtcgtcagactccccagatgaccggtcaccaccaggtcgcttcagtttcgttttgacagaaactccagattcagactcaaggagttgttgctgcatatttctagcacgctctgtgaagacaccatgcagctcttcaaagaagggacactgcctaccattttctggatctgaagtttctttccccttgtagcggttgacgaggttcttccacttgcacttgcactgctcggcggttcgtcggtagcctcgctcccggaggcgcgcggcgacggcctcccacatcgtcttggcgctgcggcgcgccgcgacggtctcccgctccatctccccgcgcgccatgattagctcccgcgtctcctgcgcgccccactgcggtaccctctcgtcccttcctcccgctcccgcgcccgcgccgcccgcctccatcatcccacagcccaccgcccctcctgccctcgtctcctcagcgcgacttgaccaacggtagcaatccctaacgacaggctgtaaaccgcggcgaggcgcggccgcggagggggactgcaggccctgcccttaacccccgttttcttcccttgctttcttgcctcgatttccttgctcccctcgtttttcttcttgcttctcgcctctgcctgcctctgcctgccattacttttctgcccattcacacagctcggtctcagagaacggggcctgccgcattcacactagct

SEQ ID NO: 2514 - DNA, 1443 bp, Zea mays
  Clone ID: ZEAMA-23APR03-CLUSTER36739_1
ggatacaacatcttttttttattataagaaaatggcacaataacaatctaaaaagtccacgttaagtagaattgttacgctatcttcagcagtctctctatctcatctcttatctatcttactccatatttgaaactccacaccataaataatgcactctacaatataaaacagtgttttacatgcaccgcataatgcaacactttattaaatgcaaaatatcagtgttgcagcttacatgtctatatgttatgggcaaataaaaaaactagttaccaatagtattattgaacttgaaccaaagattttcggagcagcacttgacactacggcttgataaaagataaaagcaaacagagacagacttaaattgactgttatacttaaatttggcaacgctagcaaagacatgacaattaactacacgattcatttttccccctttgcgatcatgcctttgcccctccagttttgcggattaatttggaggcacatctttacaaacaagacagtgacaccggcccgtgatccctcctcctttcacacacctgtattgcctgagtgtgatgactccacgtagcttcttcagccagttctgcattcatctagctttttgcaaaaagaatgcaggatcaccatgttatatagtggcacagatctctatcaggtcacagtggcacaatccttccttcgggcattttcctgtcaactcggccaattctgtggggtggccagattatgtgtgtgaccctgccccgtaacagacccataggaacagggccataggatctcgagtcaaagctggtggcggcattgtcaccttcaacccagcagcgcccctgcgggatctgctggatctcctgcttctccgggatctggatccaatccccaggcagcgcaatcagcctcttcaccaccagttcacgatggtccctcggcgacctgaagacgacgacgtcgccgcgggagaagtggtagcggtggaggcagcgcttatctaccagagcgcgttcggcctgctgcgggtcgaaggtggggtgcatggaggcgccgtgcaaggtgacgtaggaggcgctccagtcggcgatggtgatgccgaacacgccgccggtgatgcagcctttaacgatcggccagacggcggccaagattctcgccatgcgcgcggaaaggaaagggaccagcggatgacagcgcctccgccgcttgccgtcccgtcagggtgactgggtgagggaagacgggatgacactacttccacccggccatggtgatgccgaacacgccgccggtgatgcagcctttaacgatcggccagacggcggccaagattctcgccatgcgcgcggaaaggaaagggaccagcggatgacagcgcctccgccgcttgccgtcccgtcagggtgactgggtgagggaagacgggatgacactactatctcc

SEQ ID NO: 2515 - DNA, 1423 bp, Zea mays
  Clone ID: ZEAMA-23APR03-CLUSTER3680_1
gcacgagaccattacctagaacatcctaatcgaaaaaaacaaaaaaagggccttcacttgactccacagccacagctagctgctgtggtgaagagtagcaggttcggcggccgggagggggcagccaacacgacgatggagcggttcggcctggacggcggcggtggcggtggcgagctgccgccggggttccggttccacccgacggacgaggagctcatcacctactacctcctccgcaaggccgtggacggcagcttctgcggccgcgccatcgcggagatcgacctgaacaagtgcgagccatgggagctcccggacaaggcgaagatgggggagaaggagtggtacttctacagcctccgcgaccgcaagtacccgacgggcctgcgcaccaaccgcgccacggtggccggctactggaaggccaccggcaaggaccgcgagatccgcagcggccgcaccggcgcgctggtgggcatgaagaagacgctcgtcttctaccgcggccgcgcccccaagggacagaagacgcactgggtcatgcacgagtaccgcctcgagggcgcctacgcctaccatttcctccccagctccacaagggacgagtgggtgatcgcgagggtgttccagaagcccggcgaggtcccacctgcagcccgcaagcaccgcctcggcgcccttagcagcactaccggcaccgccgcgggcgattcctgcttctcggactctacctcggcctccatcggcggcgcgtcgtcgtcatccacgcctggcccgctgttcgcgtcggcggccgccgccgtggccaatgccggcgccgccgacggcgacaccagctcctactgcggcggcgctgccaaccatggcaacctggtcaccggccgtgagctcgtgccctgcttctccactgccaccattaacggccccctagttgccgccgcgctcggcatcgggcagccgtacaacgcagccccgctgccgttcgagcagcagccgccgcctccggccttcctgccgagcctgcgttcccttcaggacaacctccagcttccaccgttcctctcagcaggcggtctgggcggcggcggggctctccactggctccccgccggcggcatggaggtcaaggtcgagggccgctcggcgccaccgcagatggctgtcggccccggccagctcgatggcgctttcggctggagcttctagttcttcgctgcactacatggttgtgcccatctatctagctagtagtggtttcttcatgcgttgtacgttaagcttggttaatcaactgctagtaagtgactgggtcgtcgttctaagtaatgtagtaactgtgttgtagtctctcatctaactgcagtagcagctttatttgttcgtggactaaaaaaaaaaaaaaaaaagggcggccgcaaaa

SEQ ID NO: 2516 - DNA, 1296 bp, Zea mays
  Clone ID: ZEAMA-23APR03-CLUSTER3689_20
gacagaaagaacaggaactcaaccaacacaagacacaacaagctgcagccgcggcaggcatggggcaccgcgcgcactgacaccgggccccaccaccattaccacccgacgcacactttatttagcccacgtcactcgcagcccgcaccggacacgtccacgcgacagtcactgctagctacgtaccgggctacgtacgacacacacacacacacacacagagagacgccagtaaccgtagcgtactgaacagcaaaatcccgtgtcatactgccatgtacgcgcgcgagagactaccccgccacgcgcgcacgccgatcccctggggcctgggccctggccgccgccgctgcgtgcgcacggcctcactcgctggccttctcgggctcctcaggagcagcagcctccgcctcggcggccggctcctggggaccagcaggagcaggagcaggagcctccggctcgtccgcggcgagctcctcgggagcagcagcctctgcctcggcgacaggctcggccgcggcgggctcctcggcaccagcaggaggagcagcagcagcctcctcctcggcggctgcctcctgctcgaccgcaggagtctcctcgggaccagcaggagcagcagcctccgcctcggcggccggttcggccgcgacgggctcctcggcaccagcaggagccgcggcctccgcctcggcggctgcctgctgctcggccgcgggaagctcctcgggatcagcaggagcagcagcctcggcctcggcctcggcctcggcgggggcagactcctcgggcacgacggccggcggcggggtctccaccacgggcgcttcctcggccgccacgacggtcggggtctggacctgcacacgtgaacggcgcgtaaaaatcaaagcatgtactcctccatcttagcgccacacttaatcttagcgtcctccattgttaacataggatatatatgatccgcacgtccatcgctgtacgtctcatcgaagatgagcgatcgaccgaccgatcatcgatgagacagagaccattattcatatataggtattattcggatccaaacgatccgtgcacatgtatgtatatatgaatcgaagactagggtcgatcgatccagctacctcggcagtggccattggtggcgatgagaaggctgatggctacacgaaggagtggcgcggctagctagagcctagagctaataagagactaagactgagtgaagggtggagctgcaagagtgagcgaccagcggagagtgagatggatcgagcttggttgtgtgag

SEQ ID NO: 2517 - DNA, 855 bp, Zea mays
  Clone ID: ZEAMA-23APR03-CLUSTER368_69
gaggtaagccgtctccagtcccaggctagatttgcccgtgtccttgtcaattgattatccatcgtggtggtgcgagctctcctttggtctgcgtctgtaatcgagttctcgcttgctgtggtktctcgtgatgtgatccaggtaggggaggttcggctgggaacaagttccgcatgtcactgggtctaccggtggcggccacggtgaactgcgcggacaacacgggcgccaagaacctctacatcatctccgtcaagggcatcaagggccgcctcaaccgcctcccgtccgcctgtgtcggcgacatggtcatggccaccgtaaagaagggaaagcccgacctcaggaagaaagtgatgcccgccgtcatcgtccgccagcgcaascgtggcgtcgcaaggacggtgtctacatgtacttcgaagataatgctggagtgattgtgaatccaagggtgagatgaaaggttctgcaatcactggacctatccgcaaggagtgtgctgacctttggcctaggatcgccagtgcagcaaatgccatcgtttgagagcttgttggaatgtgtttagacttgagtatgatcatctcaattgtgtgttgcagctgttgtaagggtgctattggacttgatggctccttttatgtttggtcactcaattttgtagtgaacagaaatttgtctaaaaaaaaaaaaaaaaaaaaaaaaaaaaaaaaaaaaaaaaaaaaaaaaaaaaaaaaaaaaaaaaaaaaataataaaaaaaaaaaaaaaaaaaaaaaattacaaaacatttattattaaatttataaatatattatattataataattaataaaaaaggggggtcgccattt

SEQ ID NO: 2518 - DNA, 766 bp, Zea mays
  unsure (1)..(766): unsure at all n locations
  Clone ID: ZEAMA-23APR03-CLUSTER368_71
acagccaaggaaatcttccgttctcaaaccaacctaggcaattcgccgcagcctctcaccctcgcgagtcccgacctcccgcagccggccgcacagatggcacccaaaggcggagaaagaaagccggcggccaagaagcccgcggaggaggagcccgcgacaganaaaggtggagaagggctccgggcgggggaaagaagcccaaggccgagaagcgccctccgggcgggaaggttcccaaggagggggcggcgaggggcaagaaggggaaaanaaaggnggaaaaaattccgtggagaacctacaagattacnntttntttcangngggttgaaagcaggtgcaccccgacattcgggcattctcgtcccaaggccatggtccatcatgaactccttcatcaacgacattcttcgagnaagctggccggccgaggcccccaagctgggggggtacaacaaaaagccccccatcaggtcccgggagatccagacccccgtgggcctagtcctccccggagagctccccaagcaccccgtctccaagggaaccaaggccgtccccaagttccccagcaactgagcgcgctgcgggacccccggatttgttaaaagggttttttgttgtgccctttccccagtcccccccccaacccgcctagaagcaagcttgcctgctctataaacccggggccccggattgtaagggcccccttaaatttgaggcccctgttgtggaaaaaagttgtatctccccgcttgctttt

SEQ ID NO: 2519 - DNA, 675 bp, Zea mays
  unsure (1)..(675): unsure at all n locations
  Clone ID: ZEAMA-23APR03-CLUSTER368_77
aagaaaagcctccattcccgagtctccagccaaccgcatccagtccaccccatccccctcgaccccgacaaccccgagtcccgacccgatggcgcccaaggccgagaagaagccagcggagaagaagccggcggccgaggagaaggcggagaagacgaccgcaggtaagaagcccaagtccgagaagcgcctgcccgcctcgaagtcctccggcaaggagggcggcgagaagaaggggaagatggtaatggagttcaaggaaggggagcagctcagagcacgtgtgacggcgcacagggatgccgcggccgtggcctggaaggatggcggctcatcgcgcgcggcatttggtctgttcttgtcggacgtggacaaccatgtacacaaggccaagacatggagtagcgctaatggtcgcgatggcaaattgggtcaaagctgaaatgacttgtaagatgtggtatgtagaataacttgttaagatccatggaatgatcactgggaacgatcgttgtgtaagcaggcgcaggccttagctgtaagcgtgcgagtgagttttatggtctttntagattacgatacaatcgtaatttgttaggattttttttataaagtcgtatgagctggcagtggaaattgaaaaggtttaaacgttaaacaaaaaaaaaaaaaaaa

SEQ ID NO: 2520 - DNA, 1823 bp, Zea mays
  Clone ID: ZEAMA-23APR03-CLUSTER36962_1
gcgggacggatcatccaccattccgagctaatcatttctcgggccggccctttggttctccctgcgcgcgcgcaatcatccttttccaccggcgacacactcctctgcgctcaaggcccagctgcacgcacgcgacacgcttatggtgacctctctctcactctcttcttccttggaacagaaccctttttgtcgccgccgacccgccgtcgcggggatgggtgtgggatacatgacggatgcggacgcggcagatcgatgagtgtcggggcacagctggagcggcggagctcggagcggcggtcgcagatcatggagcaggaggaggaacagggccagccgcccgatgaggagctcgtgtcccggagccagggctctagcacggagccatcgggcggggcgctcagggctggcgacaaggacagcgccgcgcccaagtcgcgcctcaccgaacagagcgctggaccttccggtaggtcacgccggcccacggcggatgatgcttcttggattggtgcgtggtgggcgagccgacggtgttgccggtcctgactcctgacaaggcgtcaggtggttgcgttgcatgaagggaaggactgatgaaggagaagtttgccaagctgctgctcggggaggacatcccatgctccgggactggacaagagggctccggctcccatcgacctcgcccgccgcgccgaggcgccccgcagcaggggcaacacgcacctctggtcttcgtcgcgtggttccacccacccccacacgcatcacccaccgcgcgccgcctcgtgcgtgcctctcaattccgtctcgttctgcagcggctctcgccggtcgcctgcagcagcagcagccatgatgatggcgtgtgccctcgccgtcgcccagccagcagcatctctcgcgccgccatccggcaagaggaccctctccggcggccgccccccgcggctgccacctcccaggctttcaggtaaacttgccttggccacaccgtgctgcgcgcgtggtgcaggcaagctaataaggagccgcgctgtcgttgccaaggctgcgcaggacgggtcggaatcgtccgggaccgggagcatagtgaaatacgtcaccagccctttcagcaccgcgaaagttattttcgtccttgctggtctaggctttgctgcacttgctgcattttgggagccggccacccatgattgtggtcagcgaggagatggtgtgacttgcgcgatctttgtcaagctgctgttcggggagcacctcaacagtccgggtccgggaaagaggttgccctccgcccttgccctctccatcgcggtaaccaacttagcacttcagcaccgcggaagacatttttgccctagctggtataggctttgccgcagtagctgcattatgggcttcggtcaacctcattgagatcatcgacaagctcccggtccttcctcttctctttgaactagtcgggatattggttgcatggcttttcatctacaacaatctcctcttcaagccaaaaaggaaagaatttctagagaacatcaaaagctcaggatctcgaatcttggggcagtaacctttgtaggcgacagttgacagcaagcactctgtcatgggttctctgcaagcatgccgaatgtaattatgcaatgtaactgtatgcgagctatgggtgttaccattttttattgtataagcatcaccaattttctgtacaaaaaaacaaaaataattatgcattgtagctgcacccgtgctctgggcgggtccgtgtgttattgtataagcatcaccaattttctgtaaaaaaaaaaaaaaaa

SEQ ID NO: 2521 - DNA, 2318 bp, Zea mays
  Clone ID: ZEAMA-23APR03-CLUSTER37048_1
acccaaatttgcttcccagatctgccgccgcacccccaacccgtggcaatcaatccccttcctcgcttcgcaaatggctcattccaatggcgcggccgccactgccactgccggcggcggcgacgtggacgacgagaccgccccggtgccgcgggccctcgcgccggcgcggaaggtggcgctgatcacgggcatcacggggcaggacgggagctacctcacggagctgctcctgtccaagggatacgaggtgcacggcctcatccgccgctcctccaacttcaacacgcagcggctggaccacatctaccacgacccgcacgcggtgccgtcggccccgcgtcccccgatgcggctccactatgccgacctctccgactcctcctccctccgccgcgcgctcgacgccatctcccccgacgaggtctacaacctcgccgcgcagtcgcacgtcgccgtctccttcgagatccccgactacaccgccgacgtcaccgccacgggggcgctccgcctcctcgaggccgtccgcctgtcgcgcaagcccatgcgctactaccaggccggctcctcggagatgttcggctccacgccgccgccgcagcgcgaggacacgcccttccacccgcgctcgccctacgccgccgccaaggtcgccgcgcactggtacaccgtcaactaccgcgaggcctacggcgtattcgcctgcaacggcgtgctcttcaaccacgagtccccgcgccgccggcgagaacttcgtcacgcgcaagatcacgcgcgccgtcggccggatcaaggtcgggctgcagaccagggtcttcctcggcaacctctcggccgcccgggactgggggttcgcgggggactacgtcgaggcaatgtggctcatgctgcagcaggaacagccgggggattacgtcgtcgccactgaggagtcccacaccgtcgaggagttcctgcaggctgccttcggctacgccggcctcagctggaaggatcacgtggtcattgacaagaagtacttccggcctgcagaagtcgacagcctcaagggggacgccaccaaggcgaggaaggtgctcaagtggaagcccaaggttgggttccaggagctcgtggagatgatggtcgatcacgacattgagctcgccaagaaggagaaggtcctggtggatgctgggtaccgtgatcccaagcagcagccatagaaacatcacagttgcttcttgctctgttggggctcggattcagattgttcccctcatacatggtgggtctcaggggtagaggttgactgaagttactatcgatatttatcctggtaagaaataaggattgttgcagtatgatcttacagtgtgttcatttagttttctgactatgttatgtgctttaatcgaatgaatgaataatccgtgccaatttggtatttggaagaggatgatatgcctgcctgattgcagctgttgatgttaagagcaaaagtgtcctcctgatagcagctgcttcagtttgtattgttccacttcagctactcccacacttgttctgatacatggcagaaaagctgttgtagggacattttgtaagttgaatcagtggcaaatgcatccaacaacacttgcagttgaagaggggaacaaaaaaatggaaacaaaaaatagcacctaactctgcctctaccggtgtagggagagcagagtcccacaccgtcgaggagttcctgcaggctgccttcggctacgccggcctcagctggaaggatcacgtggtcattgacaagaagtacttccggcctgcagaagtcgacagcctcaagggggacgccaccaaggcgaggaaggtgctcaagtggaagcccaaggttgggttccaggagctcgtggagatgatggtcgatcacgacattgagctcgccaagaaggagaaggtcctggtggatgctgggtaccgtgatcccaagcaacagccatagaaacatcacagttgcttcttgctctgttggggctcggattcagattgttcccctcatacatggtggttctcaggggtagaggttgaccgaagttactatcgatatttatcctggtaagaaataaggattgttgcagtatgatcttacagtgtgttcatttacttttgttattatgttatgtgctttattcgaattattgaagtatcatcttaaatttggttcatttacttttctatgttatgtgctttaatcgaatgaatgaataatccatcccaatttggtatttggaagaggatgatatgcctgctgattgcagctgttgatgtcaaaaaaaaaaaaaaaa

SEQ ID NO: 2522 - DNA, 1155 bp, Zea mays
  Clone ID: ZEAMA-23APR03-CLUSTER37085_3
aatctaaaatataaataaaatgacttatcaagatattttctaaaggttctgcaggtctaggattttctggatcacctaataaacctaataacctgctatgccagctccaaaattaattttttaaagttagatcagtcccaaatagaacctaagcagaacatcaaagcaagtcctccatgttatgtagcttcctctccttgacaaaatcttaaagccactttcacttggcgtgtctattgtctaataatcctccagacgtccacgttcagctccttcaacaaagtccgccacttcatttcacttgttaaatccctgaagcgcattggcgactctcgacctcagccggtcaagctttccgctcgccctggtctccgccatccgctgcctcttcagcttcgcctccagccgcgccgccgtgtcgtcaccgatgcgcccgaatgccctcttcagcgccccgtagccgcacctcgcaccaatcgcctccacctccgcggagaggcaagggtacagctcggccagatcgtcgaaccctcttgggtcattgcgcgcgtcgggcacacgggtcttcttctctatcctccccctgcgcgtgccctcccagatgagcttggagagcctgtagatggtgacgtcgctgtccttcgccgggatcgtgccgcgtttgaggcggataacggtgttgtcgtaccggttgcggagcgcgcacagccgcctggtgatctgcgcggcgctgaggcggtcccccacgctgaggcggccccgcaccgcggcggcgaggtcgtctgccaggggaagtcgcccgtgcttctgccggtgcgacgcgacggtctcgaggatcgcgatctcgtcggaggccggccacgagcgcacgggtgggcggggtttcttgaaaatgatgggctcggactctgaagagccgtctgagagcagcgaggaggcggcggagtcgtcggattcaggaggagagtcgaaggacgtcgaaggtgatggcgaggggtcaagatgttcgtcggagccgatggtggtgctgccgtccgaggacgcagacgaggggtgctcctccgatgtcatcggcggcggcggcggcggcggcggcgagggtttacgaagctatggtttttttcgattaggatgttctaggtaatggtctcgtgc

SEQ ID NO: 2523 - DNA, 1265 bp, Zea mays
  Clone ID: ZEAMA-23APR03-CLUSTER370_10
gcggcgctggctacggcaaaaaccctacgcggcccctcggcccagctgcttccccctccctcttctctctcccaccaaccaacgccctttcccttgccatttttgccgagccgatccggtagagagagggagagggagggactgagggaggaggagctgggttccggtcccggccgcccggccggctgcgcgattcgattgcagctctcgtccccgggcggcgtccaggatggtgcggggcaagacgcagatgaagcggatagagaacccgaccagccgccaggtcaccttctctaagcgccgcaacggcctgctcaagaaggcgttcgagctctccgtcctctgcgacgccgaggtcgccctcgtcgtcttctccccgcgcggcaagctctacgaattcgccagcggaagtgcgcagaaaacaattgaacgttatagaacgtacacaaaggataatgtcagcaacaagacagcacatcaggacattgagcaagtaaaagctgatgctgagggcctggcaaagaaactggaagcacttgaagcttacaaaagaaaacttttgggtgagaggttggaagaatgctcctttgaagaactgcacagtttggaagtgaaactcgaaaagagccttcattgcatcaggggaagaaagactcagctgctggaggagcaactccataagctgaaggagaaggagatgaatctgcgcaagagcaacgaagatttacgtgaaaaggtaatgggggcgaaaacattttgcagacgctgcactgcggcaagcggcatgccaacaacccaagaaaacagtgcaagaagcagccgccgccgccgccgcctatgctgatggctcctccgccgcctccagcgccggcagccatcgatcacacggggccgaaagatgtcgggatggacgtggagacggagctgtacataggattgcccggcagagattaccgctcaaacaacaaagacatgactgcacagtagctgtcaggtcaggtcaggtcaggccagccagcagtgcagagaataatcttagatctgtggtgcggagaactggagatgcaagccaagcccaagccaatcaacatgataaggatcatgagtgtcgcgtcgtgttttacaaacctgtccaccgtccgtcaaaggcacatgcgccagaacgtccgtcagagaacacttaccccctcatctccctctattagctagctgctccggcctgctcatgtcgaaaccttctgttcaagtatgttctcctcctgatg

SEQ ID NO: 2524 - DNA, 1283 bp, Zea mays
  unsure (1)..(1283): unsure at all n locations
  Clone ID: ZEAMA-23APR03-CLUSTER370_4
gcacgagaccattacctagaacatcctaatcgaaaaattttttggtgagtgccccctttcccttccctagaccagatcctcgccccgttttccacttttgcctccaccgccggcccaattcggataacaagctccctccgcctcgccgcgtctcctcccagccgcaggagccgccgccatccgatccggaagagggaggaggggggagggaggaggatctgtgtcccgattcgattggagctctcgtccccggcggtccaggatggtgcggggcaagacgcagatgaagcggatagagaacccggccagtcgccaggtcaccttctccaagcgccgcaacggcctgctcaagaaggcgttcgagctctccgtcctctgcgacgccgaggtcgcgctcgtcgtcttctccccgcgcggcaagctctacgaattcgccagcggaagtgcccagaaaacaattgaacgttatagaacgtacacaaaggataatgtcagcaacaagacagcacatcaggacattgagcaagtaaaagctgatgctgagggcctggcaaagaaactggaagcacttgaagcttacaaaagaaaacttttgggtgagaggttggaagaatgctcctttgaagaactgcacagtttggaagtgaaactcgaaaagagccttcattgcatcaggggaagaaagactcagctgctggaggagcaactccataagctgaaggagaaggagatgaatctgcgcaagagcaacgaagatttacgtgaaaagtgcaagaagcagccgccgccgccgccgcctatgctgatggctcctccgccgcctccagcgccggcagccatcgatcacacggggccgaaggatgtcgggatggacgtggagacggagctgtacataggattgcccggcagagattaccgctcaaacaacaaagacatgactgcacagtagctgtcaggtcaggtcaggtcaggctagccagcagtgcagagaataatcttagatctgtggtgcggagaactggagatgcaagccaagcccaagccaatcaacatgataaggatcatgagtgtcgcgtcgtgttttacaaacctgtccaccgtccgtcaaaggcacatgcgccagaacgtccgtcagagaacacttaccccctcatctccctctattagctagctgctccggcctgctcatgtcgaaaccttctgttcaagtatgttctcctcctggaaaaaaaaaaaaaaaaaaaaaaaaaaaaaagtcnaacaaaaactaaaaaaactcaaaa

SEQ ID NO: 2525 - DNA, 1046 bp, Zea mays
  Clone ID: ZEAMA-23APR03-CLUSTER3711_2
cacacacacacatcctccaccaccattcatcagaaagcgaagcacaagcctctgatgccaagccaaagcacacacacctcctccagcctttcttcctctacagccccaattcttccctgcagctctgctgctgccttgtttcgatcggtcatggcggcggtggccacagagactccgttccatgtcctggcggtggacgacagcctcccggacaggaagctcatcgagaggctcctcaagacctcttccttccaaggcaaactcagccaccggatgattattcccgtctcctttgcctctgctctgagtctcacgaaaggtggccggcccctttggcttttgtttctgaatgtatgcagtgaccactgtcgactccgggagcaaggcgctgcagttcctgggcctccatgaccaggacagcacggttcctcctgtccacacgcaccagctggatgtggctgccaatcaggatgtggctgtgaacctgatcatcacagactactgcatgcctggcatgacaggatatgacctgctcaagaagatcaaggagtcgtcgtctctcagagatatcccggtggtgatcatgtcctctgagaacattccttcaaggatcaataggtgcctggaggaaggagctgacgagttcttcctaaaacctgtgcggctatcagacatgaacaagctcaagccccacatactgaaaagcagatgcaaccaggaacagcaccagcaaagtgacagtcacagtggcgaacgcaggaaccccacaatcggcagcagcagcgatagcataaacaaccgcaagagaaagggtgcaggcaccgaagaaatcttgccccagctggcaaacagatcaaggcacagttaactgagaactgactagtacagctaaaaccttttctttttcactttactttggcctactgatttgtaacgtagatgttagccctggatttgcaaaacggaacggaatctgtaaactgatactgcttgagtcgaatcgatcgaagtgattctgcaccaaaaaaaaaaaaaaaaaaggcccc

SEQ ID NO: 2526 - DNA, 2028 bp, Zea mays
  Clone ID: ZEAMA-23APR03-CLUSTER371652_1
agaaaccagacacccagcccactcatgcaagcaccctggaaacacacgcacgcaccagccgcacaagaaatgaaggcggcggcccgcggcgtacctcccagcggcgtgcttcctcggaggttgcagcggctccttctctttttttctccatgatgcacaacctctgcttccttccctcattttgcctcttgttactctccttctcgtgctctggtttcttgatttaaaacctagttttgggggattttgcaatgccaagacaaggcagtggggattcgagcagggatggatgtcgacgaagttccagaagggatccgaagaatgcttgtagagttgaggtcaatatcaatgcatacttcagctttaattaaagatggaaaaaaggtgtacaatcgaggtagggttgtgagctgggttgttgattcagaagagtatgccatcattgatctggaaaaggatatcactccgtactttatatgggacgacaatcagaaggcaaatttctaggttctaactggttctgatttgacatgcttgttaacttcagatagtcagcttcttgacttactaagggcatctcaactagtgaagttcctaatgatagtgagcaggtgtgaggggaatgagatgcgtgttgcagtgaacatggatgtcgaggacatacctagtgcaacgaatgttgttgaggatatgcaaattggggaatttaaatgggcagaagtagcagaatatggagaaacaactgcaggtccaccgatggttgaagaggacgaaaaggaaaacttcatgactgttggatgtgatcctcatggagatgagccagctggagtagatgaagagtggacgtactacaaaaattagattatgcgtttcttgatgcaaatccaatagaggtgcagaaaaaagaagacaaagcctatagacttcgatactgaatgtgttcctgaagatgagtttactatgatagatgattgtgttgtgcctcacacaacgcatgatagtgagaatccaatcattaaggaaggctgaacatgaagagccgagggctgcattatgatatcaagaaaagtggtcccatgtcagctgaaatatcaggaacaacaaaggaagggaagacttggaggtatggggttgaccttgccaaaagagaatgtggttgtggataatgggagttgtcagggaaaccatgcactcatgctatatacttatttgggacagtgaaacagcgcatgagacaactaaacattgaggattttgtgcatgactactattcggtagagaggttcaagatggtgtatcagttttagattaatccaatgagtgacaagtctggatggccaaaggttgatgctggtagacctaggaaacaaaggatcaaggctagtggagagccaggaaaacgaggaccacatcaatgcaaaaggtgctttcaatttggacacgttgagaagggttgtaatgcaactcaagctgaattagaacaagagcttccaccacctcgtccaaaaaaaggaaaaaagccaaggaaaagcaaacatgaagatgaagctgttgaagcctctagaaatgatgctcaggcatccatgtcagttgttgaaccatctccaatgcctcattcaagtgcaggggtaactcctagaaggatggcgtctctatctccaactagcccaagtgtaacaactagaaaaatggctactatttcacctggaggaatcagtcagaggctcatcattgagtagatgaattagcaaacttagtatgcgacttttaatgtttttttatgaaagataatgtgtgcaactatggtgctacagaatgcattttataggttgatatttgtacatgtcttgcttaagggaaatggggttggagtggaggcgttatgctctactgtaatagagtttttgaactgtcctgtagtttttttagtcatctaacgtggatttaacggcagtggcagaaatctataactgagtaatactttgatggtatttttctgatctttaatttccaaaaaaaaaaaaaaaa

SEQ ID NO: 2527 - DNA, 1761 bp, Zea mays
  Clone ID: ZEAMA-23APR03-CLUSTER3717_1
aacattgcaacctgcaactgcaacattgctctttggaattccacctaacatccattgttgcaagaaggatcaaggaacaaccatggcgccgcatgtcctcgtcgtgcccttccccggtcagggacacatgaaccccatggtacagttcgccaagaggctggcatccaagggcgtggccaccacgctcgtcaccacccgcttcatccagaggactgccgacgtggacgcgcacccagcgatggtcgaggccatctccgacgggcacgacgagggagggttcgcgtcggccgcgggcgttgccgagtacctggagaagcaggcggccgccgcgtcggcgtcgctggcgtcgctcgtcgaggcacgcgcgtcgtctgcggacgccttcacgtgcgtcgtgtacgactcgtacgaggactgggtgctgcccgtggcgcggcgaatgggcctgcccgccgtccccttctccacgcagtcgtgcgccgtcagcgccgtgtactaccacttcagccaggggaggcttgccgtgcctccgggggcggccgcggacggcagcgacggtggtgctggtgccgccgccctgagcgaggcgttcctggggctgccggagatggagaggtcggagctcccgtcgttcgtgttcgaccatggtccgtacccgaccatcgccatgcaagcgattaaacagttcgctcatgcgggaaaggatgactgggtgctgttcaactcgttcgaagaactggaaaccgaggttttggctggcctgacaaagtacctgaaggcccgagccatcggcccatgcgtgccgctgcccaccgctggaaggaccgccggcgccaatggccggatcacctacggggccaacctggtgaagccggaggatgcgtgcaccaagtggctagacaccaagcccgaccgctccgtggcctacgtctccttcggcagcctcgcgtccctgggcaacgcccagaaggaggagctcgcgcgcggcctcctcgccgccggcaagccgttcctgtgggtggtgagggccagcgacgagcaccaggtcccgcgctatctcctggccgaggcgacggcgacgggcgccgcgatggtcgtgccctggtgcccgcagctggacgtgctggcgcacccggccgtgggctgcttcgtcacccactgcggttggaactccacgctggaggcgctcagcttcggcgtgcctatggtggcgatggcgctgtggacggaccagccgaccaacgctcggaacgtcgagctcgcctggggcgcgggcgtgcgcgcgcgccgcgatgctggcgcgggcgtgttccttcgcggggaagtggagcggtgcgtgcgcgccgtcatggacgggggcgaggcggcgtctgctgcacgcaaggcggcgggggaatggagggacagggctcgcgcggcggtggcacccggtggcagctctgaccgcaacctggacgagttcgtgcagtttgtgcgcgccggcgccacggagaagtgagaggcgctggctgtgaagtgtgaagggaggtgatgttgcagggtcccagatgtgacgacgcgatgcgaaggagaaacgtttcgaaactggaagcaaaaaacggtcgaaagttggtgcctctacttggtttggtttatgctttgggtccaccagccataataatatactttgcttgaggattctaccataacaattattcagccttttattttctaccctatgaaaaaaaaaaaaaaaaaagggcggcgctcgcgatctagaac

SEQ ID NO: 2528 - DNA, 866 bp, Zea mays
  unsure (1)..(866): unsure at all n locations
  Clone ID: ZEAMA-23APR03-CLUSTER37187_1
ttttttttttttttttctnatagatggcttccctatctcacttcatgttacaaactctttactctatagacagcagtctatagagatggcttagagggcaaaatcgaagctgtggtttgacccatatgccatcacagcctcacaggcaatacgctcagtgttcagatgctcgaaccacacagtacgatcatataacgcggtgttggtcatgtcatgtctccatatcacgcacactaccacaacagacaccatgttttagcaacatctattgaatatctcgctgaagcctattcacgagctggaggcctcaaaagtatctggcttatgcttctccatcagggccgtcagggctgcgtcgtgatccctctccagctccagctccttctccatgtattgtttcttgagcttcatcttcttctcctcgtggcctttgatcagctcatcccgctcagcttcaaactctgccacattcttgacctggcaatcaatgaacttctgtacatgttccttccttagcttacgatcttcttcggtagttccagaatcaacatcaaagcgtctagcctttgagcgctcctcctgcagcaacttctcaaatcgtttttctttatcctctgtggctttgtgaataccctcaatttgactatgaaaaaattcctcctggtgcttcatctcttcctcatactccaagtgcttctcttttgctttcctcttgacaaatacgttctcttccatagtctcacgtagcttctgggtaataacacccaatgtttcttctactgcttttagatctctgctctgtcttaaccatcttgttctttaggtaattcagttgttggttatcttcactcatctgtttcatctga

SEQ ID NO: 2529 - DNA, 996 bp, Zea mays
  Clone ID: ZEAMA-23APR03-CLUSTER3724_2
aagaaatcttccccacttgttccctcgcgtccatggccttgctccagcctactcttctcactcctcccccgctctgctgctgctcgcatggcctcctctacccagggttcctgaaactgcctcccaaattctcaaatggggcctgctgttccacggcgagggcgtcggaccggagcgagctggcgggtaaaagcgggggcttggcttggagagcggcggggagaaaggggcggctgcttggcgtcaccggagctgggcgaggccccttctttggcggcggcgggaggcgtatggacaagggcactagccgggtcgtggggaacctcgccttcgccgccgtcgtgacgtacctcgccgtgaccggccagctccggtgggttattgacgccatcgtctctctctggctcctcacaatactgctgcctgtactggctctgggtgcatttttcttctttgcaggacaagatatactgcagggtgattgtccgaactgtggaaaaagcttccagatactgaagtcagctttgaaggatggcccacaactctgtccctattgcactcaacctttctccgttcaaggcaacaaatttgttagagaatccgctagattttcatctgggagggctgctactgctacaaatggtccagtgttcaatgagatcttcaaccgcaacatgagaggaacggcggcgccttctgagacgatcgtggatgtggaggctgaagtcaaggacgtggagtgatgtttccacgggatcctacaccacgccagtcctcatcagtaccagttctcgtcttctcagcagaagaagagcacgattttcttctgaatctgtgagacaatggggagaaaactgaaactgtgagagactaggcaaacgtgcatatatagatagatgggggtatcggggatgggtagttgtgtaagtgcccgcgcgcatgagaaactggacaagagcacctactagcacaagttgtggtaaaaaatgaacaaaa

SEQ ID NO: 2530 - DNA, 1571 bp, Zea mays
  Clone ID: ZEAMA-23APR03-CLUSTER372521_1
gtgaatcgtgatcccctgtggttccttccgagacacgcctgcccgtaaaaaaatttacggcgtcacatgtttgtgcactgtgcagccatttcctttgccttgagattttgatgatccgcgttctgcattcatgtcttcgttgcagacgatcgatcagcgggtgcgcgcgctggcggtggacgatgccgcgccgcccacggagcactccttcgcggtgccgccgaggagtactaccagaagcggccgcagctgctggccctcctcgccgacctccaccggccgctacctctgcctcggccgaccgctactgccaccaccagcacaagcgagagcagccctcgctgccggcgtctgcctcctccgactgcggctcgtccgaggtcgacgaccgctgctccgacgccggcagctcgctctccttccaggcccagcacgcgccgccgcgggccggactccccgccgacgaagaggaggagctgctggtggcggagctggtggccgcgtgggtggagcgcgacgtgctggcgcacgaggcggcgcggcgcgcgccggagtcggcgcgcaggatccagctgcaggggagcctggtggaggtgctggagtcggagcgcctggtgctgctgggcgagaacgcgcgcctggggttccgcgcgacggcggccgaggacgaggccgtcggcggcggcggccgacctgggctacgcgcgccgccgcgccgccgagatggcccgcctcgtgctcaggctccgcgaggaccaccgcgcctgcgtgctggggcgcagggccgaggcgctgcaggcgcgggtgtacgcgctggagctccgcaaccgcgagtgctgcgaggccacggcggcgtgggaggccgaggtccagcggctcagcgcagagaaccgacgcctcgcggaccaagccatgatggcgaggaggaagcgcaaggccggtggtggtgggtggtgggcgagggtcaggatggcagcggccgggtggacgccgtgtgcgcccgcggtcacggtcgccgagcagaccaaggggaaggaggacggcaagtaccaccactacggcggcggatgcttctgtgtctagactaggagatgagacggcggcggcgatctagccctcctttttgttagtagtaattactattataattcaggacttggcaggtgaatgtgaatgctgctgggtcggatgcataattctggagaagacgatgattgtgctccgcaggcactagtaaaacaacatgcaattcgtatgatctgttcaatacattataccatggtgttcccgtattctgtagtacaagaaattccaagatctcaatatattgctcttgggaatttagcacacggttcaaaacttgtgaatttggccgcgtgaggatgtgatgaatggcacttgcttcaggttgtaatcaattttccctattcagtcaatctttgctctggaggttttacaaaaaaaaaaaaaaaaaaaaaaaaaaaaaaaaaaaaagaaaaaaaaaaaaaaaaaaaaaaaaaacgcgcgcctgctaaaaaaaaaaaaaattctataggctaaacctaaaataa

SEQ ID NO: 2531 - DNA, 1680 bp, Zea mays
  Clone ID: ZEAMA-23APR03-CLUSTER3730_2
atattagtattaatccgggttttttcccctcgaagaaacggaagctcgtttgtaggagtgacttgtaggtagtagcgctcactgcataaaattggattggattggattatgctcttctatactagtagacccagccagagcttatactagcactgtagcatgaacagggaccgggacagctggacagtggcagaggagaggagatgagccgatcctttgctaccttttcctcccttttcaatgaatctccatcttcctcctccctggtcttggctgtttggttcgttccagaggagggctgggacccggacctcttcatactcctctgatgatgatgatccattaatggtacagctcatgtgtggtgtggctgtgacttgtgatgagtgagcgtgccccttcttcctcctccagcctccagctccaggtgcggtgtgaggtcccgctcctgctcctgtcctaccagcgtactactccagtagtacagtggagtagccgagcgcatttaatagctggacaaggtgagaggaggaagctctagccacacacacacagcacagcacagcacagagggaccgcaacggagcagagaactgggccaccaaactgaaccaaccgcgggaaggagaaagggaacccgaacccttttcctccgcgtgcattaaaacccttcacatgggcatgggcatgtcagctgctgccccttcgtcctcgcccctgcttgctggctggctggtctgctctgtcccgtccgtcctactcctacgaggagtcgacggtggagacggaggtgcgcgcggcgcacaacgtgctggaggcgtgcgcgcagacggacgccatggagcgggtcgtcttcacctcctccgtcaccgccgtcgtctggagcggcgccggcgccggcgtcggcgcccacagggaggaggtcgccgacgagaggagctggagcgacctcgccttctgcaggaagttcaagctgtggcacgccctggccaagacgctgtcggagaagacggcgtgggcgctggccatggaccggggcgtcgacatggtggccatcaacgccggcctgctgctgtccgcccccgggcccgggctcgggctcaccgccgcgcacccctacctcaagggcgcccccgacatgtacgacggcggcgtcctcgccaccgtcgacgtcggcttcctggccgacgcgcacgtcgccgcctacgagtcccccaccgcctacggccgctacctctgcttcagcgacgccgtctgccgtcccgaggacgccgtcaagctcgcccagatgctctcgccggccgcgccacgctcgccgccgccaagcgacgaactgaaggtgataccacagaggatccagggcaagaaactgaacaagctcatgctggagttcgccagcggggtatacggggagctggactaggaaggaactgccaggccacagatgatgcgatgcgactagggctgttgtattcttttgtacgtagtactatttgtagttttcgcccccctcacaaaaaaaaggagggaaatctgtttggttggccaaaatgtgccatacgctcgctgtacatggccaaacacgccacgtgtgtagcccctgccagcagcaggggtgggtggggagagcatttcagtgatcggttgccaaagaaataccatatcgtatctaggttcgtg

SEQ ID NO: 2532 - DNA, 675 bp, Zea mays
  Clone ID: ZEAMA-23APR03-CLUSTER37375_8
aacattagcaaggcgatagataagaggaaggaaagaacataggcagccgaagcgactgtcgcgaggcaaggccatcgtccgccatgacgctctccctctccacctctttcctccccatccccgccgccgcgaggaccaccgcccgcaccctacgctccgtcgtcccctcccaggtacgcacgttcgtacacaccggccctccctctcgccattcctgcacggatcttcgtcgtcgccgccgctaattcctgagtccggaacctggacggcgcggtgcaggggatgcgctgctcgatgcgcaagaaggggttgcacccggagatctacgaggacgcgaaggtgtactgcaacggcgagctggtgctggtgacggggggaaccaagccggagtacacggtggacgtgtggtccggtaaccacccctactacgtcggcgacacctcggcgctggtggtgatggacagccagatcgagaagttccgcaagaagtgggggcacgtcaaggagtactggcccgaggaccagtggagggagatgcaccccgacggcgacccggagttcgagcccgagggggacaactgaaatggctcccgtcttcttcctcatcaatcaccgtaccggtgctgtttctctctgtgtcctcttgagtctgaatggaattgagacttttggtct

SEQ ID NO: 2533 - DNA, 2101 bp, Zea mays
  Clone ID: ZEAMA-23APR03-CLUSTER373834_1
ttttttttttttttttagcacatgaacgtcaatctaagttgacatgataccctgatgaaattcatctgaaggtaaagatggccattgtagagccgagacaaggaaaaaagatctgtgggcagatggttgctaataaaatgtatatgacagaattttcatgaaacattcatcactttaaattcccagctttaaaataggcaaaaagcaccaaccttagaccgatcaatccaagaaatctttcaatccaaacaaaattgggaagcctctcttccaatgtccactgcagtctgcaggccaataaatcattttcgtgtagaacatttctcaaatacttcacaaacacccccatcctagatcatttcgcagtgacggctgcaagactacattggaagcagtcccactcccaccgtagcagttgagttcctctttctgcaatcctcatttcaaactttccatcttatatctctgcagttatgtacaccactggctcatcaggcatctccatccagcctcatccagcgaaatactcagtccagtgctcccatatgccctgagaagtgctcttgtagccacaaagatcttcacttatgcaagccaccaagaagcctattataagaggcaatatttggtataaatcctaaatcaagcatttcatccaacacagccttcccttcctttcttttcccctgcctcccaaatccttgcaccagcatacgataagtttcaccgtcagcctcaaaacccttctccttagcgaacacccttagctggttagcatcagctgtcctcccagcttcgcaaagcgcctcaaagatgcagttacaagaaattgaatccggaacaatcccttgatcaatcattctccacatcaaccggtaaacctcatccagcttccctgcctccatcaggcactccaaaactgtggcgccagcaggtgcactcatacagcatttggtattcctctctaataccatgtctactgcttccactgctctgtccaccttcccaccacggcaaagagcctcaacgacttcaaagcaatcaaacccttctggcaccaccccatcccccaaaaactcaacaaacagctcagccgcctctagagccttgctaccacggcacaatccaccgatcaaaatctccatggacgcaacggacagcccaaccccaagctcaagcatctcgcgtgccacctttgttccctccttatacctgccttctctgatgaacccacgcataagtgtgttgaaactaacgaccgtcggtgcacagctccggcgctgcatctcaccaaaccaccgcatggcggcgtctacgccttccacccggcatgagctactgatgagtatgttgaaggtgtggacatccggagcgacgcggtagacggaggtcatttcgccgtagaagcgaatggcatcgtcgtggcgacggaggcgggagagagcttggaggatgatgttgtagaactcggcgggtagtggggagtcagcgacgcgccggagagaggcgagggcatgcgatgcggaggggatgtcgccggaggcggcgaaggcgacgatggccttgcggaaggtggggaggagctcggggcatgcaaagatggagtcgtcggcacaggggcaggggcgggtgaggacgagctccaggaggcgctggagcgaagggaggcggcgggaagccgcgaggcgggcggcgacgagggacgtgaggctgtggtcgggtcggaaagcggaggacgcgtctgcggcggccagcaggatgtggaggtcgagcgccacgagtcgggggtggtggcgggctcggcggaggagacgaaagagagaggcgggggaggaagcgtgagcggaggggagcaccgggagcgggttaggcggcgagaggtgggagacggcgagcggaaggacagggagtgaggggtcaaacgggatggatgcggaggtggtgggggcttcggtgagttcaggcgcgtcagtctccggggagatgaggcgctcataccgggagatcagagacggcagcttccgcgcgaggcggcgagaggcggccatcgtccggcggtgaagggggaaaggttgggatcgaccattccaaagagacgata

SEQ ID NO: 2534 - DNA, 1118 bp, Zea mays
  unsure (1)..(1118): unsure at all n locations
  Clone ID: ZEAMA-23APR03-CLUSTER37450_1
atgtgccatgccagttaagtnnnnnnnnnnnnnnnnnnnnnnnnnnnnnnnnnnnnnnnnnnnnnnnnnnnnnntttttttttttttttttaagggagactcttggagatcctcttatctctgattcaagcaaatatcaaccaatatatagttgttcattccaaataactcaactaataaagaagaataagtggcaccctagtcagtgggcatctattagactgtacacagaccacactctgaatctattgctaaccctgttcactttacagaccgcacaccaacacttctgactttaaacttgtactgtggaagctcatcttcctcatcgtcctcgtcttcacttgaatcctcttcaattttgtcccattttgagtagtcaaggcctgaatgactcttcggttttgggatggcttcccaaccctggggttttgaaggcgaagtggacggaaccacagcctttagaggttcagttgcaggttttctatggagaattggtccagctgaaggtttgttctcgaggaccagtttggttgctggttggtcaggcttagcgatagaagaagtgtcggtcttctgaactcgtggaggaagttcttcctcttcctcttcacgacaaagggactcctcttcacactcaggaattggggccagtgatagctgtgtcttcaatcgtgcctgcaggttccgatacacttcagacgacgggtttatctcaatgagcctgttgacatcaaacagagctgactgataatccttcagagtgacgagagtctgggcacgtaacatcagagctccagcatgctccgtatccaactcgaggacagatgtacactcttgtgctgccttgtggaagtcgtggagctttaggtagcaggcggcgcggttgctgtggagcgcgatgcgctgcgcggggctacgcgccgcagccagcgcggcggagtagagctccagcgcctcccggtggcggccgccgcggtagagcccgtgcgccctctccaccgcctccgcgccggcgccctcggcagcccccgccatcgtccgcgcgaagaacccggcggcggctcgggggccgagtgaatcggagatgggatttggaatccggggagataatcact

SEQ ID NO: 2535 - DNA, 1358 bp, Zea mays
  Clone ID: ZEAMA-23APR03-CLUSTER375565_1
ttttttttttttttttcgaccttttattaatccaccaggcacaacgtacattgatttcacaattgcataaacagagtcgaacgagaggaaaccacaagcttgcttgcaagcatgggcgcgaccaaacacatcctggattgctacggattgtgctgcatttctagggatttcacaactgtctgcgcagaaagtggaggatcttttcttagttgatcctcctgcagttcttcctgatctgtccgttggatcccgtcagcggcgtgatgtcccccatcttgaccatccccaccacgaagtccttgaagaaggtgctctggctgccgatgtactgccggaccagcgcgtcagcggcgccgccattgaagagctcctggtccgagtgcaggatgcccctcttctggacgagattcttgtagtagtcgttctcgaaggtggtcggggtctgcaggtccagtggcgccaggttgttgtcgccggagccggcggtacgagggcagcctgactggcggctcctggcgaagccggagtcgatgtttgtgtcgttgtagatgtggtcccggaagaatgtgcagcgtgcttggccgatcgtgtgggctcctgagagggcgaccatgtctttctgggagagcccctgcgcggcgaagagcgacgtaaggtttgcgagccccgatgtcggtggtgggatgttgttctcggcgccgttgaagctcgccgtcgtcgagtccctccgtcccatcttcacctcccaactcgggccacccagcaagacgacgctctcctcggcggcgatggcgaggatgtcggcacaggagacgacgccgggacactccttctcgacggccgtcttgatggcgtcgatgacgtcgaaccccctgacggagttcttgttgggcttggcgttcttctcgccgctcaggcccggggcgtcgtccagcagcagcgaggcgtcgcagccctggacgaagcagtcgtggaagaagaggcggacgatggaggcgcccacgcgccgctccctggcgatcgccggccgcagcgccgagcgcacggctttgagcatgcccgggcacgagcgggagtagaagcccgacgacagctgcgccgacgcgccgccggcgaccaccgcaaggatgagcgagaccaggacgacaatggcgcgcgccgccatgatcgatctatgggtttacgttgctgatgatcgatcgagtcaagtgtgttatctagctagtagctagctagatagatagtggcttgagagcttgtttgctggatggtggaggaatgccgggcggccggtatttataggagggaaagcctagctcacgccgccggccatgattatactaaaagtgggaacggga

SEQ ID NO: 2536 - DNA, 1111 bp, Zea mays
  Clone ID: ZEAMA-23APR03-CLUSTER37565_1
cctctcacttctcatcgccgggatccagatcgttcttcctcttgcccgccgattcgttccaccaccgcgaaagccacacagagagcaggagagacaatccagagagatcggcgccatgaacgacctcatgactaagtccttcatgagctacgtcgacctgaagaaggcggcgatgaaggacctggaggcggggggcgacgggatcgagctcccggagtcgggcgccggcggcgtcacggacgagcgcctgcgcggattcttccaggaggccgaggcggtgaaggcggagatggcggccatccgcgacgcgctcgaccgcctgcacgccgccaacgaggagggcaagtcgctgcaccaggtcgacgccctccgcgcgcaccgcggccgcggagtacaaggagaccgtggagcggcgctactacacgctcaccggggaggtccccgaggaggaggtgatcgagcgcatcatctccgacggccgcggcgaggagctcctgggcgccgctgtcgcggagcacggcaagggcgccgtgctcgccgcggtgcacgagatccaggaccgccgtgacgcggcgcgcgaggtggaacgcagcctcctggagctccaccaagtgttcctcgacatggccgtcatggtggagacgcagggggagaagctcgacgacatcgagagccacgtcgccaacgcctcccactacgtgcagggcggcaacaaggagctgggcaaggccaaggagtaccagagaagcagccgcaagtgtctctgcatcggcatcataatcctgctgctcctcgtcctgcttgtcatcgtgccaatcgccaccagcctcaggaggtgatcgagttgtgatgggaggaacaacgccggggttgtgaattgtgaaatgaaatgaggggttccaattcgatccgatgggtgggattgggggttctaatgatcaggacactctgcggttgtgtcttgtcttgttcgattcagtattcgttaatttgagcatgaatgtttccgtggaatcttactgaattgtattgtatgaggtgagattcggtaaaacaaattcgtacttagaagttcgaatttaaaaaaaaaaaaaaaaaaaaaaaaaaaaaa

SEQ ID NO: 2537 - DNA, 2054 bp, Zea mays
  Clone ID: ZEAMA-23APR03-CLUSTER3759_2
aaacagattgcctagcttaaaccttgagtgttctcttcctctcaaacaatcaaaccaactaagccagctgcaatcttctctgtctaatcaacttcatcgttgtttcatacaggtaaccagtgccaaaatgattgctgggggaggctattttgatggttctcatgaccatattctcatggaaggatcaatgatccatgattcttcacaatcttccatctatgacaatacagatgttgaacagcagaacttcagatttgcgccctttatcatagaagatcactccaatccagccaaccttacctctgaggctgcaagggtgatagaccaaattcaacaccagctggggattgacatcgagcaggaccatagtgatcacatgatgcaagaagttcctccagcagaaactgaaaatttggttcctgctgtctatggtgttcaagatcatatccttagccaccagatagaaggtccgcataacataactgtggaacaacaggtcctgggctatgaccctgcatcatatcgaaatggcacttatgcagctgcacatgatcttctaaattctctacatatccaaaggtgcagtttgattcctgaatttccttccacagaacatatctttagtgatccagcacagaacatggtcaacaggttggacattacaaatgatcttccaggagtagcaaatcatgaaagtggaatgatgttcagcgattcaactgtaccgttaggctatcatgcaactcaatctcatatgttgaaggatctctatcattcactaccacaaaactatgggttatttaccagtgatgatgagagagatggaatggtcggggtaccaggggtctcaggaaatattttccaggagatagatgggaggcagttcgacagcccaatactggggagtagaaagcagaaaggtggatttggcaaaggcaaaggaaaagctaactttgcaactgaaagagagaggagggagcagtttaatgtgaagtatggggctttaaggtcactgttcccaaaccctactaagaatgacagggcctctatagttggagatgccattgaatacatcaatgagcttaatagaacagtgaaagaactgaagatcctacttgaaaagaagaggaacagcgctgacaggaggaagatactgaagttggatgaggaggcagctgatgatggggaaagttcttcaatgcagccagtgagtgatgatcaaaacaatcagatgaatgggactataaggagctcctgggttcaaaggaggtccaaggagtgtgacgttgatgtccgcatagtcgatgatgaaataaatatcaaattcacagagaagaagagagccaactctttgctttgtgctgcaaaggttctagaggagtttcatcttgagctcatccatgttgttgggggaatcattggagatcaccatatattcatgttcaatacaaagatacctaagggctcttctgtgtacgcatgcgcggtggccaagaagctcctcgaagctgtggagataaagaagcaggcttataatatcttcaactagacataccaatcataatgtttatccagacaacttagcatgctggtctgctctttagcatctaataaggatgatcgtggtgggtttctcactttctcctacaatcacacactcacaatgcggatgacgtctggagatctacgaggtaccttaagtcctgggggaatcaatttggccagccacacccgtattagtcaagatcgccgtgattgcagaggctgatgaactggagcaggactgcaggcgtagtagctgatccgaacacaaataatcattccactccactcttgtacctgatcccgcagatctccagtgcagtgtggagactcaattcactgccctagtcatctggaatgctgtatggtctttaatgtggcggagttgctgaatccacacgtgtagtgccaatgtttaaactattcacatcagtctgcttgcttatcacttatcagagactgaccacattgataagacttctttgatgaatgctgcaaactttcttgatagc

SEQ ID NO: 2538 - DNA, 826 bp, Zea mays
  Clone ID: ZEAMA-23APR03-CLUSTER377742_1
aatgcatgaaagacgacgcagatgctgtgttgcttgctctttctttattccttacattgtttgcttcccggtggtcgcgacggtagtagtagcagcagcagcagcagcattgttcaatgctgttgagctaggaagcggaccgatcgaggaattaatctgatggagtttggttgtgctgccatggcgataatgcagccggtggtcgcgacggtggtgctgaggatcggctccacggggctccactgcgacggctgcatgaaccgcatccgcaggaagctgtacaagatcaaaggagtggagcaggtgcgcatggacttgggcaagaaccaggtgacggtgacggggaccatggacgccaaggccctgccggagaagctgcgcaagaagctgcggcggccagtggacgtggtggcgccggggtcgggcaacaaggacgtcaaggacaaggacggaggcggtggcggcggcaaggagaaggagaaggagaaggatgggaaggacgggaaggacgcggccatcaccaaggccctgtcggctgagctggaggcgtggaaggcggccttctacgaccagcagtcgctgagcaacgccgagttcatgctgagcgacgagaaccccaacgccgcctgcgccgtgatgtgattaagctcagctctgtagcaccacaccagcacgggggtggttagattagcgtcagatagcattacaccacacagacaagacaggagaggtatgcagagtgcaaagcttctgggaagtcaaatttgaacataacaaatttgagattttggttaaaaaaaaaaaaaaaaacaaaaaaaaaaaaaaa

SEQ ID NO: 2539 - DNA, 1521 bp, Zea mays
  unsure (1)..(1521): unsure at all n locations
  Clone ID: ZEAMA-23APR03-CLUSTER3778_2
aaaaaatttcaggcctctcgccgcgccatttccaccttaaatctgatcccttcgctcgatctctcttcgtaaaacagatcgcgcgcgcatgacaatcgaccttggcctgcaggcggcgccgccgccgccgtcttccggcgggggcggcgccggcgccggcgtgccgagcagttgcacggcgctgccgccggggttccggttccaccccacggacgaggagctcatcgtccactacctccgcaagcgcgcggccgccgcgccgtgcccggcccccgtcatcgccggaggtcgacatctacaagttcgacccatgggacctgccagccaaggcggttttcggggaggcggagtggtacttcttcagcccgagggaccgcaagtaccccaacggcgtgcgccccaaccgcgccgccgggtcaggctactggaaggccaccggcaccgacaagcccatcacgctctcctcctcctcctccgccgccgccgccgccggcatgatcggcgtgaagaaggcgctcgtcttctacaggggaaggccgcccaagggcgtcaagacgagctggatcatgcacgagtaccgcctcgccgaggcgctccacgccgtcgtcaacgcctacagacccacgcggttcaagaacaacgcctcgtcgtccatgaggctggacgactgggtgctgtgcaggatctacaagaagaccaccccgcagctggcgtacagcatgtcgccgccgccgcacgaggaggtggaggcgtcgtcgacgtcgttcatggacggcggaggcggcttcgacctcagccgcctgcacccgccggacgacggcggcggcggcgacgacatcatggcgttggcggcagccacgtcgtactacgccgctcggccgctgccgcgcccggcgtccatctcggactacctcctcgactactcggccgtgtccgagctgttcgaggccaccccgcttccggagacganncgctgcagcccgggacggcgacggacgcagcacgcgggttctactacgacttcggtaacggcggcggcgagcctgctgcagccgcctccgtagtagcgcagcatcagctgagcccactcaagaggcggtcttccgtggacgaggatcacattgacatgctgcacgcttcgtcgtcgtccagcagcaagagggtgatgggcgatcatcacgcatcgtcgtcgtccatggctgcaaacagctccgtgtttgagcccggacagacttctcatcagctgcacgacagaatatgacgcagcagcatgcatgcatgggtggtcgctccctcgctgctgattatgctagggctagctaggaaagaataccgctgctgattattaatttcattagtattcatgattgataaaggcaggaattcaacatttatggattagtatgttatatatgtagttataaatagtatatatacttacccaagtttatattgtaattgtgtaaaaatagattgattagagcgaaaagatattaatttacagtgncgatctcactggcc

SEQ ID NO: 2540 - DNA, 2039 bp, Zea mays
  Clone ID: ZEAMA-23APR03-CLUSTER3782_1
gcacgagaccattacctagaacatcctaatcgaaaaacggcccaccccgcgcctcgccggagctccgccgccgccgctgtccgattccgcagcagagaagccaccaacaccgccgcacgtccgtggattgtcctcagatacgccgccccgcgccgcgtcttcctgaggccgaggctccgacgcagccgaacccgtgcatcccacgggtccggactccggaggaggaagaggaggagggaggagctgctgctcggcgaccgcccaggaggagcctaagggatgagggcagcgaggcggttggcccgcgtgcggcgggaggcgcttgccgcgtgtatgacgtgcccgctctgccggggacttctcagggaggccaccgccatagccctgtgcctccacacattttgccgggactgcattgtggagaaaataaatgatgacgacgctgactgttgcccagtctgcaacattgatcttggctgcgatcctgaagagaaactcaggcctgaccacaaccttcaagatatcaggaataaggtatttccaattaaaaagataaatgctgattctccaaagtctctaacaacattgccagcaaagagaaaacaaaggtccctttcttccttggtggttgacactccaaggagcgtagtaaagcggactggtttgactggaaagagaaccaaagctaaaagaaagacagtagcttctagtgcagcttctcccatcaataatggaaccatgcaattaccaactaaatttgaaaatcgagatcagaagactgataaaagttgtgcatcacaatctaccaatgtagcatcagctgcaaacaaaactgaaaatcaagatctaaagaagaccaggaaaacttcggcaaaacagtcgaccagggcagcaacatcagcaaacagaaaacagcaaaatacagatgtagatgtttcaagtaaaccatcttctgaaaatagaaacaatggcacgacagctgacaaggatgagctccgtaagtattcaaaaatacctaggtcaactcccaaaatccatgctgtcaatgaagagcaaataaaaaagaaagaggacgaactccctacaaggaaagcagaggcagacaacaaagtggttattcctgggacaactgtgagagaacattcaaataactcaaatcttaaagagaaagataacggcagttctccagaatcttcaccattgaaagacaaaacaacagcagacgatgattcgtaccaatgtttgcttggttctgcaagcgatgtgcgtgatccaataactactccggtgtggttcttgttaatttctttgcctaaccagaaagaagatccacaactgcctcagttatcaaagagttacatgagaatcaaagaccgcagtttgcagatttcttctgtacagaggtacatcatgaagaagctggatctagctaatgaaaacgaggtggagatcatctgccactgcgagccaatctgcccctcgagcacgctgcatgggctgatggaactgtggcatcgtagacagccggcagagcccgtggaggcattggtgggtgcgccagccaaggagttcgtcatggagctgggcttccgtcgccgccgccccccttatttggcgcccggcaccgtcgcgcgcggtgcctccggagccctcctgatcagcttgcaagggtgactccgctccgctgtggagcctgagctgcactgctccgtccgtcgtccgctcttgtcctccatccccaaccagtttagccgtgtaggataaaacagttttattttactcatttcatagacttttgttttggatcgtgcttagactcttgtatatatagagagaggaaagaactcctgatcagcttacaaaaaaaaaaaaaaaacggatagtcagatagctacacgctgcaattcatagagataaaataacgtagaaaccgcagccaccagccagattaaagtcacaacaagcagtagcgaacaaggtaaagtgtgaagtttaccagaactcagaagtctgtggtaaatgatgttactctaacgaac

SEQ ID NO: 2541 - DNA, 986 bp, Zea mays
  Clone ID: ZEAMA-23APR03-CLUSTER378506_1
gcgtgcacatgcatgattcacttagacacaaagtgttattatctagctagtctggctcagctcctcgctacgtacaggaccacaccgccggccacgcgtacgccagcaatggagagcagtagagaccacggccgcggcctcaagccgctgccagcgtggacgacgacgacgacgccggcgggaacgggacacaggcttcagcctgggccgccggctgcttcccgtgggccggccgcagaggtcgtcgccgccgccgtcggtgtcctgctacacctgcggctactgcagacgggagttcaggtcggcgcaggcgctgggcggccacatgaacgtccaccggagggacagggccaggctcaggcagtgctgctcggcgtcggcggcagcgcacccttctgcttcccttccgagccccgccctgaccgcgcgccaccagcacagcagagctccgattcccaacctcaacttctcgccgcagcactgcgccgccggcggctcgatggccgccgccgaccccgtcatctacagcttattctcgacgacgacgtcgtcgtccaccgctgtggcaacgaaggcggcagttgaggtgagcttggagctggggattggggtctgcggtagaagcagcggccgtggcggtggtgtcgtcgaggacgacgggctggatcttgagctcaggctcgggtgcgcatgggagtgatgactgatgactgatgaggcacacgtacgtagtgtgtcgtcgtaagtgtgaaccatgcatgcatgcaggtcggtgtagtgtagggttaaattaaatggtcgtcgtagctgtcattatgtgaaccttatttccttttattttattacacgtgtcctccctcgctagctctcgtccatgtatgaactatgtgcgcccccgcagcagcattgccacgactttgctaattgaagtaaaaaaaaactttataatgttagtgtggtttgtggctccaaaaaaaaaaaaaaaa

SEQ ID NO: 2542 - DNA, 984 bp, Zea mays
  Clone ID: ZEAMA-23APR03-CLUSTER37974_1
ttttttttttttttttaaagggtaagcctcacaggtgttcatttttttttgtacaattgggatgcagctgttcttttttttccccgaaagagaacaaggctaatctactagacataccactgatgtttcacctcgatgttctgaagagctgcctacctagagtcacagtcgggtgcgagtgagatcaatgagtgtaagaatattcagaaacatgtgtgtaacatatgggctctagtaggcaaggcctgtaaataacagtatatttatgatgatggtggtgtcatggtgtagtagcaatgtggacacgcgacttacatactacgtattacaacaacatcctttagtcatcatgcatatccttattatataacacgttggattggttcggtggctagttaaataaataaatgcggggttaataattaagatgactacagatatatatatataatgatgggctagctatagcaagctagctagacgttcccggtgacggggcagccggtggcgcagaccatggcgtcgttggtgcacttgaggaggcagacgggcagctccacggggtccaggtcgaccagcggctggtagcagtccagcatgcaggaggtgaccccagacccgcagcttgtcacgcactgcgtcagccccgccagaggggtcgaccggcggccatctcggccgccgccgctgtggcggtgccagctctggccgcggtggcgctggtggtggtggccgtcgtcatcacggtggtctgcgctcgccaccgtcgccgcggccaccagcaccagcagaagcatcgtcgccgcgacgactgccttcatggtgtacgagtacgatcgacgttcttcggagacgaaggtgcagtgcagatcggagatgcgcgctagctgcgtcgttgggttgggttgggctgagccgggactatttgcgggtctatatatatacacgcagcgcgcgccgacgcgacgcaaggagcaggacgga

SEQ ID NO: 2543 - DNA, 1417 bp, Zea mays
  Clone ID: ZEAMA-23APR03-CLUSTER380318_1
acaaaactgaaccagcaacaaaccgatgcccatgagattgacatggtgatcgagctacaggccggtcgtcttctccaacgctagacaacgaagaaggagcaattaacagcaacaaaccgatgcccatgagattgacatggtgatcgagctacagcaggccgccggtcttctccaacgctagacaacgaagaagggagcaattaatcaagtagatcgattcaatccaatccaatggggttgctgataccagcccgtccggagcaatgcacgttgagccgtgtcgtgtctctcatcaccgtcggtttcgtcatcgtggtttgcacgtacgtcacatcttctccggccggtggcgacgccgggaaggaggagttcttcagcatatggcaccgtcgatcatcggattttgtccccgacgatctggaggtggcgctgcgcggcgcagcgtacgcgaaacaggacgctgatcctgaccatgctgaacaaggcttattcggaggagggcggcctgctcgacctcttcctcgagagcctgagggaaggggacggcaccgagcagttgatcgaccacgtcctcttcgtggccatggaccagcaggccttccgccggtgcaggagccttggcggcctcaagtgctacctgctccggccgccgacggacagcgcggacgacctctcgtccgagcagctctacatgtcggacgggttcatacgcatgatgtggcggcggatccggttccttggcgacgtcctcaagcacggctacagctttgtattcactgatatggacgtgatgtggctgaggaacccgttcccgaagctggaccgcggtgaaggcgaggacttgctgatcagcgccgacaagttcaacggcatgccgcacgactacgccggcaacgagctgaacacaggcttcttcttcgtggtctccaacgaccggacggtggcgctgttcgacgagtggcacgcggcgcggcaggtctcggcggggatgaaggagcaggacgtgctgaaccggatgaagcggcgcggcgcgttccgccggctgcgcgtgggtgcccgcgtcctggacacggcgcgcttcagcggcttctgccaggacagccgggacgcggcgcaggtagccaccgtgcacgccaactgctgccgcaccaagcgggcgaaggtagccgatctcaaggccgttcttcgcgccgcggaggggctcaacaggacaaggatggagattaagtggccagcgcatagcgagtgcgtaaaatcgtggctgtgaggctatctcatattacatctcctatttcatcctctatttaaattttactttacaaaaacagtgtcatttactataataaaaaaacaacaaacaatccactgaattactgtaaaagcttttctcaaggtttgtgtccagcgagttcataac

SEQ ID NO: 2544 - DNA, 1686 bp, Zea mays
  Clone ID: ZEAMA-23APR03-CLUSTER38130_1
gcacgagaccattacctagaacatcctaatcgaaaaccaaagcgagcagatcccccgcccctaaccgactcccctcgcttccattccattaatggccgccaccaagagccctccaacacacacctgacctccccttcccccctctctccgccgcccgttccccgcgcctccgcccgtacgtcccgttcccggtcggccggccggtccaaagggaggggaggaggaggaacgcgggagtcgggggcccgcaccgatgctgagctcggcatcctcggccgcgggagcggccatggggatgggcggcggcgggtacgcgcaccagcccccgccacagcgcgcggtcttcaccgccgcgcagtgggcggagctggagcagcaggcgctcatctacaagtacctcatggccggcgtccccgtcccgcccgacctcctcctccccgtccgccccggccccgccgccgccttctccttcgccggccccgccgccgcgtcgcccttctaccaccaacaccacccgtccctgagctactacgcctactacggcaagaaactggacccggagccgtggcggtgccgccgcaccgacggcaagaagtggcggtgctccaaggaggcgcaccccgactccaagtactgcgagcgccacatgcaccgtggccgcaaccgttcaagaaagcctgtggaatccaagaccgcctcgtcgtcgtcgcccgcgcacccgtcgccgccccagctgtccaccgtcaccaccaccgcgcctctcgagccccttgcagcggcggggggcaaggtccacggcctgtccctcggcggcggcgctgctggctcgtcgcacctcggcgtcgatgcttcgaatgctcactatcgttatggtagcaacaggtaccctctcggagctaaaccggacggcggcgagttgagcttcttctcaggagcgtcatcggggaacaactcgaggggcggcttcaccatcgactctccatcagataacaactcgtggcactccgccctggcgtccagcgtgcccccgttcacgctgtcgacgaagagcggggactccggcctcctgcccggcgcctacgcctcctactcccagtcccactcccacatggagccgccgcgggagctcgggcaggtcaccatcgcctcgctggcgcaggagcaggagcgccagcagccgttcagtggtgggatgctcgggaacgtgaagcaggagaaccagaaccagccgctgcggcccttcttcgacgagtggcccgggacgcgggcggactcgtggccgccggagatggacggcgcgccgcgggccggcaggacctccttctcctcctccaccacccagctctccatctccatcccgatgcccagatgcgactgacgaggaaccgtcgatcgggcggccactagacggtggacgctcacgctcactagtgcgctgtcgcctggagtggagatcgatcgtcacgccgccgccgcctacgccctcgtcctacctatttgttttgccgtagtgtattgtaccgacctcattaagaacagaacagaacataagtctctgtgtaagagccggctccttcctgttcctatggttgtactagtagcgtgctttgtatttgttgtacccctcaagaccgagaatgaaacccgcccgccgtcagtctgtctttgcgttttagtaaaaaaaaa

SEQ ID NO: 2545 - DNA, 1557 bp, Zea mays
  unsure (1)..(1557): unsure at all n locations
  Clone ID: ZEAMA-23APR03-CLUSTER38136_1
nncntttttttttttttttttttagacaagaattcctagtctttttttcgtgtggtttcgagtttcgatgtacaagtgtattaaaagaataaagcatatagcgatctttttagaaggaaagaatcagcgggttatagaactcgttttctctatatcatcaaaactatactgtaggcctgtgtggcatcaactcttcattggcaagttggttcctcaatacgactggggagatcaacctccagaggtatatgctagccgcgaaccactcgttgatgatcttcacccatgtacttgcccatccaacatctatgctccactttcttgttgggtgattaagctcccagctaatgaacagcattgcgaagtacatagcccccatcgcaaacacaatgtggaaaatctcgtagctgtaggggatgtcctcatccaattgtactttatcattccgaaactggaaggatttggtgtcgattccagtagaaaacgtggccattacaatggaacaaattgcgataatgaagctaacgatagtagctgaatcgccatcctgggcaattttcatatgagagtggcacttcccagtttgcggctcactgtggagtgcagaccaacaaaggaaaacaatatatgaactcatgatcccagaagagagaagaccctcgttaaccttggagtgcaatgatactgccatcattatagtcaccaagattgccatccatgtaatagtgaagatgttgaacgcacaagaggagttggggacatacagaacatacagcacgccaattccaacaaacgaagcaatgtaggagatggttgacaagaataacccaaacaacccacattgatttgatccaggatctggcatccatcgtttattgcaccatgatatgaagtggagcatgcttatgagctggaggaggagaaatatcccggcacccagtcgagcaacttcaccataaaattggatgaagatgttagggatgataaatgggatgccgatcgacatggcatacacaagagacttcagaatccaacatccagaatgccacgaattacgagcttcatggagcttgcgagttccaaatgttgtggcaaacatcacccagaaaaatatgaagcagcccaagcttactcgaagcactcctccggactggaagcacttggagtcccctgctccgcagaccggcacatgatgcaagccgcggagcgcccttgccccgtagtccctgacgaaccaggccagcaggttggtggcgaagaagacgaacccgtacgcgtaccgcgcccgcagcgactgccgccgcctcgcgccgtacgcgccgccgtctccgcacggctccgctccagctgccttgatcacagtcatatccccgcctgctcagtcccgccgtcgttgcttcgtagttcccggggtaaagcgcggcctcgcctctccccgtcggttcagcgctgggttcggcggcgagctgctccgggtccggtgtacggtggtgcggaggagcgcctgcctcgttcgcttttttttcgattaggatgttctaggtaatggtctcgtgc

SEQ ID NO: 2546 - DNA, 1653 bp, Zea mays
  Clone ID: ZEAMA-23APR03-CLUSTER3813_2
gcacgagaccattacctagaacatcctaatcgaaaactctctctctctgtttggaaggaaggttgatatactccccagctcccccatgctcctctcgctcctgtgatgaagccaatggccaccaatggcatggccccttccttctacccggccaacttcctcctccaaatgcagcaagccctgcctcaccactaccagcagcaggagcagcaccatgaaggccacgacgacgaggaccacgaggcggcgcaccatctcctggctccccctcccgcggccctcgtcagccctttcctccacgacttcggcggcgccatggcggccgcgccgccgccgccaatgctggccggcggcttcggcggcaagcgcatgtatccagacgtcggcgggatggccggcgacgacagccaccacctgcacgcggagccccagcagcagcaggagcagcaggcgtcggacgacgaggaggaggggtccgccgcggtgggcggcggcgagcggaagcggcggctgagcgtggaccaggtgcgcaccctggagcgcagcttcgaggtggccaacaagctggagcccgagcgcaaggcgcagctggcccgcgcgctggggctgcagccccgccaggtggccatctggttccagaaccgccgcgccaggtggaagaccaagcagctggagaaggactacgacgcgctgcgccgccagctcgacgccgcccgcgccgagaacgacgccctcctctcccacaacaagaagctacaggcagagatcatggcgctcaagggaggcggaggcggcggagggaggcaggaggcggcgtcggagctcatcaacctcaacgtcagagagacggaggcgtcctgcagcgagaataacagctccgagatcaacggcctcgacgtctccaggcctgatccggccgccggcgagagccccgccatgaacagctatcgcggcggcctcccgttctacgcctccgctgccgcccgcgccgacatccaccaccagctcctgcacagcggcggccagccgtccccagccgcggcggcgccgcctaagatggagctcgcccccggcagcccccccgccacggccggtggcggcggaggcacctttggcagcctgctgtgcggcgccgctgtcgacgagcagccgccgttctggtcgtgggccgacggacaccacacctgcttccagtgaacaaatcaaatacgtacgattcttcccattcgtcatacacggtgagccacggatccaacagcacgtcggccgccgccgacgtatatgttgtgggcaatgcaaatgcctcgtacgtgttgaacaaattgatcaaagaagcagctcggatatgcgaggtgatccattggatgagatgttccaatttgagttcgatcgagattaggatcatgcacggagtgaatcatatatacgagtatagctagattttggagttgagtagtatgttttttttcttcttctttctattattacttaattatttctcccatctctctttatttatcactgttttcctgtttaattaatatcatatataggtgaatacatttgtgaggcagtggtgatgttatatattatgcatataggattatggtaccttgccattcgcccttgaatcctgcaaattcttttttcttt

SEQ ID NO: 2547 - DNA, 597 bp, Zea mays
  unsure (1)..(597): unsure at all n locations
  Clone ID: ZEAMA-23APR03-CLUSTER38179_1
ttcgcaggggccggcatgctgggcatcccaggtggcagcggggcggcgagtgccacgcgctgagcgcgctccggtacgcggccggcctgggcgagaacctgcaggtgcagggtctcccgtttggggcgcgcgctgagcacgacgcgatggagatgaagcctgcggcgacggacaggctgctctcgctggactggtacagcgagacaagccgcgcgccagagagcgccatcagctcgttgggcgcgctgggcctgtggagcggcatgctcggcggtgcgcaccagcaccatggctcgtcggcggccatctaagaccctagcaaaacgtgcctccatgcttgcgttgcattgcaccagtttgctaatggcgttaacaagtatgagtgactacgtagaaatgcttgtttttttttacctgtttttatcttctgtttcgtttcgtcgtttgttttttggacgatccatgtttgccgctcgtcatttcagatgatgtctctgttgttgtaccgcttcaaagttcaaacacttgctgtggttcaaattaaaaaaaaaaaaaaaaaaannnnnnnnnnnnnnnnnnnnnnnnnnngggccctcg

SEQ ID NO: 2548 - DNA, 1213 bp, Zea mays
  Clone ID: ZEAMA-23APR03-CLUSTER381868_1
aaatgatttgatcggctcctagtgacatgtctctgaaatcatctttataccaggtcatcggaatcggacgttcccgttggagcagcagcgcgaagcagcagccatgtccaccacggtctcgccgccgccagactctttcggcgatgccccaacggcacccggcacccccagctccaacttcacgctgctgtacatcatcatcgcggtgctcaccggcgtgatactgtacgtggccatccgccatggccagtcagtcctggccgagtggcaacggctccagggaggcggccagggcgaggccgaggcgtccgggacgaggctcgggcttagcgtggaggacatcgccgcgctgcccacgttcacgtaccaggcgcgggccgcgtcggcgtcgccgcaaggtggcgggatgagccgcagcaagggcaggacgccgggccgggcggtggtggagtgcgtcgtgtgcctgcaggagatggaggacggcgacgtcgtgcgcgcgctgcccgcgtgcaggcacttcttccacggtggctgcatcgacgcctggctgtccgcgcactcgacgtgccccgtgtgccgcgcgcacccgaaacccgagcgcgcgcggctggcggaggcgcccatgtccccgccactgccgcagctgcgacggtgcggcgtgtcgcctgagcggtccacggcatcgagggtcctggtggacatcctggcgcggtcaccgttgagaaacagctgctcctgctcgacaagtggatccaaatccaaggagaccatcgtctcaaaatcaccatcgccaaggcttcactttgggtcaaggattccgtctccgaagccgcagttgtctggccgggtggaagatagatgctcaatgtcacctccatcgggattatcagaaatcgtggttgtcccatccaagtcgccgtcgccgatgaggttcagcacaagcaggcagttgacgacggcgagaagcgttgcaacattggaaaggatagaggtgatcgcgtcagcatcaccgtcaccgttgccaattagagaggacggtggtggttccctgtcgaagtcgcagtagccgtcgcctgtgccatatcgagtaatggtagggtagttggaagaacatgaagagggcttgtgacgtatatttcatttttttttactattttactgtgatgaaaaaggtattatgcttctttaattcttaccaaaaaaaaaaaaaaaa

SEQ ID NO: 2549 - DNA, 1444 bp, Zea mays
  Clone ID: ZEAMA-23APR03-CLUSTER3821_1
aggccactagtaagcgacagactgggaggaagaagcccaggtgaaaccggcatggcgacggtcgcagcccgccgcctcctccagccgcgatgggtggccggtgggcggtgccggctgctgggcaccgcagcggaggcttctccgggcggagagggcgcgcgaggagggggaggtggatccggcgacgcgatctttgtgaagaagccggcggccgccgcggccgtgatgacgagggacgagacgtcggtggcgatgccgacgtcgttcatgaccgggtctgtggtcggtaagcgcttctaccgcgacgccaccgtacggcgcgccgacgatggcaatgggtggaccgtgatgctggactaccgcacgctcaagtcgccggccaagcgggtcctcaagctgccctcgcgcgccctcgccatggccatcgccgccgagtgggagtaccaggaatcagatggaattcgacctttcacaatgcctcttatgaagcttgcttgcactgcattggagagagttcctttgacacgcagaaaagtgattgacaatttgatgaagaaatttcatcaagatttggtattttgccgctcacctgctgatagtgaactgaccattggagttcatcaaaagcagaaggagaaaatcgatccgattctggagtgggtagacactgaatttgggttcaaacccgttgtctacacaagcttctttggggggaagcaagacgagggccttgctaaagctgtagaaactgttctgaagaaagcaactgactgtgagttggcatccattgatgctatggctgcagcagcccattccttggtgatccctcttgcaatatttagagaaaggttgggtattgaggaggccattgagttgatcaggcttgaagaagaccaccaggttgatcgatggggcttggtggaaggaggtcatgacgttgatatcgcggatcttaaagtgcagatgtcctcggctgttgtatttcttggactttcacggggactgtgaatgtttcttacctatatggctagttgtttatttccaagcttgtatgaatctgagaccaagagttgtagagaataattgccgcggaaggtcgatagcaaaccaagtatctgtactgtattcagcaatcagcagttctgatgttcgattttggattgagtccagaaaatgctgttgaggtttgaactagggagcccagcattcctctggctttgtactgttgtgagagtaagaacatatctaggaactagtattgcagtggcagtcactgagtcgatatatctacttctgcacctttcagctccagcagcacaagttgcatgatcgtattgaccggtcatttttagccatgctcaatttgctgtaacaaatagtgctgctaggtaccagtccatattggtcaaaaaaaaaaaaaaaaaaaacaaaaaaaaaaaaaaaa

SEQ ID NO: 2550 - DNA, 1548 bp, Zea mays
  Clone ID: ZEAMA-23APR03-CLUSTER3822_1
tcctctctggttctgcgtctggggggcgcttgatttctagttgctctgcatgctccccctgtcgaagataatgccgatgttgaagttgctaatgatgatgcttcactggtgaagaatattggaaagagcttccggctttctgctgtggaggtagagtgaaaagcaatgagttatatttgctctaagttagtactttttcagaaactgtagaccggagcaatggaggaagagaaagcggcggcgtactacgacgagctcaatcgcaagggcgagggcgcccgccgcttcaagcaggggcttggcttctcctcctcatccgccactgccttcccttccaagcccaccgcctcctccttcctatccggttttgttcgcgcgggcgcagcccctggccccgccaaacagccgttaccgcattccaggaccccatccagtccgcaccatcgctcaagttcaccgcctctttcgcgtcccaggatccgctccaggtccaggtccaggtccccgtctcgctccagccggcgccaatcgagatcgaggtcccggtcgagggagcgcaggcgccgctccaggtctagggagagggaccgcagggcatcctgtagacgctctaggtcgcgggggtcgagatcgccttctcgccggagcggcaggagcctgcacttggaagcccggcgggaacggcatggggatcagcggcggcggcacgacgacggccatcagagctctaagggtcgcagtgatagggacgggggcaaaatggactactcgcggctcataaaaggatatgataaaatgactccagctgagagagttaaagcaaagatgaagtttcagctttcagagacagctgcaaaagattccactcttggaactgcaactgtggggtgggaaagatttcaatttaataaggatgctccacttgatgaagataatgacgatgttgaagttgctaatgatgatgcttcactggtgaagaatattggaaagagcttccggctttctgctgtggagtcaaagcgcgaagataaaatcagagatgcgcatgatgaggctatatttggtgtacctacaacttcatttgttgatgttgaaattggtggggacgagcttaaaaccaatcatgaagacgggaaagttgaagacacagaatctgatgaacctagcagctccctcatcagcgataaagtactggccatgcaaaaaggttcctggagggatcgggctcagaagttgcggaagaatttgaacacatgaactttgtccttgcaactgctcaagttcgaatttgccagcgtgtgacagagatctggcatcttgtgaagatttgagcctgaagttgaacttagccccacccatcccttagaatagttgcataatgtaagttgtaagatttgcgcctgctttctgtttcctcgagtcagcgcgcaagtgacaccttgtagtgaactgagtttggaaattcatttggttattgtgatttggcaaatggcctgaatctattcatgtttaaaaaaaaaaaaaaaaaaaacaaaaaaaaaaaaaaaa

SEQ ID NO: 2551 - DNA, 1339 bp, Zea mays
  Clone ID: ZEAMA-23APR03-CLUSTER38278_1
aacagatggaggccggcctgcgcgcgctaggccaccgctacttcggcggcggcggcggtggcctcggtgggttcgcggccgcgcgtgccacccggctccggcgccagcgccagcgccgcatggccgccttctgctcccgtgagtggcaagggattcccccacttcccccctccacttcctaccgctccggcgtgtctgtgtatctgacgtccctccccacgctcgcaaacgtctctgcagtcgctgttaatggagatgggaatggcgccgcgggtggccccgtggggagcggcgtcgaggtggcgcgcgccaggaggatgctccatgtcgtgctcgtctcgccgctgataccaggaaatacagggtccattgcaaggacatgtgcagcatctgcagttggcctgcatcttgtcgggccattaggctataaggtagacgacacgaagttgaagcgcgcgggattggattattggccatacgttgttgtcaagattcatgactcttgggaccacttctgtgattatttcatgaaacaggaaggagataaaaggctgttggcgttcaccaaaagaggcacacacatccattcagtaagtagccgctgcttcttcaagtaggactgtagtatatcctcgccgtcgccacaatgaaaactgttgctgatttctcctacaggccaggggactggctagtcttcggttccgaaacaaaagggttgcctcagcaagccctcgaggattgctgcagagaaggcctaggcggcgggaccctccggattcccatggtggagacctacgtccggtgcctgaacctctccgtcagcgtcggagtcgcgctgtacgaagccgctagacagctgaactatgaacagcttcagtaccagcctgatgagctcccagaggaggcgcaggagcttttcccggcagaggacatttatgcgtgaaaacctctgcccgagaacaattacacgttacacgcattgatcacctcatttttgtgtgtgtgtgtgtgtactgtttgccgtgacacatgattgagctggagggaccacgcactgcacgattctgttgcgaattcaattccaggccgagtccttgtccagacggtgttgacatgctcattcaaaatggtgtacctgatctgcttggaagaatcgttttagtgccatgtataatttcgcagtcagaactcagaaggtgattagagtatgctgcgatggggtctcgttctgacttcttttttgtgtgtgtactggttactgaaccataagctttgttaactgcaactggacgctgcgtcctgttgcttctctgtaaaaaaaaaaaaaaaaaaaactcga

SEQ ID NO: 2552 - DNA, 1773 bp, Zea mays
  Clone ID: ZEAMA-23APR03-CLUSTER38284_1
gacactcacacgcacacgtatagctcgatcgctctctgtgtccgctcctcctgcctcctgcacacacatacactcagagagcatagtagcagtagccagtaggatgatgatgaacaccaacgcgatgtcgccgacagcaagtaccgacgccgacttctcgttcggccccttgcagccctacgtcggcttcgacgtcgaccggcatgggcatgcccagcgtcgtcgtcgagaggtcgtcgtcgctactgcagcacaacaccagcagcagcagccacaacaacaacctagggctatacgacagtttcgacttcgccgccgccgcagggttaccgttccaagaatctggtctcctgcccccggcgagcctgccgctggcgccgtcgccgcaaagcatggcggccatggcaatgccaccgtcgtcgctgctgctgacgctcccaggcgtgcctgcggcggcggatgtcgtctataacccctttggtggcggcggcgcgggagggttcctgaagcgggaggacggcggccccctcgtggacgctgctggaggcggcgggaggatcgggctgaacctcgggcgccgcacctacttctcccccgcggacgtactcgccgtggaccggctgctgacgcggtcgcggctggcgggtggcggcgtgggcgtgggcctgggtatgggcctcggcatgggcgtgctggggctcggcgccgcccaccaccagcagccgccgccgcggtgccaggccgagggctgcaaggccgacctctccgccgccaagcactaccaccgccgccacaaggtctgcgagtaccacgccaaggccagcgccgtcgccgccgccggcaagcagcagcgtttctgccagcagtgcagcaggtttcatgtgcttgctgagtttgatgaggccaagaggagctgccggaagcggctcaccgagcacaaccgccgccgccggaagccgagcagcgcacaggacgaggactcgtcaccgccaccacccaagaaactggatacttgcataactaatactgcctcttacaatgatgatctcaagacaggcgcgagcaacacggcagctgcggccatctcgccgaacggcagcggcgtcagctgcctagacgtcatggacaacggccagacgagcagcgcagcggcgccgacggctctgtctttggccgccccgccgccgccgccgctgcacgagaaggacggcagtctcgactcgatgctgatgcagcgggtcctgcagggccgacgggaggacgacgacgacgaacagcgtcgccacttcatcacctcgcttgtgatgcagacgacccagcagcagcacagcggcggcggcggcgccggcaacatcttgtcgtgctcgtcggtatcagatcagcacaacggcggcggctgcaacggtttctttgaggtggacttcatctagtgtataatcagatgcatgacgtgaggaaagcaagcaaaaacaaagctgggttggtttcactgtagagcggctagtagccttttcttttttactgttgttcttagtacgacttgagctagctagctagtggttggacttcttttaccagatggaaatgcttgtgtacgtagtatgtgtattcctttttcctattgcgaaaaatgtaaattattattacgtgtatgtgtctgagttatactacttatttagcaaaaaggtaaaataaaaaaaaaaaaaaaatgcatccgggccggatggatggaaggcccccattacagtggctagctgcctctctcaaccagtc

SEQ ID NO: 2553 - DNA, 2665 bp, Zea mays
  Clone ID: ZEAMA-23APR03-CLUSTER38338_1
cccccgagcgatgcattccttctccatagtcaaggtttgcatcgtgatacacggtacacacggctcacattatggattgttggtttcatcattaatccatgtggattaagtgatattatgttgttttaaatacataacaagtcaaaatttatcccaatccattttaatttttgacacttcaatccacaatccatatgaaattaaaataactgaacaaggctttagtgtagtgtaatcaaaggccattctgccagctgcaccctgcagacagcgacgacccatcaaagattcttcccagacctgtcagtttacatttgctgacgcagaagttgggggaaggccaggtcagcgcccaaaaccagtgaatgtctacgacgctggcccggtggccccaggattctagaatcaaagcagctaaacctaaaattaactcaacgttacaaaactacaaccttctgccctataattctggaatcaaagcaggtaaacctaaaattcctgtggtaccatcgatcctgaaaattgcaaggttccaataccacgacgtcaagagcagcccaaggtatgctcaattcacccatagcattatagctgatctcgtaagactccagcttctacaggtttagcaatatgtccaaccaaggagtgcaggcacaatttccgaacccaactgatcacgcgcttatgtcttgggaactgtaacattcaagatttttacatcttgatatggtttgtcattcttgtcagtcttgaccttctcaatttgctggacaacatccatccctttcacaactctaccaaacactgtgtgtttgttatctagccatggagttgctacagtggtgaagaagaattgagaaccattggtgttaggtcccgcattggccatggaaagtgtaaaaggcctatcatgcctcaagctcttgtgaaattcatcttcaaattctgtgccccagattgattgtccaccagtgccatcccccaaaggatctccagtctgaatcatgaatcctttaatcacacgatgaaatataagattgtcataataaccatccgacaatgggtagtgaagttttcaacagtttttggacactcttctggatatagtctcaagtgaatgtcacccatagaagtatgtagcaccaaattatcaggcaatgatgttgtagcagtttttcctaggtctgatgcagacaaaagctcttctggcggtggtttttcattgaaaacatctctacccttagttgcatcttcaggctcttctggttccctacgactaaagagatatatccgatgcttcttgaaagcacaacacagcagcgttgggtctgataaaggttccttgctatcattgacattggcagctactgaaggaatttttctaaccttcttgttgcctttgtctccttggtatagtgcaattctcagaaacctctcattgttctctaccttccccaggatacgggaaaccttatttgtgtgcaaattcacaatctttacacccaaaagggtagcataaataagaaaattgcaactctcatcaaagacagcattaggttgtggaacattttctgttttctctatttccttctccacagccattcgtcgaccaaaatcaatagcatcaaggtgatacaatggaacatcacttctttgaagatcttgcgccacatctagggactcgtcatatacacgtcttaattttccagttttgaaccaaaatacacgtatcctgcgatcaggggatgtgacagcaaattgagtgccatcattgcttacctcaatagcagacacagtagtcttgcatttcgcaatttcaaatagatttgtatctgatttcaggcgaaacctcacctcattttctggaaacatgagggtagatggagaccaatattccaacagtcctttggcatcagcagatataacaacatcatgaatgtggttatatttcataactttgacagggccaccatgaatctctttggacatgattgggtcatttgaaccagaatgggtatcaaatatgtgaacgaaaggtgtatttcggtcactaacggcaagttttggtttgacatctccttctcgatgaacccactcaatagccccaggaacaaatgagagacgtatcatgaacatcatgtcatagtttacaacatcatatatcttcacagaccgatcgtttgatatcgtgcagcaaagcaatccatcaacactcacagctagaccttcgatgggactgagatgagaccgaaaatgtttagcaaattcaaccccaacaggtttcttcttccaaaacttcagatgcccatctgcgctcccagtgatgaagaagtcagcaggagatacagcgacgtgcgtgacgacatcccgatgcatatagctcttctcgtacatggcggcggaggggagggcgtcgaggaacgcctgctcgaactggagagggcgcttccgccgctgcttcgccggcgctgggcccggcccgattatctcttcctcctgcccaaccgtgggggtgcccaccgcgccattgaggtgttcctgcttgctctcgtgcgcaccaccgtcctccactgtcgtgctcgttacgctgtccgacgccatcgcgggctcgtgctcgagacctctgctagggttctggggttttttttttccggacccggccggc

SEQ ID NO: 2554 - DNA, 1124 bp, Zea mays
  Clone ID: ZEAMA-23APR03-CLUSTER38339_1
tttttttttttttttttcttttttttttttttttttcttttttttttttttttttagaaagagaaatatccgcatcgatacaacatcgtattggtcctgaatatgctggccccctgggactgcttcaagctatagcagatgaaactaaactacttttaaaagaggatatcctcgaccctgacatagcttccatgaataatgaataatccatgcatacttccagttaaactcacacagtccaagcctcgaccacgtttctgaaatgaccatactaccgacaaggatgatagtcacgatgcatttgttgcggcttggcaccagctttgctcctatatagctaacaaatcacagggtggggttagctttcctgctaagaccatggaagaagcggtgttttcttctccttgagtgtttccgatgtactctggacatgacgtgcggcgagaaacagaccttagagttattccgaacgccataagaagaaagcgttgaattgtcctctatcaacttctcattgtgatgtgtcaagcagtagttatcccagacatgcttccatgagatatgacgatgccccatcttctcttgttctatctcatttatcttcttcctgatagccagctttcagatccttgacagtggcggaattcaacaccgccacatcgaaggaagtgttatccaacttgacaacggtcagcctcatggcgctgccgagctctaggtttatcagagtgtcgacgtcggcgagggagggcttcctggggacgtcggcaagtatggggtcgtcgaggagcgcggcgagcatggactgaagcctcgcctgcttggcctctttgctctggtaagccgccacctcctcaggcttcccggaactcggatccattgctcccaccgccgttgagaacgattccctttaggtcacacagcggagttcggcggcggaagtcgacccccacgagtccacaacggcggcgacggtgagctcggcagggacgcagagatttaagagaccgacatgtgggccctagtttcagtgtcccaaccgctcgcgtagttgacagccgtccgattggaatgagtcccggttttttttttcgattaggatgttctaggtaatggtctcgtgc

SEQ ID NO: 2555 - DNA, 1103 bp, Zea mays
  Clone ID: ZEAMA-23APR03-CLUSTER383795_1
gatctatcggtgtgcttatgcgtaagttcgtgcatcggcgcacgtatggctcctaacacctccttgctcgtgctcctcttcctcctgcccgccgccgccaccgccgccgcaccggctaccggcaacaccgccttcaacgtgacggagatcctcggccggtacccggagttcaagctcttcaacctcctgctctccaagacccgcgtcgcgcgcgaggtcaacagccggagccccgtgaccgtgctcgtcccgggcaattccgcggtggactggctcctccgccgcagcgccaggctgccgcgcgccgcgctcgtggagctcgtctccgtgcacgtcgcgctggactacatcgacgcggccaagctggcgtcgctgccccggggccagcccaccgtggtcaccacgctgttccagaccacggggagcgcgctcggccgcacggggttcctgaacgtcaccgccgcggggcgtggcggcgcgagcgccgtcttcgtctcggccgcgccggggtcgctggtcagcgccacgttgaagagggccgtgaccgcgaagccgtacaacatatcggtgctccagatcagcaacctcgtcgtgccgccgggcatcatcaccaggccgcggctgccgctgccgccgtcgccgtcgccgcccgcgccaaggatgacgcagatggcggtcgcgccgagccctccgccgacgttaacttcgccgcggcaatctccgtcgacgttgttaccggcctcagtgggcgataccgcggaggctccggacactgctgaagcgccggtgccgtcgcatggccatgtggcgcaagtggcgagttggtggactgctgcggccgtggggatggcaatggcatgcatactgatcgggtacttgtaggtcactgcatttgcaaattgcaactggttcggtcgggtgggaattggatcgtcccttgcattttataagagtagttcattttgcgcgccatatatatagttaactcttatggctcattttcttttgtcgatctttccaaaaaaaatcgtttccttgtattattacgcttcttggaattataaagagtagaagaaatacaaaggccaaaaaaaaaaaaaaaa

SEQ ID NO: 2556 - DNA, 968 bp, Zea mays
  unsure (1)..(968): unsure at all n locations
  Clone ID: ZEAMA-23APR03-CLUSTER38403_1
gccggctggacgcacgcgtccgccacgcgtccgtgcagcggctttaagtatatatccacggggacttgtatcgggttatcggttcctaggtacttgttcctggtcccagcgcacaaggctatcttatccgagctgctgggggttgagtgcggcaccaggttgacggtggagatggacaagttgcggcaattcgggcgaccattacctagaacatcgtaatcgatgtctggttacgaggagaagaggatccggtcctacaggctgcagctgcagaagcgcatcgagatggcacaagctagaaaggaagagctgcagaaactgccagaaaaggttatcttgtcggaggttcgtcaagcagtacagaagatgcaagctgtaaatcagcagcttgacgaagctgaagctgctatcgatgagtattttaaaccgattgacaagaacgccaaaatcatagcagatatgcagttagagaaagaggaaaaacaaaccaaggagatgacaaaacttatgcaggaacagatgaaaatgcgaagagaaatcatgatgacaagagctgaggctgcaagcgtcgagtccagtgatactaaagcgggtggaaaagtggctaacatccctccgaaataagacactggaaaagtgggagttattgtgcgtatgtgctatatgctaggaaataagtgcgtacttacaattagacaatcgctaattgtgtggttagcgaaggctattgtgctgcttctttccatttcatgttttatccacataagctttgctttgtgcgataatgtgctctgtccattaacatgttacatttactacagcaagtatgttgaggtgctgtgtcagtttaaaaaaactggggacttgtcgaatcccgcaattcgaggtgtccagcgtttcagatttgctgctggatgataaattgttgattttgccttactcntttcttctgaggtcagttttttcta

SEQ ID NO: 2557 - DNA, 1709 bp, Zea mays
  Clone ID: ZEAMA-23APR03-CLUSTER3846_2
actgccccaacccaagtcccctccaccaggccgcacacctccgccgcccggcgcgaccttgcatccaccagcctgccctctccttcgcgtgaggcggccccggcgaccgcgtcggcagtgcaagaccagaccgaggcttctcccgttggaaggttccagccatggcgagcgccgatctgctgcggaaggaggaggagttctactcctccctctttgattccgcaaaaggcgacggcgtcaagtcgcgctcgcaggtgattgagaggaagattgaatccctcgaggacatggccaccaaggtcagcaaccggagatcaagaagatggttgaacgaccgcttgctgattgagcttgtcccacgccttcatgttgaagaaatcaaaggcctctttgctcctccaccatggggtgaggagctgcccttgtcagcattctgcaggacaagtgttagtgactgggaggccttcaggagcatcgacatggatgctgaggcaagattgatgcaacacatgaaacgatcatccgaaaaacaaaggactcatgtcgacgaagatgaattgattgctctgaatgcttggcgtcgtataggtcgccaaacaagagaagctattaagaaaaaatttctacctgatctacttcaaatatatgaagtattgccttctttgctttagtttaaccccctctttttccataaaaaccaggctcattctcttcatctcctccacaattgattgaagtgataatatttgatgaaagctaatctgtttttcttgcaaacaagacatgagagttcttggttatgtatttatatatatctgaatctgctatctttctcgcacatgctaattcatcatgcataccacatctaatttgttatttgtagtttcaagcctcaatattatgcgaagtctatgagacaggataaattttattgaatagctttctaaatttacagtatcgacaatatcaatttagtgctatgcttataaaagcaaagatgtcgttgttatgacttatatctgtatgatgcctaggttttgtttggaaaataatgttcagaaaaggtgcattgtgggtctctttgtctgctgcccttgtttccaccttgtgtaaatatttttcctgtcttcaaaagttggcatcagttttgcagttttcttatgccactgctaacaacttctcttccagtctatttgacttggcgtgtcagttgtttatactatcagcttttgcgtttcatgtttgcaggaacaggttagggccttcattgaaggtactggtgacagcgacgtgcttgtgctgaatgtccaggacccgttccagaggctgcttctgcacggtgtttgtgagttctataacgtaacctcaatgaccacaagcagtgtaagggacgggaagccatggaagagcaccaccatcaagaagaggcatgtcaccggtcttcctccgagaatcacattagttagcttcctgaggatgaggaagaattagtcgtcccagtaacatgtggatgtgagggtcctacactaattcgcctggatgtgtactaaaaagacaaatttgttgctttaggtcgcatctagcatgtaatcaaatgtaaaatatccatgtcaaatgtaaaatacattgcaagaccttgttccagatgaagaaactcaaaagtgtaagcccctacttctatcactgagtctatgaaagaggcttaagcc

SEQ ID NO: 2558 - DNA, 1321 bp, Zea mays
  Clone ID: ZEAMA-23APR03-CLUSTER38521_1
gatgccttttttttttttttttttaaacaaaaatattgactgcattatgtagtttttgtgacttatttttttatgtggatagatacaaaacaaaattacaacctatatttagagaactattggagaactcacatttttttactccaaaagtcattttgcttttttttttttttttttttttttttttttttttttcttatgtaacttgtgaacttatcttttggtaggttttgcatccccaatcaatgcggccggctagggatggtgatataccagtgagagttaagaactcgtacaatcgtcatgcaccgggccccctagctagtggcttggtaattttgcggccggcgtgacgagcttgagcttgccaccatagatctccggcagctgggagtcgtcgatggcctcgcggagcgtcctgtccaggtccttgtccggcacgaagacgaacttcttcttggtgttgtcgtcgataaaagggtagacgatcttccaggcggccatgaagacgtagggcacgtggacgaggaagacgcgggcgaggcgctccgggtagtagctctgcatgatgtcgagcgccgccaggtagcctcggatgtcgcagttggcgtagccccagccggcgaggtcggcgacggcggcgaacttctcctggcgaccatctcccggaggggaggagggggcaggcgcgcgacggtggcgtcgaggacgtggacgacgtagcgcttgaactcgtcgaggtccctgcgcgccgggtggtggcgcgcgccgaagccgtagatgagggggcggccctcccggtcgtggccctgcaggtagagcttcccctgcgccgcctcccgcgccacctccgccgctgcgatggcgccgtggggcttggccgcgggcttccacttgaggtacttgagcagcatcgccgacgccttgccgatgttgtggtcccgcgcgcggaggaagcgccggagcgtgtagtcgtcctcatccttgcaggaagggtcctgggcctgggtgacggccctcagctccgccacctgcttccactccgccgcgtcgtcgctagccacctgctcttgctgctcccgctccgccatggccgacgacctcagctgctggtggatgggtaggaggcgggtcgtgtggttactttataggaggaggaaggactactgttcgtgcagcggtccccaggctagctgaggctgagctccagccgggttaaaccccggccaacctcgagggctacctatttatggacggctcccctcaaccaacagagcaagcaagcaagataaacaacgacggcatgaagaatcagaattca

SEQ ID NO: 2559 - DNA, 1774 bp, Zea mays
  unsure (1)..(1774): unsure at all n locations
  Clone ID: ZEAMA-23APR03-CLUSTER38541_1
ttttttttttttttttccgcacaatatagctagctactttattatcaataaataaatatcttttgaccactgctgtatatgtgttgtgggtgggtgactgacaccagaaattaaagagaatcagatccagggcgaggcgcggagcggggtgacgacggacttgacggccaggtacttgtcgagcgcgtgcatgccctcgtccttgccgaagccgctcatcttgcggccgccgaaggggcagtcgctgcccatggcgaagtagcagttcacccacaccaccccggcgcgcaccgacctcaccacccggttcgccacgtccaggtcccgcgtcaccacccccgcccccagcccgtaccgcgtgtcgttcgccctcgcgatcgcctcctccaccgtcttgaacttcatcaggcacatgacgggtccgaagatctcctccttcgctatgatcatgtcctccttgacgttggtgaaaactgtgggctcaatgtagtagcctttcccttccggaccgcatggccttcctccagtcagaagagtggccccttctcgcttgccatggtcaatgtagctcagaaccctctcatactgagccttgtccacctgcgggccctggtcggcgctagggtcgctgaacgggtcgcccacgacccagctcctcatcctctccggcaacctctcctcgaacctgtcgtagacgcgttcctgcacgtagacgcggctcgcggcgacgcaggcctctcccttgttaaagaagctggcgccgacggnnagctccacggncatgtcgaggtcggcgtcgtnnaanacgatgagcggggacttgccgcccagctccaggtanacgggctncnngttgctctccgnggaggccttcattataaggcgcccgacctccgtggatccggtgaaactcaccatgtcaacgtccatgtgagangccagcgcggctcctgccgtcngnccgaagcctggcacgacgttgatcacgccgtctgggacccctgcctgcttggcgagctgcgcgaggtacagggcgctgagcggcgtctgctcgngcgggcttgacgaccagggcgcagccgtgcggccagcgccggcgccaccttgacggcgaacatggtggacgggaagttccaggggatgatgacgccggcgacgccgagcggctcgcgcagggtgtggccctggaactggcccggcatcttgagcgtctcgccgtggatcttgtcggccgcgccggcgaagtagcgcaggctgccggcggcgttgccgacgtccaccgcccgggtcacggccgggtgcttgccggcgtccaggctctccagggccgccagctcgtccgcgcgctcctccaccaggtcggccagcctcgccatgatccgcccccgttcggatccagacatgcgtggccactcgccgtggtcgaaagcggccctggctgccctcactgccaagtccacgtcttctttgtcagcttctgccacgctggcgatgacgccccccgtgcgcgggtccctcgtctcgaacgtccggctctgagacggcgtcgacgaaggatccgttgatgaagagcttggtgaacctgatctccggcacgtcgaacagcagctgcccgcgctcctcccccgccgccgtcgtccggtccgcaccgccgcggttgctctcgctcaccatggccggccgcgcgccgtcgccacccgcttgctcacggtcacgggtcgagggagagtgttcgtcgtttggtgagcctgtgcggagagaggaggcggcggac

SEQ ID NO: 2560 - DNA, 1400 bp, Zea mays
  Clone ID: ZEAMA-23APR03-CLUSTER38583_1
ccccccaccaccccaacaacacaaaacaaaaacactccgcacactccgccaacccaccccaccaccccacctccccctcacatactcttatcataaccaataacaaccaaagatataaccccaccacccacctcgaccatccccaccaaccccgccccgcgccccgccgggccccccctcgaggtcgacggtatcgataagcttttttttttttttttttggcaggtccaagacactttgtggaaacaaagtagcaggaaacaaagttggaagcaaatagagatagagatagatagagacagagagactatattgcaacagaaggaaacaagggtacaaaaaaataggcacgacaaataaaaatgagtaaccagctgctagtgttcccaaaactatgcacatatatctgaccgtagaatgatagaaacaactatctacgttaagaacataattttgaaggcgtcatgcatttctactatcttcttggcctgtcaattgctcacccttagataaaggaacaatgcagcaattctcgtaggtcttgacgtgatgcatttccaatatcttcttggcctgtcaattgcccaccctcagatacaggaatggtgcagcaattctcataggtctttccagaccttgtagtcagtatttgagctgttgggatttattggtgtatcctgacatcctaagaaaaaggttggtcgcacatccatattgatcaaggcatgtgcagtggatcttgcgctagcaacaatagcgacctcgtcagcagcaatcatggcttcgccatatccttcatcttttatgccagcattttccaacctgaattttgtctttgcgccccagatgacgaatgtttcattgcaagtgtggtgacgatggttgccacgtaaaccacctggttggatctgtccaacatgaagtagtaaacagaccagtgctccacctggaaggccagcgtcacgggcggcggcgacggggtccagtaaccacccgcgcccgtcgcgggcgatgggggtggggtagagctccgcggggaagcggacgagatttgcctggggctcgtgcacaacggaggggcggccgccgagcgacggtggcggcgaggggtggtggaagcggagcgagagccaggtgaggaggacgaagagtgagagaaggaaagggaaggacgccggccgcttcaggaagtggagcagcgacgacgccagagtgtgaggtggaagggcggcggcggtgctggggagaggcggcggctgcgtctggatgtgcagcgcgatggctcgcctcgggttcgccatcgacggtcgccgcacgcgaatcggaggtggcggtgctggcgagccgttcgtggggacgggtaacgggttgctgacttgccgccgccgcaatgggctgag

SEQ ID NO: 2561 - DNA, 1406 bp, Zea mays
  Clone ID: ZEAMA-23APR03-CLUSTER38585_2
ctgaagcacatagggttggcattccttattaaaggatgatgatgatccgattgcagctacaaattattccttcttactccatacaggcctaccaatcatcctaatctcccagtcatcagcagtaacagatcgatgggatggaatggaacgctacattggtgtcgaagacagatgaaagaatgaaacctctatagcagcaaagcacagaacgaaccaatccacttccacacaatgcagcatcaccgatccatggatgaatatcaccatcacttgcccttctcctccttctcctgcgccgcctcttcctccacctcctgcttgccgttggcgtcgtccatttccttgaggagcttgagcttgtccttttccttgtccttgtcggccctcagctcctcggcctccttgagccagaggtcggcgaactcgcagtccctgtagcgctcgaaccacggcccgccggaggtgtagtggatggccctggggcgcgtgtccgggtcggccgggtcgacccggttgtggcccacgaggaagttccaggcgaagggcacctccccgatctcgtcgtcgtcgagccaggcgaagcggtggaggaaggcacccgtctgggtgctgacggcctccggagtgagcgcggccacgttcttggggtggccgcagttgtagagcaccatggaggaccagttctcgcgcgggtacaccgtctggatggcgccgtccatcttggtggcctcggcgggctggtactcgtgcttcacgcaggctacggcaatgcggccggcgccggccgcgcggtcggcggcggccgcggcggcgaggaggtcggccaggtccgccaggtagaggaagtcgcagtcgacgaagagcgcccagccgcggtaccccgccaggtacggggtgaggaagcgcgtgaaggagaactcggtgctctccgtggggccgcgcgcccgggtgtacagccccgcggcgcgcagctccgcctgccggatcgggcgcacgtcaagcgggatcgatgagcgccggagcaggctgcggcggcacacctcgtacgcctcgtgctcccgcgggtcgtaccccacgaacacgcggaacggctcccccgctggtggcagcagcggcgttggatgcggcggcgccggcatggctggacgtgttgggggtggatctggtcggcggtggaatggaacggggcgctgggagggacgggacgggacgaggaggcagggagcgcccgggtcggcctcccccgctttaatggccgaggcacgggaggtggggtccaggctaaagatggcgaggagcgtgcgtgaggagggggggaatggggattcctcctcgctgccgggcggccgggctggttttcggtggaaaagttttcgattaggatgttctaggtaatggtctcgtgc

SEQ ID NO: 2562 - DNA, 1423 bp, Zea mays
  unsure (1)..(1423): unsure at all n locations
  Clone ID: ZEAMA-23APR03-CLUSTER386102_1
atctacatggcttcatctcctcattattgttccagtcgtccgatccatttgctatcttagccttagctagctagggtttcttgagtcgccttggcctcagcagcttccttcttcgtctgtcttctgattatatattaacacagtagaaataaagaagctagctatagccacgccatggatagcttcggggatcttggcggaggtgggagcagttcctccagagctgcttctgctcccttcttgcagctcccgctgccggcatcaacgtcgtcatcagcacaacaacaacaggtgtttccgccgccggacgggccgcagcagcagcactatcaccacagctcgcgcatcccgttgcgacagttactgttactggccgacccgtcgtcggcagcgcagcatagccatcggaaggcggacatggcaacagtgcagggagagatgtcgtcgccggcggcggatggggatgccgacgccatcaaggccaggatcatgtcgcacccccagtactcggccctcctcgccgcctacttaaactgccaaaaggtcggcgcgccgccggatgtgtcggataggctctcggccatggcggcggcgaatctggacgcgcagccggggccaataagccggcggcgcggcccgacgacgacgcgggctgatgacccggagctcgaccagttcatggaggcttactgcaacatgctggtgaagttccacgaggagatggcgcggccgatccaggaggcaacggagttcttcaacagcatggagaggcagctcggctcgacgatctccgacagtaactgtgaggtcgccgggtcgtccgaggatgagcaggacgcgagctgtcctgaggagatcgatccctgcgccgaggacaaggagctcaagcaccagcttctgaggaagtacggcggctacctgggcggccttcgccaggagttctccaagaggaagaagaaagggaagctccccaaggaggcgaggcagaagttgctgcactggtgggagctgcactacaagtggccctacccttctgagacggagaagatggcgctggcagagacgaccgggctggacccgaagcagatcaacaactggttcatcaaccagcggaagcggcactggaagccggcgtcagaggacatgccgttcgcgatgatggagggcgggttccacgtcgcgcagggcaccgcagcgctgtacatggacaggccggcgccgccgttcatggcggacgacggcgggatgtaccggctggggtcgtgagggccggcatgcacggtaaaagctaagcacgtgtgccggcacgacggtgattgttgaggtgtattagtgattgaactgattgctccttctcatccgtaaatatacagtttcgggttgacacgtttttctcaaaaaaaaaggaaaaaaaaaaaaaann

SEQ ID NO: 2563 - DNA, 1485 bp, Zea mays
  Clone ID: ZEAMA-23APR03-CLUSTER38713_1
aagttttagattcgaaactttgcagatgaagctgctgcagaggttgaacaaattccgacactgccgtgaaaaacagtagttaatgggtcagtgaccagatgctaaaacgctggcacgttactatcttcttggtgccgctgatatgatgccgggaggtcgatatacgaaactctgcagatgaacctgctgcagaggttgaacaaattcggacactgccgtgaaaaaccagtagttaatgggtcagtgaccagatgctaaaacgctggcacgttactatcttcttggtgccgctgacaggatgccggggaggcgttcgatctccttctgttggttagcttgcgaccctgtttgctggcaccagtcggcctgggattgccgcctcaccaagacgtgcctcgcccagccctatcttctaccgggcattccgctgcatcgtctcctgcaccttctgtggctccactgacagcgcctgcgcctcactccccatggaagctctgggctggtgcgctccttaggtgagtcacagacgcaacaacgccaccagtcgtgctccctcgccaatccgactccgcagcgtcacccgttgcgagctgcggtaagccgtccaccaccgcacgggatgccggcagccgccgtgtagcctccctgacgcggcgcgcgagagcgtcgacgaggttgaggtcggcgtcgtcggagtcggtgtcctcgccgcccaccgccattcggaagggccgcgtggcgtgtcgcgctggcgctcggaggtcgaacccgctgagcatgagcccacccacctcgcccacatcgtcgtcgctggtggcctcctcaacggcgtccaccgggccctggaagccaccaacaggcggccccgaatcgagggtaaacccgttcagcatgagcacgatcccgtcctcgtcgtcgtcggcagtctcctcatcgaccgctccccgctcgaattcggaccctacgccgcccagagcatttcgggaaatcatctcctcctcctcctcctcctccccggaggtgtcctcgacgagttgcgatgcaggaaagaggtgggggtagaattggctgagacctccgtcggagtcgaatgagcggcctagggtttcgagaatgggttcgtcgtgggaggacaggggtccctggcgctggcccacgaggacgtcgcctccgtctccttcgccgccgcggaaagcgaaatctgagatgcgatactgcccgccgcccccgtagctgagcgcaaagtggccgccgacaagtcccgcgtcctcgtcctcgtccccgtcgccatcacagtcttcgaatgggtcgtagcagaccgggccgtcgtccccggagtcggagtcggagtcgaaaccgaagggatcgtcgccggcgatacccgccattgggaagaagcacgaagcaggcaatggcggaagtggttcttgagaagggtccgtgggggtgacgactgggtcccggccggcctcgaggtacccaatg

SEQ ID NO: 2564 - DNA, 1627 bp, Zea mays
  Clone ID: ZEAMA-23APR03-CLUSTER38812_1
ttttttttttttttttggccaaagaagtacaataaaataatgaagatgacaagagaacaacggccgtcttctccatcgtagctaaaatccaagaactgctgctcgctactgacctaagtagctagcttacatttctagctaaaactctaaaaaaaggaaggcaaggagaggagtacccccaaaaaaaaaaggctagcaagcaatacggtgctgagaaagagaggaggagatctatgatgcaatgcgatcagtggtggtgtacctagctagcacacagtgcaggcgccggcgcgaagcgaatggccggcggtcggtcatggcttcttgccgagggtgtgcttgttgttgtgcatccacaccttgagcacgtggcgcttgacgcagacctcctcgcagaactgctgcacggcggcctcgtcgtgcttctggatgcgccaccccagccgctccgcgaacgccagcatccggtccttctgctcctgcgtgaacttggtgcggaaccgcttcttgccggaccccgagccgccggacgagccccccgacgggccgccgcccgggcccagcgacatgcccatcatgggcgccaccaccatggggccgatcagcccggacacgtcgtcgccctcttcgcgccccagcgagtgggaggtggacggcagcgcgagcgggcgctgcatgtgcccggcggcggccgccagctgctggtgcaggaagtacccggcaggggtgcggtagtagggggagaactggtggtggtgcgccgccacggcggcgccgtaggctgtgatggcggccggggacagggcggcggcgggatcgggcggcgcgacgcccccgcctcccgctggcgagttgtcggactccttgcggtggaagttgcggtggcagccgcaggccgcgcagcgcagcgcgtcgatggagccctcctcgccagcggccatgaattcgccgcagccgtccaccgcgtgcccgccgatgccgaccgcgtggttcttgaggcactcccggtacctggtggccccgccaccgcctgcgcctgcgcctgcgcctgcgcctgcccgtgcaccacctcccccgaagccgcctgctggcggcgtcctgaagctcccggctccagcagaatccccgtgcttcggggtctcgccgcctcctccgcccagtcccagccccggctgcatcggcgcatcgtagctcgagctcacgggcatcggcgtcatctcctcgtcgccgtcatcgtgctcgtcgaagtccatggcggctgacctagtcggcggctcgtcggcacacgggggagcttgtttgctatactagctagctactcctactttgctttttcccttccgacttccagtaggttctttgccgaggttaacagcgagagcttactaccacacatctagctacaggagagggtttgtgttgttctagctgctgggactcgtaataggggaagagagagaaagagagcagaccgttttttgattaggatgttctaggtaatggtctcgtgcatcggcagcggcactgctgcgcggcagcagcctgcagcagcctgcaggcaggcaagcggctgctgtgcctgtgcctgtgcccttggggagatgatgtagccacacaaaaacatctc

SEQ ID NO: 2565 - DNA, 1420 bp, Zea mays
  Clone ID: ZEAMA-23APR03-CLUSTER3890_6
gattgtaattctgtaattacgattagttggagagctgcaccgtgcagcactggctgaacaacagctccttgtcgccgtcctcggcgtcctcgggactcatcttgggtcggaagctgctccacgccggcgccagccctggtgcagcgctggtgtcgaagctgtgcactagcgagactgttcggaagctgtcgtcgcccgacggcacctggtagccggcgaggaagtagagctgcgtgccgacgacggccatggtgaggtagagccgctgagctgaagacgggagactggcgagcagcgacaggtcgggcagggcggagtggtccatgatgctctagatgttgagctcgccgtcgtagacctcgacgtgtcccttccagctggtgaggcagtcgccggagctgaacagcctgttggccaccgccacgatctggttcgggggcacgtcgagctgccacatccccggtagattttgtatctaaccatatctcgtgaggatgattgttgtgttggtttgttcaggcgtggctgaccccgtgaacttgccgtcgggaagtccagctgctgcggtttttgtggcgagcctttgcagttcgttctccagtgtaaccggcaacatcagctctgcaagaaccccagaataaaccctgacatcaagacactccactgatcactcttgtgctgctcctaccaatggagcaagagcatctccacctgacaatggtccactcgttgtattcatcactaagtccgctcgattccaccaataggtgttcatgcttacagttgaattggcaaactgagggaggtgccgggggagcaaaattttctcagtttggcgctgatttatcaacgatcatggataagcatttgaagacccttgccccagtctacgtgggaacaaaattcgtcaagcttgatgctgaatatgctccattctttgtggccaaactggcaatcaagacactgccatgtgtaatattgttcaagaaggatattgctgttgaccgattagttgggtttcaagatctcagaagtaaagacgattttctgacaagagcattggaacacattcttattctcaagacgaaagggataatcgatgagaagaagaaagatgacgacgatgacgatgaagaaagcgaggctaagaataggagggttaggtcctcaactgctcaagactctgactcagactgaacttgagatgaggattgaggactcaccgtttttgcactttggattttgtttgtttgtttgtttgttctgtgctgtgttgtactgtaattgatttgtgtaaccatgtatcggtaccagacaccacaacaagaacatgtacaagagattctttagcagtggctgtcttttatttcgtttttcctcagcatcatagcctggtccggctgatgtataatagattact

SEQ ID NO: 2566 - DNA, 1642 bp, Zea mays
  Clone ID: ZEAMA-23APR03-CLUSTER389192_1
aacaacggtagctgcttgatcactcgtgtcgctcgttgcattagacagatagccagcagcccagcacacccccgtcgttcatcgggctcacaactgcactcgcctcgccagttgtattggagaggatagatagctcttcgccagagaaggattgccctcttgagatgggctgttctttcatctctatcttggttccatcctaatggatctaaatctatggccgccaagcaaatcacggatgacgatgaactgtgtcttctcctgccactgtcagggcctcagccctatgaatgtcagatacctgtatgcggctatcttcctcctggcgaacctgtctgcgtggttcgcacgagagaacaccgtatcatatcacctgaagcagcgactcagcggatgtcagggtgaccggggttgtctcgcggttgaaagcgtgctcgtggcaagccatgctctttattatgattgttttttatctaacaattttctgtattatgattgctctgaccttaacaaatcgcccagctcttttttatgaccatgttcttctccactgtacgcaccggcaaggtgaatgagttgagaaattcatggcactccgggtggtggccagtgaagattgccctcttcatggtctgttctctcatctctgtcttggctccatcctggtggatccaaatctatgttatgaaacattgtagagtcagaagacgacgtatcatatgggtatggctttttccatttcgccttcgcggcgggctccatgtacgtcaggatggtgtttgtcggctgggacacacatcatacaatgaagcaatggagcgtggatattgggtggatgagcacgtgggttcatatcgccaatgaggctctcgtagtagtattctacatagcaatacttgttgctagaattttcggaataggcttgctccgacatctccttgccaagatcttcgggacaggtgaccgattgcatagtggtgaatcccagacgacgaccacacatctgatgagatgtacacaacgtcgtcgtctttttcatcattctaccgaacaactgaggagacgatgaccacatccgatgagatgtacacaacaccgtcatctttgtcatcattgtacctaacacccgaggagacgctgaacaatgatgccatttcgataagcaactacgacactgatgatccaccttcgccgccacctgtatcgttggtatctgatgacgtagacatttctgaaccatcacctccgccatctccgccgccacatagagtggatgagatggacaactctgaggcatcctttgtcccacaccatatagctccaaatgtttgaggtaccaattacctcaggcaataatgaggaggaggatgacgattcttttagagaatgggagagtgattaaatgttttcatcagttaccaataccccaattgtagataggcatcgacgatatgttgtaatataggtggaggcatgtttgttgtatggattttttgacatggtaagacatgtttgatgcatatacttctagctaatgtaatataagtggagacatgtttgtcgtatggatttgtttgaaatggtaagacatgtttgatgcgtatacttctagcctaaaaaaaaaaaaaaaaaacggcacgag

SEQ ID NO: 2567 - DNA, 987 bp, Zea mays
  Clone ID: ZEAMA-23APR03-CLUSTER389238_1
attgcatggtgattgctcactggaaatccttgcggttgcggctaaccaacagatcggggagatggcggagagtcacacatgatgcattccgtccatggtatatatgccgggccatgtccatggctgcctctaacttgctggtagcctggtactaagtaggaccttgatcggcacctctgggcatggacgtgaccttcgtgtgctcaggcgaggaggccttcaagatggaggtgggctacttcgacaccgtgcaggacgtcaaggagaagctccagagccgccgaggctggcccgcggccgccacgacgctcctccacaacggtgccgtgctcgaggacgtcgacggcggcggcggcggcatcgagcggcacggcgtcgtggagggctccgtcatccacgtcgccctcctcgatggccagcacctgcagcagccgcaggacaagaggacggagaagaggcgtggcgagggaccggcgccgccgctgcgggtgatcgtcgtgtcggggtgcgccgagggacgcgtggagatggccgtgggcgcgcgcgccgcggtgtcgatgctgcgggcggagctggagcgcgcgcgcggggcgggggcacggttcccgctcccgcgcgacggcgcctacttcttcatacatgaacagagcgtgatggacgagtcgagatccttcgagtggcacggtgtggccgccggcgacgagatcgtcgtgttcaacggctccgtgacaaggaaccaggcgtagactacttgtggtacggttggcagctcttacacgcgtgcgcgctcgtcatggagcacttctaactcgtggtttctgaatttatctctttagagcaagtttaataatgggtctttaataatagtgcttacattgggctctaaatctttcccatgtcatttagagccaacaataaaaaatattcatataacgatgttgactataaaggttggccaaatagaaaggaaaaaaaaaaaacggacgc

SEQ ID NO: 2568 - DNA, 2071 bp, Zea mays
  Clone ID: ZEAMA-23APR03-CLUSTER38933_1
ttttttttttttttttccgaactatccgactcgtgcaaaatcatcaaaaaccgggtttgctgaaactagacgctgacatggcatgctggagcctccctaagatagctctctcactaaaatatagtagattgatttttttcttgtgtttaagaggaggatgttccactaatttataggcgagtagaactcacacaaaaagaagtagcgaagagtgacaataaagaagctatttaagttgtttctcttccattatcaattatcaatgtgatactaataaatagaccttagctcataaactccaacgatatattttccagagaattaagtaaaccaaaatgctgtccacattctattccttattgcatcggacatataacatgcagttcattattcagagcgtcatcgtcatgctgaaaccagaaagctgatcaaacatcagagcgagcaaatgtagtccaccagaccgtcgagagccaaactaattcctcctccttctgcaacgcactgcttcgcctgcgccttaagaagccgagccctctcccttggcccctgtggccccagctcgccggccatcagctttctagccgccttcgccatggctgtcctctcaagcggcttcccgacctcgtacccgatgccccactggtgcgtcacatacctcgcgttcactatctgctcggcgaagcacggctgcacgagcatgggcaccccttcggatatggcctccaccatggatttccacccgcagtgcgtccagaacccacccaccgccgggtgcgccaggacctccctctgcggtgcccacgccacgatcttgcccctgtgcctcaccgtctcgcggagctcctccgggaccggcggcacatcctcctcatccgcgtccgcgccgcggacggagccgcggcggaggacccacaggaacggcacgccgctgccggccagcgcccacgccgtctcctcgaacacggcgcggtcgacgcgcgccacgcttcccatgctgacgtacagaacggagcgcggcgggcgcgcgtccagccacgccaagcaggtggggtccggcgcgtcctggtaccccgcggccgccgccgccgcggggtccggcgacgccaggtgcagcggccccacggcgaagaccgggcggccggacagctcgcgccggatcttggccagcgccgcgccctcgatgccctcgaacgtgttcagcaccacgcccgacgacgaggcccgcacggcctcggcgttgcgggtgatgaaacggagcaccgtctcgtcgtcgctgccgtccacgcggatcaggtcccgcacgcgcaggggctccaggcccggcaccacctcgtccagccgctcttctgcatgcaagacaagaaaaaacgagtaaccggtcggtgccgtgccggtggcacaagatcgtcacgcggagaaggggaggagaagagggtggtggatcgagtgcctttgatggggaggtaaccgtcggcgcggaggcgcggggtggcgagcatgctgagtaaggtggcggcgccgtcggcgcgcagcacgagcgcggggacagcgacacgcgtggccgcgcccagcatcttgtaccactgcccgtcgaccaccacgcaggcgacctcgcgcgggccaccggttgttgtaccgcgcgccagcagctccccggcgagggccgcctggaacggcgcctcgcagacggcgttgagctgcatcatctgctctaccatgtcggggttggcgacgacctcggcggggagggactcgcggatggacacgaaggtgatgtccgggtggagtgcggggtcgggcgcgttgaagtcggtgtggagcatggtgacgcccaggccccgcgcacggaggagcttcccgagctggagcatctggttaatgtggctccagaacgggaaggggaacatcacgacgcggaggccggagggagcacgtccgtcgtcgccggccatcggtgctgggtggtgctggtgtggtggattcaggctgtggatgctgcctgcgctgcgcctgcctgaggattgaaaaagatttttcgattaggatgttctaggtaatggtctcgtgc

SEQ ID NO: 2569 - DNA, 1070 bp, Zea mays
  unsure (1)..(1070): unsure at all n locations
  Clone ID: ZEAMA-23APR03-CLUSTER38937_4
cgaccaaaaagcttatagccattgcccccatctnaggatatgttacaactaatattaagtccacaaaacacatattattaactccacacagcacacataataatgtgtcctagccttgcacataatatcaagttcaaggcttctacaaaatccacacgtacttagcccacaattcattgttcgatgtggttcaagcaaaagagccgtccaaatctacctactaattaccctcacactctagagaacttctcactggcgaaattgcgagcccaaattaacttgtggtcgaacggcaacttgttgaaggctctagcaatgtgagggtgcgccaccaaataattgaaatacagagatatgtgggtctgctcaaaacctggaaggtttagcaaattgtcaaaaagatcatctggtacatcagtgtcccatgtggcaaccttctcaatagcattggatagcttatccgcgacacttttgaatgcagcaatcaactcctcttcactgtcacgtttttttgccttcttgttgctcttgcttgcagaagatgttgcgacattatcatcacaagcgaactgccttttagtgaaagcacgtgccgtcacctcttcattttcagtttcatcatcttcacctagacctgcactggaatcctttgcaaacttacatgtggccatggtatttccaaatattgtttgcatctcatcaaagtgttcaaaaggcttgtttaaacaatcagcatcgcttttgtcatcatgcaatggtgcataggtaatctgtgcgctccttgcatttcgttttctttttctagacgcaataatcacggccatcattgacagtaagttatgtgcagcagcaacacaaactgcaaccttggtcatcttatccatcttgcaacttgagcaaacaaatccgatttgaaaggaaaggctggaggaggcttgactccctttgagggcggatcgagattcgcaggggatggatggccggggcaccgagccccgcggctgggtagactcgccggcggcggacacgggatgaaggaatggatgtttggtttactgtgactaattttt

SEQ ID NO: 2570 - DNA, 1344 bp, Zea mays
  Clone ID: ZEAMA-23APR03-CLUSTER3893_2
attcctcacgatctctcgcttcctgggctagccaggagcccggtagcccactagccgcccgcatcgcgcgccggcccgcacgacagcgccgccgtcacgccctccacgccggcagaggctgccggcgacggtggggggtgacttcctctccccctacccttccgatctctttccctctgcgaattgttctattaggtttggtacattctgttcccttgctcaaatctctgtctctggccccgcggggattaaaacgtgaaccaccagccaccatttcatacgatctcatcacacttcttagttaccatctccagcgaccttcctcgggggtgctagccggatccgcgatcgtcgaaatcccaagctcctccacaggcccgagggtcggtcgtcctccaccaaggagcagacccaacaaagagaagtaactctccaagaagaaaatgcagcctatgagaaagctatatcagagtgtaaacagaaaattcaggaaaagcagatggaggccactcagcttctgagtaatctggaggaaatggaagtaacagagcataatttaaagacacagcttgaaaatgctctgaaggagctagaggctgctcaacataaagcatcaacagcaacctctggaacagctgaaaatgctctactggaagctaagtcagtgactgatcttaaatctaaagatttggaggagaagaaaagggagcttgaactattggataacaaggtgcaaacattagagaaagagtggtctgtggttgaagaagaatctttaaagaaacccactcctgcacaaagggagaaggtcctggagaggcaactgcatagcctcatcgagcagttgacagctaagcaagctcaagctgaaattctggccactgatgtgcattccaaagaaaaggagctggaacggctgaaccatctgcatagaaacctctacggcggtgccaacgaaactggcgcaccccggagccgcctcagcagaggcctcttgagcggccctgaagattactattacgaccctaaagcgggccggaaaccgtaccaggctggcgttagaacagaaggccagaaccggctgatgatccttaggtccgcaattgtactgtatgttctgctgctccatgtcatcgttttcataaagatatcagtctgaaagcagttgagctagcgcttcataagttcgtatagggaaacagatacttgcttttgtgttccaaaccatgcaaacgtttcttgttgtaaataactttgtatgtgagtatgtatctcgtttgatggatctataggagagttatatgaaatacctgttgtcataaaaaaaaaaaaaaaaaagcggcc

SEQ ID NO: 2571 - DNA, 1920 bp, Zea mays
  Clone ID: ZEAMA-23APR03-CLUSTER38978_1
tgaaaaagcgtctccatccttctattttttttttttttttttttggaaaacaaatgctcaagcgcttatacattaccattgttagtaatacaaaactgacgtacagcgccagttttttgagtcagaaatgcaatcagcagacaacactgtacatcgtcgctattgctagtgtgcataacataggggtccaccacaagtgctttaacttttactgtacagatctccacatcccaatgctattgggcagatcaaacaggaactcgagatggagaatccccttgtctatcaagtgtagatcccgtttccttcccacattcagatgattttgctacatggcaagtgattttgctagccctttaactggacattcctgattctttgactgacttcgattaatgttgttttcacttgtggaatccagtgatgacgctgagaatgatgaagatgttattgatgataagtcagcgcaaaatgagcttgacaacatatttccactgattatagcagcctggagtctgtctctcacgaccctcacaaatttgtaaagatcattattacagttaagatccttcaccaattcttcagcgccatccacagagggaacacattgtactaatgtgtatcttccttcaacaagctttacgcaaaaatagcactccttgtcaggactttgcacatcaattttattgaacataaatttcacgccttctcctccaacaacttgaaaaccaaggtcactttcagattcaagggattcaatatctttgagttgaattgatatggcattcatgcattcatctcttgtagccctacgacccgtaaccaagtgtgtgagctgctcatttgttgcagtggtttttaaaatcgactcagtcatgagattatgttttgaccttctgcttgtttggacggagagggcctgtgctagatctgattctaacttccggagatgttgtttttgttcgctgagttttgctcggttggagacggtctggttggcgatggagcgcgcctcgaggagggcggcactgaaggccgaggaggcggcggcggcccagttccgggagtcgatgaaccgccgctggatggcggcgcgctgctccttcatcctccggcgcagatcggcggcggcatccgccattggctgctgcggggtggcaccgcggtaggcgttggagaagaagaggagcctggagttcaaaattcttttgggtgctactactaggaatgtgcccctgattgagtacaagtccatcaaagtattttaggttgttttattttccgttcatgtcttgctttcctggtaacataggggccttagccaagggtctaagatggtcatttgttgcattgctgtttgaaatcgactcagtcatgaacttgtgttttgaccttctgcttgcttggacggagagggcctgtgctagatgaaacaggtaaaaaaacaaaagtgggggcgaagaggttgatatgcctcggttggagacggtctggttggcgatggagcgcgcctcgaggagggcggcactgaaggccgaggaggcggcggcggcccagttccgggagtcgatgaaccgccgctggatggcggcgcgctgctccttcatcctccggcgcagatcggcggcggcatccgccattggctgctgcggggtggcaccgcggtaggcgttggagaagaagaggagcctggagttcaaaattcttttgtgggggaaacgagaaaaaaaaacacgtcatttatccttgtcccttctcgtcgtgcaagggcaaggggaaaggaaccaaaggatgtcgtcggctcttgggttgggctttcttgtaagagaacatatctaattcacatggaagattggtgcacatggtgcacatattaaatcatcaccatttattttagatctaaagaaaaaaaaaaaaaaa

SEQ ID NO: 2572 - DNA, 1903 bp, Zea mays
  unsure (1)..(1903): unsure at all n locations
  Clone ID: ZEAMA-23APR03-CLUSTER3899_2
atcaaccagcgactcacacacccgcccgccgcttctgtagccgccgccgccnccccccccaaccaaccaaccgcgcagggagaaaaccacagcgcagcacatgcagcgcctcgcctcctcccggaggctcctccaggccgcgctcgccgcggccgccgtcgccgcgcccgcgccagcgaatggcgccttccccaagatgccggccttcgactacacgccgccgccgtacaacgggccgcgcgccgagatcttccggaagcgcgctcagttcctcagcccatccctctttcatttctacgatcgcccagtacgtgtgccgctcccccatcgccactccagtcttcagttctgtgggaaggactatactgctacgaccaagaagagaaacaaaaaaaactgtaaattaccttcngatttcaatattttttcggtnnaaactgcaccatgcgcttaatccagaccccttcagaggtgcttttggttctgacggggagaaatacgccagagatgttcaggaaatcatcgaatttggaactacagggagagttggtgggttcatttcggaagccatacagggggttggtggaatagtggaactggcaccaggatacttgcccgtggcatacagtatggtaaggaaagccggtgggctctgcatcgctgacgaagttcaggcaggagtcgcgcgaactgggagccacttctggggattcgaagggcatggtgtcatcccggacatagtcaccatggccaagggtatcgggaatggcatacccataggagctgtcgtaacgacgccagagatcgctcaggtgttgacccgcaaaagctacttcaataggagtacctttgatggtaaccctgtcagcactgcaggcgggcatgcggtgctcaaagtgctggagaaggagaagctccaggagaatgcgtttgttgtgggctcctatctaaaggaacagcttaacaatctgaaagacaagcatgagatcatcggtgacgttaggggcaaaggcttccttcttggagttgagctggtgacagaccgtgagaagaaaaccccagccaaagctgagatctcacgtgtcatgaaccatatgaaagatatgggagtgttggttggtaagggtggtttctacgggaacgtttttaggataacaccgccgttgtgcttcaccaaagaggattccgacttcttcattgaggtgatggacattgcgctctcgaagctgtgaggcaggcagggcgaagatgatgtgcaaaccctggtccgtggccatgggttttttgcccatgaataatattaagattagtgagacagcacctcgttgtctcttaatctaagacgatgccatgtcatccggtggcatggtattcctgcttgcccataaataagggacgagttgtgagacagcacctcgttgtctcgtgatcagacccatggtccatggagcaatacgattcttgtaaactctagcttcatccaatctgttcctcctgatctaactagtctgaatagcaactgttcgtttgttaccaatatcaacttcttttcagatgctccatatattcctgctctctgtaaacaaacaattatcactgttcaatagatgcggagatgtggatataaaaacaacaaaataataatcctacctgcccataaataagggccgagttgtgagacagccccccgctgtctcgtaatcagacccatggagcaatatgattcttgtaaactctagcttcatccaatctgttcctcctgatctaactagcctgaatagcagctgttcgtttgtgaccaatatcaacttctttccaaatgctccaaatattcctgctctctgtaaacaaacaattatccctgttcaataaatgcggagatgtggatataaaaattcccccc

SEQ ID NO: 2573 - DNA, 1305 bp, Zea mays
  Clone ID: ZEAMA-23APR03-CLUSTER39010_1
tttttttttttttttttttttgcagaaggctctcaggtttaacatatgagaatccgtttcattacaaccgaaccaaacttgaagctgcaaccgatggtgatggtagttaaacttcatgtgagcatgaagcaagccgccggccacttagatcgcatgccagcatggtatggtacattgctctgcttcaatccaaagcatttgcaacaaatgcgcatcaaggatccacaagtcctccatccaaagctcccaggtttacacagttgaactcaagtgcagacgtccttttcaaacaagtggggcggtagcattcagctaagtttgcaccgattgtgataaagcatttgccgaatcaaacacagcagagccttttgaacgcccccagctactgcctgctcttcacagttgctgaagcttttctccaatacaacagtaacctgctagaggacaggcagaattggaactctttcttttatcacttcccacctttttggtacatgactgacaaagctttccatgagttacaaaaagacaattcaaatcaaacttcagatcatcaggaatcttattatttagatgaatgtaggccttctccctgctagctgtagcaggaacccagcccatagccttcgtaatgcggagtacatgagtatccactggaaaatcatccttctgtagatagaacatcagcacacatgccacggtctttggtccaatccctttgaaccgcgagagctccttcttcacctcatccaccgacagttcccgcaggtactcgaggcaaatcttgcccctccgctccctcacgtccctcagcatggaccgtatcctggccgccttcgtcgccgccaggccgccgcaccggatggcgtcctccaacctctttccctcctcatccaccacctggtcccaggaggggaaagcggccttgagcgaggcgaaggcgcggcgggagatggcgtcggtagtgttctgggagaggagcgtggtgacgaggccgtcaagcactgtgggggacgaaggccgagggtcacggttaggcgagaggccaccgaggcggaggacgcggaaggccgcgaactcttcggggaacccgtggaacgcgaggagggcgtcgcggactaccaggcattgtgccgagcagggggaggcatgggaagggtagggctccggcgaagggtcgtgcctcgccggtgaggccggagccttccgtttgggcttgcgaggcatcgtagaaagaaggttgcggcggctgccggccggccacggcgatgcggctggaaaaagaaagggaaaattatttctcta

SEQ ID NO: 2574 - DNA, 1069 bp, Zea mays
  unsure (1)..(1069): unsure at all n locations
  Clone ID: ZEAMA-23APR03-CLUSTER39023_1
cattggactgaaataaggactagagcgncaatgacattcaccaatcaccgacagtccaacaccagctcaaagactacactttttttttttttttgacagaaagcttttgcatcataaagtactgtcagtactcattagtactactgcaatagtcagctttgctttcgcatcatatgaagctgcataactgaaccagcagaatcagaatgccccagtacacattagacataggggagctacagcctacgaagctttgtggttaacacttggttcattagccatctaatatataggggaacttgaacccacgcaacttgtccctttcccaccaaaatagagcatccctgtttcatcagcacacgtaacctagatcatgcccgaccatccaaattaccattcaaggagctccgagtcattttagacaccacagctatgctgctccttgttcgcggcattagctttgtcgctgtcgccaacattgttagtggagccgtagtgagtgtgcttcttggatgaacccttgcactgtccaactgggtatttgcgggcgttgatctccatcttgcgcagggcagccttgccgaggtcgacgccgcacatgtccgacaggcgcaccagatagaggagcacgtcggcgagctcctcgcccaagtgctccttctcggcatcgtcccagcctggcagccccttgggcacctcccctttccattggaatatctcagacagctcccccacctcccctaccagggcgagaaggaggttcctgggggagtggaactgctcccagtcccgctccgtcgcgaagtcagccatccgcttccgcagcgtctccaggctcacagctgccgccgccgccgccgtcgtcctcacctcgccatcgcgaacattgccgcccttctcctccctctccatgctcacctcctcctccgcaacattcatctccgccctagacttgagatttaattttgttttctaattcctcctcggccgtgggggacctagtagcactagttattatggaggaagtgaataggtcaatgcggcgaggaaggccggcctcgaggtaccc

SEQ ID NO: 2575 - DNA, 2052 bp, Zea mays
  Clone ID: ZEAMA-23APR03-CLUSTER390884_1
ctccccccgccccagcgaactttctaatccgccccctcattagggggaattgggtaccgggccccccctcgagtttttttttttttttttttaccaatgtgttgtacatcataaaaaaaaaaagggaacaaaagaggacaagatccaatccacaattacacaaaggagaaaaataaaccaaaagagacaataggagtaaaacagcaaattaataagcaggataatatagctcaaaagttgtagacacaggttccatcgtcacttctagccgttggatcaaagttttcagccacaggatcagtacacccttcaggaactggcaggtttacttgctgggctccttttccgtagaaagttccgcggccgatggcgtcagcgtttgcgtctcccaaagcagcctggctgaggtaggtctcggcaagttggactctcttgacattctcttgttccatcacaagcatgtttccgtattccataagcttctcataagtcatctcgggttgctcgaacacgggaggtccttcccttgagttaaccagcctctttccgatcttctcaactccaaggctctcaacgaacttcctcacttcatcatcgtacactctcgccctcaaagcaccgaagaaatcgatagattgaccagggaactgatcaacaagtgtgacaatgtcttcgtccttgatcttgtcagttctgaagatacccttgcagacaccgatacggtcttcacgggtcggggcccagtagaacttctccatacgtccatcacggatgagaggagcgtatagggtggagaaatcgttaccagtgcaaatgatggggacacgtgcgttctcttccttgttgtacattcctgggagctggacgttggttgggttatcagcaatgttcatgagtgttgcgttaaccatctgattgttgacagtgtactgagtagtaccacccatacgacccgcaccagcgtcaagatcgttgatgaagagacaacacatctttcccttcttgatcaagtcagctgcctcacggtacctctgacggataagctttgcgggttctcctgcgtttccactctcaagctctccagcactcatcatgattgggttgatacccatcttggccatgacaagctcacactggaaggatttaccttgacctttgcctccccatatacccaaaataagtggaaccttgatgttaggcagagtcaagaagttcttggtgatgtgaacaacaagcttgtccatgaaagcaggagcaatgtaaaacccatccatcatgttgtccaagttgtactgcctaaggccttggctaacgtattcgtatgagctaaggacagcgtggtgagttccggttcccataggagcttggaagacagagtcaaccatacccttgcctctggtgatgtcttgttgatcatcagaagtgtcgtaggcaagacctctccatctgtctccatcggtttgtttgtcttctttcacagccaacaccttgaatgatccgttgctcttcttgttgctctgtgcgaatctcgacacagttacaactttctttcccaagaaggttgaagctggggctgatacagctcctgatcctgacccgttcaagctcaacggagctctgttgatggcaccgacggtggaaactgcggcggccatatctcaagactgcgacgagtatgcgtcacaacacaagaagctgaagagaggaattagattggtagaagaagaagcttagagagatgttggtgtgagcaagaaactgagagatttataaagcgagtgatcaacaaccaattcgttatctcttcgtcttcaaggcttaactctctgatcgccaccgggggggggggggggggactagtgagctctctctctggcaccaccccggcccctgcctcgggccaaatttctgaagcccggggggaaccactaagttctagagcgcccggccaccggcgggggagttccaggttttggttccctttatagggaggggttattttcgagcttggcggaatcatgggcataagctggttccgtgggggaaaattgg

SEQ ID NO: 2576 - DNA, 760 bp, Zea mays
  unsure (1)..(760): unsure at all n locations
  Clone ID: ZEAMA-23APR03-CLUSTER39219_2
gagtgaacgaaacgggagacgataacgagacagcaagagccaagaggtggtgagagagaggaccgaggagggaaacagagaagatgacgacgaagcgcgacaccgagtcggacggcgaaggctccaaccccgtcggtggtggcgcgactccgccgcccctagccgccgcccctgtcgtatgccgccttcgttggatccatcttcggatatggacaaggcttgatcaccaagaagggttttaagggctcattcagcaatgcagggtcctctgccaagacttttgcaattctctctggcgttcagagtttggttttgtgcttgttgcgaaggctacgtggcaaggatgacattgtcaatgctggtatagctggttgttgtactggtgtcgctttgggctttccaggggcgccacaagcattgcttcaaagctgtgccaccttcgcagcattctcatgcatcatggaggggctcaataagcagcaggctgcaatggctcgcacacttggtgggactgccgtgacggtcgtgcatgagaaaggcggtgttctgcccccgttcacgctgccaccaattcttgatgcatctgatgctttagcttcatgctgcttagcgttagtaaagcctaagcactagattgcagaatagagggcgtgagagatggtgaagacttcggttctttattgtgttgaccccagcnttatgtaaattttgtttttggacaagatgtgtaacgtgcctaaaatccagatttgcttcatct

SEQ ID NO: 2577 - DNA, 1493 bp, Zea mays
  Clone ID: ZEAMA-23APR03-CLUSTER39272_2
agcattctagttctactgctgatcttctgcatggccatggtgaggaacccaagagaccttgaaacatactaggagtactagcagtagaggatttaaacctatcttggagtttgcaactggtatcttcttgcaagatcccaaggccaccgtaagatttgttgcagcgtgagacaggagctgcggctgcggaggaagtgagcaaaagcatggatctttccggcacgcagggcgagctgccgatggcaacaatgcacgccggcgggtcgccgtacctggggctgcaccacgggcacccacagcagcacaaccatggcgcgaacggccggcacatgtcgccgccggatgtggtggcggaggaggccaagaaccggcagctggcggtggtgcccgtgggcacaggaggcggaggcggggcaggggtgaggtaccgcgagtgcctgaagaaccacgcggctgccatcggcgggagcgcgacggacgggtgcggcgagttcatgcccgcgggcgaggaggggtcgctggacgcgctccggtgctcggcgtgcgggtgccaccgcaacttccaccgcaaggagccgccgggcggcgacgggcggcagctgtacgggcaccaccaccaccacccgctgagcccgctggccgcggtgcacccccaccatcaccgggggctgctggtggcggcgcttcccccggcgccgacgcgcatggtgatgccgctgagcgccgccatgcaccatcaccagcagccgccgcagcagcaccacagctcggcgtcagcggactccgacgacgcacacgtgccaggggtgcgcgggggggaggtgcagcagcagcagcaggcaccggcacggaagcggttccggaccaagttcaccgcggagcagaaggcccggatgctggggttcgcggaggacgccgggtggcggctgcagaagctggacgaggcggcggtgcagcgcttctgccaggaggtcggcgtgaagcggcgcgtgctcaaggtgtggatgcacaacaacaagcacaccctggcgcggcgcggccacgccgggctccccggcgacccggagctgctggggccgcacgacggccagctcggcatgccgctcccggagccggcggcggagcccgcagttgctgctgcggctgcggctggacttggagtgaccgaccaagccatgtctttcgggactggacgacattgatcaagagagtctaatgctgactgaatcagccttgcggcatagggaagctgttttctttgttaatctgctgctgatctcatcaatctagccgtagctttagctgcatttgcattccactgttccatccatcctagctatccatcaaccacaaactgatgatgcggagtctccatggatttctattccttgttgatttctgtagctgctctccccgctcttgactttaattttttagtgctcgagtgactggtggtttgggaggtgagactgaatcactcactcttccgcctt

SEQ ID NO: 2578 - DNA, 1764 bp, Zea mays
  unsure (1)..(1764): unsure at all n locations
  Clone ID: ZEAMA-23APR03-CLUSTER39285_4
aatcctaccaggcaccactcgcatcgtgtgctcagtcagatccccgtcccgcatttcctaaggccagctgctggtgtgcagatggtggctgcacgcccttgcatttcggcctcgccaggaattcttaccgcacgggtagcagtttctaggactgattgcatgctcagttaccactgctacattccccaaaatcagctgctcctggcctctaaggtttaagcgcaatgatgttgttgtaagagcaatatcggaagagtgtggcccgcaggggcttcccattgatctcagaggtaaaagggcattcattgctggagttgctgatgataatggctatggatgggcaattgcgaaggcacttgctgcggctggtgctgaaattcttgtgggtacatgggtgccggcacttaacatatttgagacaagtctgaggcgtggaaagtttgatgaatcacggaagctgccagatggatctcttatggatattgttaaagtctatccacttgatgctgtctacgattcccctgatgatgttcctgaagatgtcaaatcgaacaaaagatatgcaggggcatcaaactggacagtaaaggaagttgttgaatcagtgaggaatgattttggcagcattgacatactagtgcattctcttgctaatggcccagaggtaacgaagcctttgttggaaacctcaagaagaggctatcttgcggcaatttctgcatccagttactcctatgtttcattgcttcagcacttccttcctataatgaatcccggtggtgctagcatctctctaacatacattgcatctgaaagggcgattcctgggtatggtggtgggatgagttctgctaaagcagctcttgagagtgatacacgggtgcttgcattcgaagctgggcgaaaaggcaaaatcagagttaacaccatatcagcaggccctcttgggagccgagctgctaaggcaattggatttattgagaagatgatagagtactcatatgttaatgcaccattgcagaaggagctgttggctgatgaggtggggaacacagctgcattcctggtttcttcattggcttctgccatcaccggctcgactgtttatgttgacaatgggctcaatacaatggggcttgcaattgacagccctaccataacgtcatagatgtggttgtggtagatagacgacctttcctgctgcattgcggtatcatccttgaataaagatcatagttagttattagtatgagaggtaagggcaggaaagggggaaaattatgaactggtcttttgcgctttctttgctggagaggaacattagagcgatttccagaatgatgggatgctattatgtgatttcatatgattcagaagcagtacaataactcccctgcccggncgnccgccccgggcaaggtnacacacaaatatttctatctagaatgcagcaccaacaaagggttgctgtaagaacatgggtggaatcgtcatggccattgggttgaacatgaatggtaactgctgttgcagcataatctgcgagacggcgtcgcagtgacattgtggcatcatcatttgcgacatcatgctcggcaagaccattggtgacatcatgctcggcatcatcaatggtgacatcatgttaggcgtcatcatctgtggcatcatcactggcatcgtctgaagcggtaaggccaacagttgctgcagcatcagggacggacacgccatcaagctggcaagcccctgttgcatcatgca

SEQ ID NO: 2579 - DNA, 2499 bp, Zea mays
  Clone ID: ZEAMA-23APR03-CLUSTER392965_1
atcttctctcacgccgccgccgccctttccagggttccaccgagggtgttccataagggtgttccatctacgatggagcaccgcgcggcggcgccagatgtgatcgtccaggtgaactccgcagccgtggcggccgtggacgagagaatctcgacgtgtcagatcaccgaggaggaaggcggcatcgtcggccacgagcaggtccccgtcggctgcctcgcccgccggaccttcagccagtcgtacagaacgaggccccgcaaccctctggagttcaccgggtggcagctggcgctgctggcgtaccagtcgctgggcgtggtgtacggcgacatcgggacgtcgccgctctataccttctcgtccttcgcgcttccggaccccggcaccgccgacatcctcggcatcctcagcctcatcctctggacactcacgctcgtcagcctcgtcaagtacgtcttcatcgtgctccacgcagatgaccatggagaaggtggcacctttgccctgtactcgctcctgcggcagcacgtcaacttcagcggcaagtcggtgccggtgccggtcacccggctggcgtcggatgccaacctcaggttccacagcaggaagagcagccagcaaccgaggatgctcgagttcctggaaggcagcgccatggcgcaggcggtcatcacctaccttgtgctggttggaacatgcatggtgatgggtgacggtgccctcactccatccatctcagtcctgtcagcagttcaagggatccagtcaagatcttctagcatcaaacaaggccacgttgtccttctgtgcgtggttatcttggtcatccttttcctgtttcaacagtacggcacgagcaaagttggcttcaccttttctcccatcatgctcgtctggtttgcgttgatcgcgtccactggactgtacaacatcatcaagcattatcccccggttctgaaagccatatcgccgcattacatataccttttcttcgctaggaacaaaagggcaggatgggagcagtttggaacagttgttttgtgcataacaggtgccgaagctatgtttgctgacttaggtcatttcaacaagaaatcaatccagatggcatactcgtgcctggtctacccatcactgatactcgcatacgctggccaggcagcatttctgatcaagaacccatctaagctcagcacaacgttctacagcagcgtcccagagccactgttttggccggtgttcgtcgtagccactttggctgccatcgttgcgagccaggcactgatatctgccagcttctccatcgtcaggcagtcggttgctctaggttgttttcctagagttaccatgaagcatacctcaaagaagtacgagggtcgagtgtactctccagagatcaactacttcttgatggttgcctgcatattgatcactgttggcttcaagggtggaccagagattgggcaagcctatggtgttgcagtgatatgggttatgcttatcacaacacacctgatcacagtggtcatggtgataatatggcagctccattctgcgatagcttggtcattttatgtcatcttcgctgccatcgaaggtcttatgacgatctcactgctgtataagattgcacagggtggctgggttccatttgcaataactgcattcttccttataatcacactctcttggacctacgggcgaagcaagaagcaggaatacgaggtgagcaacctgatggataggcaggagttcatcaagacagtgaacacgagcaacagagtacctggaatatgcatcttctgcacggacttgatgaacggcatcccgccgattgtgcgccactacgtcgagcacatgggctgcctccgcgagctgatggtgttcgtcactgtgaggcatctgcctgtgacgtctgtgctgcctgaggagcgcttcctcttcgacaggctggagccttttggtgtctacaggtgcatagtccagtatggttacatggacacccagaacatggaggacgatgagtacgtcgtgtcgatcgttgcgtccctcaaggaaatagctcaaagcggtgctgagatcctgatgatggattccgctctagcgaacgggacgacctttgtgcttggaagggtcatcctaaacatgagtccccagcggaacaactgcttcaagcgctttgttatcaacaacctgtacaggttcctgcagaagaacttcaggtccaacatttccagtctgaagatagctcctagcaaaaccttgcaggttggaatgcaatatgagatttgagtagaggagccttgcaagatatgatggacgtgagattctagaacatgcagacgtgggtagtttagaattagatgttttttgttttgtttttgaaactagcgatctgtttgtaattaggtcagcctcgccatacaaagctaccatggtcataactttggaactatttatttgagtgtggtctttgttgcaaaaaaaaaaaaaaaa

SEQ ID NO: 2580 - DNA, 1470 bp, Zea mays
  Clone ID: ZEAMA-23APR03-CLUSTER394158_1
atcgtcatatctccaggcggcgtcgtcaggcccttccgccgtcgtcacgcaaccgagctcggcacgcggcaacagccgcctccacacagcgcctgcaacctcctcctgcccacccatggccgccgctcgtcccggcaatctcagcgaattggagcagaaatggcataacggcggcgggcctgcgtgtgtgcttggcgtcggcacagccaacccagccaactgcgttcggcaagatgagtacactgactggtacttccgtatcaccaagagcgatcatcttacgcacaccaaagcaatcatgaggaaaacgtgtgagaagatgatggtaaaaaaacgctacttgcaagtcaatgaggagctcttcagtgtgcaccccgagttcttggaccctgcagctccaagtctgcaaggcaagctagctgtcgtggccggtgccatgccagggcttgtggctgctgccgcagagaaagccattgccgactggggccgcccggccggagacatcacccacctcgtcttcgccaccagttccagtgcccagctgcctcacattgacctccgcatcgctgcccttctcgggttaagcaccactgtgcagcgcacggtgatcggctttcacgcctgcagcggcagctccgccgcgctccgcgttgccaagtacatcgccgagaacaaccgcagcgcgcgagtcctcgtcgcttgcgcggacatgtggagcgtcatggatagttacgtagttcctaacgtagaccaccgctacggaattattggccacgcctttatcggtgacggtgccggcgcagttgtcgtcggaagccgaccacaggaacccgttgagcgcccaatcttcgagatggtatcagcgtcgcaggccacggtgcccggctcggagcgggcggttgccgtcgagctcaccaattgtggcctggagtatcgcctcgagtttggagatgtggcggcggaggtcggtggcaacatcgagcggtgcctgcttgacgcgctgtcgccgttgggcattggtagtgttggctggaataacctcttctgggtggtgcacccgggtggccccaggatcatggacaccttcacggcggctctcaagctacagcccgagaagctgtctgccagtcggcgtgtgcttagggagtacggcaacatcaccggcccgactctgatctttgtcctcgacgaggctatacgccgtcgccagctcgaccacgaggaggggagctgcgagtgggggctcatggtgggattgggcccggggttcaccattgatgtaatggcattgcgtgcgtgcagtggtaaatccacaccaacaccaagaatcaagagtagtctgtaagggagagccagaactcagaagcggccctttggttgtctgtttgtcagtgcgtttgtacgtgtcttcatcccaataaaataaataaataactgtggtttggctttgtggcaaaaaaaaaaaaaaaa

SEQ ID NO: 2581 - DNA, 1974 bp, Zea mays
  unsure (1)..(1974): unsure at all n locations
  Clone ID: ZEAMA-23APR03-CLUSTER39467_1
tttttttttttttttggccgcttttttttttttttttttaataagaaagtaatacgcgttcttgcgatggagcacatgtagtaagctaggtccaggcttcatgatatggctacaagttgtggaaggagcatgcaaaacagggcgcaggctgttaggacattggaatctaaacgggagatggctttgatttgatgccggggactgcactgcgtcgttgagccagccgtctaggatccggacacttcatctcccatggattggacttgctaggggcttcaccgcgcgcagcatttccttggcgcccccattctccggctggaccgccgcggaggacgcccccttctggcccgatatcgccgacgccagcgcgacgggcatgaggcacaggcccttgctctgcaggtactgcatcgccgtcgtcatgtcgctctccatcagctgcgccacctcctgctcgaacgccgcgccgtcccggacctcggacgacgacggcggcaggctgcctccgcgtgcctgctgctgcctgcctgagcctgacctaggggacagcagaagaccaccaccggagctctcggcctgagactgtgtaaggagcggcacgacggcttccgtcgcgcccagcctgctcatgctgagaaccttcacttgcagctggagaaatttgacgtattcgatgatctcgtcaagcatggatgccttgtcagtcctgttggagttcggaacgagctcctgtagattcttcatcctgtcagagatcttctcccttcggagcctctccgcaatgctgtgtggatcagttgcctggccccggcgagccctgacgcgcggcttaggagctccattcccagcagccccattggccggaaccatgaacggcggcgcattcagcccagttccgccgccgctggcctcgttagacgactgttcaagattacgcgttgcatcaaacgacgagagctgctgcccagagctcaggtgacgcangaccgctgagttccttttgactgagctgcagatcgccaaagtcaaggccaggangcgaacgacagcatctttccagtgttgaactcaacgtcatcctctacatgtagccgcgcattgcctatctgtggatacttgttcacgtccgcgacacaggaggatccacggacgagatcgttgtcgctaaccgcgccgaaaccgaagctccgcgaagtctcttccccggccagcgacgagatccgcgggaacgcggaaggccacgacgcgggctgctctcccaggactaggaaccgcggcggcggcggcaggccggactgctcgctcccgccgctgctgtcgttggaggagctgcacaccaccggcgcgctgtcggcgagcgataccgcgcagggcgcgctcaggaccgggcccagcatgccggccaccagcgcgctgttcacctcgaagccgaggccctcctcctgggtcacggtcacgtcgtcgcccggcaggtgcgcgctcaggaactgctggtgcagctccaagggcggcacgagcgccgtggaggagccgtcttggaggtgaaagcctgcgccttggcctggtgcagcctgagctcccaggtacgcgtacgtccctgcagggtcggcgagggaagtggcgccggcgccggcgcatggccaggatgagccgatgaacatggcgtcctgcggccatgcctgttccgggacgaaggggtccacgaacccgtccatcttgctggcttgtgggggtgccagttgacggagacgagggggggaagacaaccgcttcagctcccggtcctggctccgctttccgctggggatcggaacggacgagggggagaggcgcggttttgtttcttgtgcctgcctgcgcgcgtgtgtgtatctttgtgcgcgtcagtagtacgtgccttcgcttcgcgttcctttccctcgattttcttttccccggccggtctcgagttttctttaacttggtgttgtcagc

SEQ ID NO: 2582 - DNA, 1386 bp, Zea mays
  Clone ID: ZEAMA-23APR03-CLUSTER395102_2
gcgtgccggtgcctctgcctcctcccaccccttctcacgacctccctccggctccgggcaggacaccataccaacgaccgcccggccgcagccactgctctgtctctgtctcaacaacccgccgctaacgccacccgcacgttcaactaccaactgatcgagggggcgcgccggttgatcgggagcagatcgctcgctactgggacatagctagctagcttgtagtcgctcgctgcgcgtcctgctgccatgaccccagtcacggcggttgccatcgcatcggaggcgtgcgttctctcggcctccgcggtggcgtcgtcgtcgtccacggccgggaccgccgcggcgcgcgcggaggttccggcggccggcagcaccgatgagacgggcagcggcggcggtggggcggcggagcgccggtcccgcttccgtcggatctgcgtctactgcggcagcgccaaggggaagaaggccagctaccaggatgccgccatcgacctcgggaaccagctggtggagcggggcatagacctggtctacggcgggggctccatcggtctcatgggattggtctcccacgcagttcacgccggaggtcgccatgtcatggggatcattccaaaatcactgatgcccatagaggtaaccggagagcctgttggggaggttagagccgtctctggcatgcatgagaggaaggctgagatggcccggtttgctgatgcttttgttgcattgccaggtggctatggaactctggaggagttgcttgagatcattacttgggcacaactggggatccacaagaagccggttgggcttttgaacgttgatggattctacgacccgcttctgtctttcatcgacttggctgtcagagaaggtttcgtatcggaggcggcaaggcgcatcatcatctcagccccaacagccaaggagctagttatgaagctggaggactacgtcccggagtatgacgtcggcttggtctgggaggagcagaagcccaacagcttggtcccagctgctgggatcacctcatcctgatgatctctcaccttccagcctgcaccgcatcatatatacacatataactaagtaactaaccgatcgaagcctgccacaaattttttgttcatctgccaaagtcctaaccaaagggtaattcatcaaggcgtggtctattctcttctattctatgtgctggccggcgtagatcttttttgtttgttttggctagaattagtacttgcaagcagtagtgactgacgatgatgcatctccatgctgtttgggtgtgttgctgaattttgtattgcacgtggtgttagttatgctgcgtctgcgtgccctgtgaggttaaggaattgggcctgtttttgcttt

SEQ ID NO: 2583 - DNA, 1150 bp, Zea mays
  unsure (1)..(1150): unsure at all n locations
  Clone ID: ZEAMA-23APR03-CLUSTER395244_1
cctagctacttcaaccggcgccgtctctgtccccaaattccagcacgattcgccgttccggccttgccttgcgacttgcgtctttgcctcgccgacgacctctccttagtcctctccttccagacggtgactgcagacggccaagcagcaagctgctgcaagtcctgcgcacgaagtcggagaccctcgtcgggacacccctccagcagaggccaaaggttgcacgctcccacgggccacgactccagtgcttttcatttgatcaaatgatagctaaattgatggagtgtttctacaaaagaaaagcaccagaaccaaatagtaatgcaactgggggttcacctgaagatgatatcaattgggaagaggagattaaatatgatccgggattgaggaaattaatagatgagtaccatcctaatcagagagagagggtgagaagaaaatatatagatgagtgccatcagctctccctttacattaatgatgttcaagatgatgacaggttctccaatattcaaacaattgtggaactttctaaaaaatggtggagacagggaagcaacgctgctatcacctggtttatcgccttttaaagcttgtactagtattaccagttgctactgccacagttgagagatgcttctcagcgatgaaagttgtgaaaacttatttgcgcaatcgcatcggagatgagcacctgagtaatatgcttattggctatgtggaaaaagaagagatgatgaaagtgacaaatggagctgtggttgatcagttcataaaaatgagtgaacgaagatacgatattgattaaaaggccattggattactacttgttcaagtttactagatttcgtcattttgaggatcccgacttcatgccagaggatttcgagtaggatcatatccgcatccaggttgtgtcatagtggagccatggcggacgggatcgtcttcacaccttgttgattctcattatcatcttgttgactatgatagtgatcatcgtatggctgatgccgttgtaatctttagtttttcattagaagctttgtatgtgcctcgttccacttgacttatgatgtattgtatcgaaaactacgttttggtttttcaatacgttgtggtttaagcaaaaaaaaaaanaaaa

SEQ ID NO: 2584 - DNA, 807 bp, Zea mays
  unsure (1)..(807): unsure at all n locations
  Clone ID: ZEAMA-23APR03-CLUSTER395707_1
ttaaaacaactaaagtnccaactgncagatatgcaagtntacatttgtttaacaattgtcaaaaagatgttgcttagtaacttcttcaataatatgaatcnaatatgctatatattagggggnactggattcaggaattgtcaaatgnatttggttttttatagtttctttcaaacttttcagcctatgttcaatgtgaagttggttanagtttcagattttataatatctcatttgtcttgttctttaggttgcagtctgtatcagacctcatgtgttcagttagtgttattctgtcactaggatatgcatacaatattgtaattgagcatagtctgtttacttcatgttactctgttcgattaaatagggtagatgttactgtatttgagtttttagattaaaagatatagaagtttagcatcctccaaagttaaggtaggcaacatgtcattctatctcgctttttaatattgatcagctgtcgatcccgctttttaatattgatcagctggtttgggacgtaacatgtttgctgatatgtttatattattagcattggcaggctccttttcagatttttgaaccatggtaaaaatatacacacacattagttagtattatggacatggtaagaaaggttgcaggttgtaaattagacgtatctatcatgatccttccatagtttaccgtgtattatgtttttctgtaaagcatagaaatacttatttttttaacgcataaaaaatcaatgacaaagatgtagagtttttatgaaagtcaaaatggagatcaccgatttcccct

SEQ ID NO: 2585 - DNA, 938 bp, Zea mays
  Clone ID: ZEAMA-23APR03-CLUSTER39589_1
ccgcagaagctcggccttcccgtcggcaggcacgtgtacgtgtgcgcgtcgataggcggcaagctctgcatgcgcgcgtacacgcccacgagccccgtcgacgaggtcggccacttcgatctcctcatcaagatatacttcaaggacgaggaccccaagtaccccaacggcgggctcatgtcgcagtacctggactccctgccgctgggcgcgactattgacatcaagggtccgcataggcacatcgagtacaccggccgccgccgcttcgtggtgaacggcaagcagcgtcacgcgcgcaggctcgccatgatccaggccggcagagggaccacgcccgacgacgacacggagcaggccgtgctgagggaccagcccgacgacgacacggagatgcacctcgtgtacgcgaaccgaacggaccacgacatgctcctaagggaggagatcgaccgcgcttggctgccgcgcacccggcgcctcaaggtgtggtacgtggtcagcaaggtcccggaggacgggtgggagtacggcgtggggagagtggacgagcatgtcatgagggagcacctgcctctgggagacagcgagaccattgcgctcgtgtgcgggccgccggcgatgatcgagtgcacagtgcgcccgggcctggagaagatggggtacgacctcgacaaggcttgtctcgtgttctgagctctgaatagcggctaacggatgtcgtcaaggtgcaactgtacatagaaattctgtggtgccttgaatcttgaaccctagtaacgtgtcgatctagctagaactctaccgagttctcttgtaatactagcgatttaaactggccatggaagttcatactagctggtgccatggccgtcttgtcaagatgagatgtattggtcctactatatacagcgcaataaaaaccccaaggccattgt

SEQ ID NO: 2586 - DNA, 1984 bp, Zea mays
  Clone ID: ZEAMA-23APR03-CLUSTER3962_2
ctcgcgtggcgcaccctcgaccctacccgctccgcgctggcgcacgtgagcggcatgccgtctcagatcgggatcggcaacacccactccgtcactcccctacaaagatgttttctcagtcaactcgcctccccctactgtaggccgctgctgctcctctcctcccatctcaccacacaccgcagccccagcaagatcgcgcggaggccatggcgaagcccaagccttcctccgccggcgccaagccgaccgcgcctgccccccccgcctctccgccctccgcgccgctcacctacacctccatgctcgcgctcctgtccctctgcccgcccttcgtcatcctcctgtggtacacgatggtgcacgcggacggatcggtggtgcggacttacgagcacctcagggatcacggcgtgctcgaggggctaaaggccatctggcccatgcccaccctcgtcgcgtggaagatcatcttcggcttcggcctcttcgaggccgtcctacagctgctgctccctgggaagcgcttcgaagggcccatctcgcctgccgggaacgtgccggtctacaaggcaaatggcttacaagcatatgcagtgaccttgataacttaccttggtttgtggtggttcggtatatttaaccctgcaatagtgtatgatcacttgggggagatatactctgctcttgtttttggaagctttgtattctgtatttttctctacataaagggccatgtatttccatcttcatctgactctggatcctctgggaatgtgataattgacttctactggggtatggagctgtaccctcggattggcaagtactttgatatcaaagtcttcaccaactgtcgtttcggtatgatgtcctgggctgttcttgccgtaacctattgcataaagcagtatgaaatgaatggcagagttgctgattctatgcttgtgaatactgcacttatgttgatctatatcactaagttcttttggtgggaatctggatattggtgtactatggacattgctcatgatagagctggtttctatatctgctggggatgcttggtatgggttccatccatatatacttcccctggaatgtaccttgtaaaccaccctttgaatttgggcccccagctagcactctcaattcttctagctggaatgttgtgcatatacataaactatgattgtgaccgtcagcgccaagaatttcgacggacgaatgggaaatgctcggtctggggcaaggctccatctaagattgttgcctcttatcagactacaaagggagaaactaaaaccagtcttctcttgacttctggatggtggggcttgtcacgtcacttccactatgccccagagatactatctgcatttttctggactgttccagctcttttcaatcacttcctaccatacttctacgtgatctttctgactatattattgtttgaccgagcaaagagggatgatgaccggtgctcatcaaagtacgggaagtactggaagatttactgcaacaaagtaccatacagagtcattcctggcatttactgagcatctcgagttctggacgactcttgatattaagctcaacagatgccacgatatccagtcttcataccgatctgctactgattgtgtaatgtcgttggtaggcttgggctgtacgcagtattaggtgtaggcaacttggcttttggcatctaccttgtatgtgtcgtgtatctagggctggggcttgctccttcagttgttagacagtagggggtaatctcaggggtgcaatgtactccctccgtcctaaaataaaagcatatctagtatttaaattttgttccaaataaaaatgcacaatgaactataatatcgtgtaacgatgtctttgattgtgggacaaactagctggggatgatggtggatttgagggatatgaaaggatcatgatgttgaagaggaagggttaattgagcccccct

SEQ ID NO: 2587 - DNA, 1275 bp, Zea mays
  Clone ID: ZEAMA-23APR03-CLUSTER396693_1
ataaatatattttcttatattacctcctaataagaagtaatatgtgctagtgctatatatgaagcgcaccacagattgtgcggtggcggccagagcaaaggcgatcacggcaatgtcgtcgagcccatcgctgatctgctgctccatgtcgctcggcctgctctctctgctgctgcttctcttctcggcctgttacaccgcccccacctacgccacggactgcgaccccgcggaccgcgccgcgctgctgcgggtgaaggcgcagctcggcgacccggcgcagctctcctcatggctgccgtccactaactgctgcgcgtgggacccggcagtgttctgcaacgcggcgggccgtgtgacggggctggccctctacgccctgcccgacgtctcggcgcgagtcccgccggcgctcggcgacctcgcggcactcgagatcctccaggtggactctgtgccgggcctggcgggccccgtcccggcctccttcgccaacctcacgcgcctcctcgacctcgacatcgacggcacctccatctccgggcccatcccgggctgcctcctcgctgctgccgtcaacctgaggacgctcgtcatcgccaacagcaagctggccgggcccatcccgtcgtccctggccgcactccccggcctccggtacctggacctcagcggcaacatgctgagcggcgccatcccgccggagctgctgcacgggagctccaggttcctgatcctgtccaacaaccggctcacgggggagatacccggcgactacggcgacggcgacgtcgacaccatcgacctctcgcacaaccagctcaccggtgacccctcgtcgttcctgttcggcatcacgaagccggcggtcaagatcgacctgtcgtggaaccagctcgagttcgacctgacggaggtcaggttcccgcaccacctcaggttcctggacctgagccacaacagggtcaggggcagagtggccaagtcgctgatggacgtgaggctggagcacttcgatgtcagctataacgagctctgcggcgagctcccggcgggaaggttcatgtccatgcacggggcagagtgctacgcgcacaacaagtgcctgtgcggcacgccgctccctccgtgcaactgaatcactgcattggttcaggctgtgcaatgatcactggtttaatcttgtgcgaacaagttgttagttgtaccagaacagcgaatcagttggtcgggtatccacgctcaatgttggctttggtaaaaaaaaaaaaaaaa

SEQ ID NO: 2588 - DNA, 1596 bp, Zea mays
  Clone ID: ZEAMA-23APR03-CLUSTER39734_1
aaagcccgtcaaggcacgaggactgcaggagcagaaagttggcaaccctttgagttcctcactcacacgcgcgcgagccgagagagcatggatcccaacgacgccttctcggcggcgcacccgttccggtgggacctcggcccgccggcgcacgccgcgcccgcgcccgcgcctccgcctccgccgctagcaccgctgctgctgccgcctcacgcgccgcgggagctggaggacctggtggccggctacggcgtgcgcccgtccacggtggcgcggatctcggagctcgggttcacggcgagcacgctcctcggcatgacggagcgcgagctggacgacatgatggccgcgctcgcggggctgttccgctgggacgtgctcctcggcgagcgcttcggcctccgcgccgcgctgcgcgccgagcgcggccgcgtcacggccctacgcgcgcgccgccgccaccagcggcgccgccaggggagcgcgcgacgccggcaggcggcgggtgggcggaaccgccggcaagaaggtcaagggaggcgacgtgggcgcgaggaagggcaagaaggcgaggaggaagaaggagctgaggccgctggacgtgctggacgacgagaacgacggagacgaggacggcggcgggtcagagtcgacagagtcttccgcgggcggctccggcggcggggagaggcagcgggagcaccccttcgtggtcacagagcccggcgaggtggccagggccaagaagaacgggcttgactacctcttccatttgtacgagcagtgccgcgtcttcctgctccaggtgcagtcccttgctaagctgggcggccacaaatcccctaccaaggtgaccaaccaggtgttccggtacgcgaacaagtgcggggcgagctacatcaacaagcccaagatgcggcactacgtgcactgctacgcgctgcactgcctggacgaggaggcctccaacgcgctgcgccgggcgtacaagtcccgcggcgagaacgtgggcgcctggaggcaggcctgctacgcgccgctcgtcgagatcgccgcgcgccacggcttcgacattgacgccgtcttcgccgcgcacccgcgcctcgccgtctggtacgtgcccaccaggctgcgccagctctgccaccaggcgcgggggagccacgcccacgctgccgccggactcccgccgcccccgatgttctagcgtgcgtcgtcgatgtgtgcctgcaccgtcgccgtacgtctcacagttcctttttgttcaggctgttccatggcgccatcgaaaagtggaaggcggccttcgtctgcctctcatgttgtcgctttgttcgttgcgttgtggttagtcagaagtgggcttagatttagaatggggacgtcacttgttcggccgagcgggccgggaaacaatttactgtttcgatgggccacatgttagtttgttacctcgcggccttactaagttgtattgtatccctcgtgatagttgtcccccatcctccaaaaaaaaaacaaaacggtgtcccgctcctgtaataatatatcctaagagtaaaatacattttcattgcttcaaaaaaaaaaaaaaaa

SEQ ID NO: 2589 - DNA, 1306 bp, Zea mays
  Clone ID: ZEAMA-23APR03-CLUSTER39785_5
caatactaatatgccattttttcctcaaaatcaatgatatatggatatgctattttgtaaacattagtaaatatttgtaaatagtttatattggctaattattgataatagttgtcttcagatattctgcatcgtgcccctgacatagtagtcaacgacctgctgtaggggtaggcccttgtactccatgacagtggccacatcccacttgagcgtgcacgacacggcgcacgcgccgcatgtgtatgtgtcgaacctgatcagcggtgaatccccaatgcccccgagcatattgctcatcaaccgtatatggacatggccactgcacacccccaacgtctccgatgcgtacacactgatgggcaacccgttaatcaccatgctcgccttgtttacgttgtcactgtccacactattcgcgctacacttgtccatccccatcagtgggatgaggtagtcgaacaggatgttgccacctactggcctccttggcgagcttgagcatgctgaaggtagtcgaaaatttcaggatcactcaagtctcccaagtgtacaccggagaagtttgagaaaagtcccgatgatgaaggtggagagagctcatagattatgcggtacagtgacattggtgggacaaactccatcaacgtaatcaagcttccgacggaggagcacttgcttctgtctgcctcgagcgcggggacagcggcgaggatgaaggcaaaggggcaggaggcgagtggcgtgggggagtagggcggcgagcattgcagacgccggatagggaggggatagcgacgaccgttgatggcggcaacgaaagcgtgaccaccatccgggatcaaagcggagcggaggatgtcgggggtggaggcagaaccgtgcaccacaccggtgtggatgcctacgctctactcttaagaagtagtagagataatagatagtgggcacgtaagaatgagaggtattcagtaatgtgatgcatatggcaatgcactagtaaaaaacaatgtatttattctgaatgattggtttcccttgggaagggagctttaagggggccccccccggggcgttggccgggcgggctgaaccaaaggcacgggcccttggggcgcgaaccccctaacgtgggtcggggcgggcgggaaacaaaagcccccgttgctaacttggattctgacttaaaggggttcaatcataaaccggcacacgggagcttcgccccactggcttttaaaccaagcgcgaagaccaattgggggaaaaaacgggtcctctcggactagggtgaaatactatcgcg

SEQ ID NO: 2590 - DNA, 1484 bp, Zea mays
  Clone ID: ZEAMA-23APR03-CLUSTER397975_1
gttaggaatttgatggcaatcaagtttagttaaatttaattttcaaggctaggattctatgtgcacagccctgatatgcaccggatatcatcccgaatttatattgttatacatatacgaaaagcagtgaactctgctctgcaatcgtctgcatcgtcgtccttgctctctgttgcggcgacacgcacaggccagagcccgtcgggatggaaggcggcggctccggtgggcgggccgctgccgtcgtccccgcgcgtatgaccaccttgtcccggcactacttcggcggcagcgcgtctgagcgccaccacgacctccgcgtggacatcgtcgagtcgtgacagcgtctttgaagcatcgggcgcgtcaaggcggaagttgcaatgctgctgcctgatggaacgccgaggaagtgcttgatagattgccgccaaggcgtttggtacgtcgtggtgcggtgctacatgaagcacgagccagtggtttggattttcgccctcatgggtctgctgttgtgctcttgtttccttattttcttttggttgagtttacattctacatagctccgatcatccaggaggaatacggaatgtttgtctggcaatgtagtctcatccttgccgaatatgtgtggcaccacagatcacggttcattgcttccagagttgttgagcttggtgctgggacctcactgccaggattagtagctgcaaaggttggggcagatgtaacactaacagacattgcgcagaatgcagaagtactgaacaacatcagaagcatatgtgctctcaatgacgccaattgtactgtttcgggacttacatggggagactgggatgaatcggtatttgatttacatcctgacattattcttggagctgatgtactttacgactcagcaaatttcgatgatctgttcgcgacggtgacctttcttctcgaaaattcttctggggcggttttcataaccacataccacaaccgcagtggtcatcatctgattgagtttttgatggtcaagtggggtttgaagtgtttgaaactgctggatggtttctccttcctaccgccatgtaaggctgctttacttcaggggaatattcagcttgtcgaaattgcgcttgacaaggaaaaacataaatgaccctgagtttgattacaggagttgacgaaaagcacagagaaatggaatgccatatttggtcctctgcatacatgtacgagcaactccatgtcaagccatccgtttggactgtcatcataaggatgttcttttaattaaaagaaactcatggggagcatcgttgttcgaatagcctatgcatgcaagaaaaaacagaaaatgttagcagatatgtactcttttgtgacatctgtacagaacatgttggtttcctgaaaaaagatgcagaatgtccttttcttgatgtattcgaaaaaatgagctaaatgcataactttacacaaaaaaaaaaaaaaaa

SEQ ID NO: 2591 - DNA, 1089 bp, Zea mays
  Clone ID: ZEAMA-23APR03-CLUSTER397975_2
atacgaaaagcagtgaactctgctctgcaattcgtctgcatcgtcgtccttgctctctgttgcggcgacacgcacaggccagagcccgtcgggatggaaggcggcggctccggtgggcgggccgctgcgtcgtccccgcgcgtatgaccaccttgtcccggcactacttcggcggcaggcgtctgagcgcaccacgacctccgcgtggacatcgtcgagaacatccaggaggactacggcatgtttgtctggcccatgcagtgtcatccttgccgagtatgtgtggcagcacagatcacggttctctgcttccagagttgttgagcttggtgctgggacctcactgccaggattagtagctgcaaaggttggggcagatgtaacactaacagacattgcgcagaatgcagaagtactgaacaacatcagaagcatatgtgctctcaatgacgccaattgtactgtttcgggacttacatggggagactgggatgaatcggtatttgatttacatcctgacattattcttggagctgatgtactttacgactcagcaaatttcgatgatctgttcgcgacggtgacctttcttctcgaaaattcttctggggcggttttcataaccacataccacaaccgcagtggtcatcatctgattgagtttttgatggtcaagtggggtttgaagtgtttgaaactgctggatggtttctccttcctaccgccatgtaaggctgctttacttcaggggaatattcagcttgtcgaaattgcgcttgacaaggaaaaacataaatgaccctgagtttgattacaggagttgacgaaaagcacagagaaatggaatgccatatttggtcctctgcatacatgtacgagcaactccatgtcaagccatccgtttggactgtcatcataaggatgttcttttaattaaaagaaactcatggggagcatcgttgttcgaatagcctatgcatgcaagaaaaaacagaaaatgttagcagatatgtactcttttgtgacatctgtacagaacatgttggtttcctgaaaaaagatgcagaatgtccttttcttgatgtattc

SEQ ID NO: 2592 - DNA, 2447 bp, Zea mays
  Clone ID: ZEAMA-23APR03-CLUSTER39805_1
gggtgggggagggagtggaatgggtgggttcccggaagccacgggtaaccttctcgatgccgcagctcaggagttccaccctacggtctgtgccccctatcctctacagccgcttccgcaacagctatactgcccccacccatatccagccatgccggtgcctccgccgccgcaaatagccatgttacagccagtgcctccgatggcgatggccatggcgccgcagccggggtacaccttgccaacgacgacgccggtggtcaatggcccgtcgagccgcgtcgtggtgctgggccttgtcccgccgcacgcgcaggaggccgacgtggcgcaggcgatggcgccattcggcgcgatccgctcggtcgacgcgtgcgcggtggcgtccgagggcgtggccaccgtccatttcttcgacatccgcgccgccgagctcgccttgacctgtgtccgcgagcagcacatgcgccagcagagccgcctcgggcagctctacgcggcggccgccgtagccccggcgtgggctcctgcaccgacgccccaggcctgggactggccccaccccaacgacgacggccgcggcctcgtcctcgggcacgccgtgtgggcccacttcgccaccggcgccgacgacggcgacaaccgcggctccctggtggtcctgagccccctgcccggcgtctcggtcgctgacctccgccaagtcttccaggccttcggggacttgaaggatgtgagggagtcggcgcagcggcccagccacaagttcgtggacttcttcgacacgcgcgacgccgcgcgcgcgctcgccgagctcaacggccaggagcttttcggccgccgcctcgtcgtcgagttcacgcgcccttccggccccgggccccgcaggcgcgggtacgcaccccaccagcaccggcccaccgcgccgactccgccgaggcttcaagcgacgtggcgaccgtcccaaccgacgtcgtctcagccgccggcatcctcgtcgtcgtccggttccgtaagggcgagggaaggagtggtgcttctgaggaggagctcctgtaagtctagcgcgggcagcgaccagtcgtccaagggaggcaatgccggaacgagccatgagcgcaagaccaagggcggcaagatcgtggtggcggcggcggcggcatcctcgtcgaccccgacagcgtccgggaagcaaacccagaaaggcgtcgggagcagcggcggcgggagctggaaaggacgaaagagcgggtgggaggcgcgcttcctgttcaaggagcccgaggccggcggcggcgccgacacgcaagcaacgccggcttcggagatggatacgaggaccaccgtcatgatcaggaacataccgaacaagtacagccagaagctgctgctcaacatgctggacaaccactgcatccaatccaacgagtggatcgtggcgagcggcgaggagcagcccttctccgcctacgatttcgtctacctccccatagatttcaacaacaagtgtaatgtgggctacggcttcgtcaacctgacatcgccggaggctcgcgtgcggctgtacaaggcgttccacaagcagccatgggaggtgtacaactcgcgcaagatctgccaagtgacatacgcgcgcgtacaaggcctggaagcgctgaaggagcacttcaagaactccaagttcccgtgcgacagcgacgagtacctgcccgtggcgttctcgccggcgcgcgacggcaaggagcttacggatccagtgcccatcgtgggccgctcgcccgcggcgtcgtccgcgtcgtcgcctcccaagagccgggcggctagcgtggaccggcttgggcaggagctgatgccggcgccgtcgtcatccgcggacggcgcgtcgtcgaccactacgtccacccacgcgccgtccgaacacgacgaggaggaggaggagggagacatcaggctcgcaggcgagctgcggcggcttggctacgacgactagctggctccgatcctagctgcagctaggcgggcgacgcctagctcagcaacgatcggcatggcgtggcgtcgcttcgagaagcgcggaggcagtagtgacttcggccaagcttttcacagatccgtagcgctcgctcctgcacgcgcaggcgaagcaagtgaagtggactgggacttgactttggagaagcaaaagtgagctgatgttcgttggttcgtagacgctgcgcacagcaggtgtggagtcgtgttcttttggattttggtttgaagtttcctactacttgtttctttgaaacttggagctatagctagcttaggcttagctaggactgctgggaggggaaagggcatgcaggggactatcaattcgtggttcgtcatgcgctcgttctttacattaaaataagattgttattagtacagctttacaataaaaaaaaaaaaaaaaaactcga

SEQ ID NO: 2593 - DNA, 1660 bp, Zea mays
  Clone ID: ZEAMA-23APR03-CLUSTER398236_1
ctatctttttcccccctcgagatgcatctctacatatagcacacaagacagagagtgagcggagacgaacaacgcccgcgcagaggccggggctagctagctagctcctccgatggccagccgtggcggcgcatccgtggtgctcgttgtcctgtgcagctcgctgctcgggttcgcgccgcggccaggtgcggccgggaagccgctcgtgccggcgatgttcgtgttcggggactccctggtggacgtcggcaacaacaaccacctggccagcgtcaacgacagctgcaaagcgaactaccggccctacggcgtcgactaccaccccgggcagtcaccgaccggccggttcagcaacggctacaacttggcggaccatctagcacgatggctgggctttgccgggagcccgccacctttcctctccctggcgaacgcgagggcgaggcacactcggcggacgacggtgagcacgggcatcaacttcgcgtccggagggtcgggtctcctccctacaaccggcgattctgtgtgtggcggcgcggtggtttccatggccgagcaagtcggcaacttcacgagcctcgttcggacgacgacgtgggaaggcagcaagagacgggagcggacggcgcccggtctcgtctccgagtcgctcgtcttcatcagcgtcggcagcaacgacctgttcgagtacagcgacttcttcgcagaccctaagaaccgcaacgttagccgcaacgacaccgcgtttctgggagggctcgttgctctttacgcgacctacgtgaaggatctgtacgccgccggggcaaccatgttctccgtcgttagcccgtcgctggtcgggtgctgcccgtcgcagaggaagatagcggaggacacgcacgacgtggacggcttcggctgcctcgggcacggcgaacaacctctccaggcagctgtaccccatgatcggctccatgctggagagcctcagccaagacgagctgcccggcatgaagtactcactcggagacgccgtcgcgatggcccagtggatattcacccacgctagcacacctcccaacaacttcactacgcccgaccgcgcgtgctgcggctcaggggatttcggctcgggcgcgtgcaacagttcggctccgctgtgccccaaccggagcagcttcttcttctgggacaggttccaccccaccgagacgttggcggcggtcacggcgcagcagctcttcagcgacaacgggaccttcgtccacccgatcaacgtgcagcagctggtggcgccgtcgtcgcggccatgagcagcatctgttttggctctgattgaatgctcatgcatgcttcgatgatacgtatgatatactatcgctgcaactgtaataatgataataataagcatcagtaagtacgtgtgtggcaactattttaagagattggtttaagctaaaggctgtagagattcttgtcggcgtcgagaaggttctcagggcggcgcgttcgtgaccgaagattcctatatgcactgatatatacctgttgcttgccaaaaaaaaaaaaaaaaaaatgttgtggtgtgtgtgtgtgtctctctctctctctctttatgtgtttttgctgtaattatattcaggcctacgtatcgcgttcgcgtggttgttgt

SEQ ID NO: 2594 - DNA, 738 bp, Zea mays
  Clone ID: ZEAMA-23APR03-CLUSTER398312_1
aacgctgcacgacgctagaggaaaacgcactgcccacggccaacggagtcaggtgcggcgggaggtagcatgagggagcagcaggattccggcgacgtgacggggcgccggggcggggtcatcaggtcgctgctgggcgtcgagcgccggcttgcggagggcgacgcggacgccgagggggcgctcggagcctcctcggagaagcagcatttggccgcggacagcggcgaggagaggaaggcggtggtgagggtggtggcggctgacatgccgcccgcgctgcagcgccgcgcgttccgctgcgcccgcgacgagctcgcggcgatgccgcacttcccgcgccggctcgagcccaagcgcctcgcgctggcgctcaagaaggagtttgatactgcttacgggccagcttggcactgcatcgtggggacgagtttcggttcgtatgtcacgcacgcccggggtggtttcttgtatttttccgtcgataaggtctacatcctgctcttcaggacagccgtggagccctcgaatcattgacggccaccggcctgccagcaatggacaaatggctcataaaaacgcgcagttcttgggacagcttgcaccaaattcagttgttcagtcagctaggccgagcccttgtaacttgtaaatcgcattgtttcttggtaggcaaatgtaaactactccttatgcttctgataaaatttaacatttcagtcaaaaaaaaaaaaaaaa

SEQ ID NO: 2595 - DNA, 1036 bp, Zea mays
  unsure (1)..(1036): unsure at all n locations
  Clone ID: ZEAMA-23APR03-CLUSTER399099_1
anngaaggnntcggtcgccttttnatantccccagctggccgccggggctagagcggagatataaatggtgctcattcgggcatcttcgagtcggtaccgagccccccctcgagtttttttttttttttttttgatatgaatagagatttttatagaggaaatgatagaaaaacaaaccttcagttttttcactttggcaaaataattacttaaatttacattgaccatacaaaattgggttccggatagtcaacattgaatattccagaaaaggatttaagcatcagtgaagcttgggggcttgtaggcaatgaaactgatgcactggacttgacgggtgttgtcgaatccgatgatcctaatgaaggcgcccgggtactccttcttgcattcttcaacttccttcaatacttgagcagagtcggtgcatccgaacaatggaagcttccacattgtccagtaccgtccatcgtagtatccgggagtgtttccgtgctcacggtacacaaatccgtgctccaactcgaattcaacacaaggaatccacttgttgcggagaaggtagtcaacttccttagccaattcgacgtcagtaaggtcagggaggtaagatagagtctcaaacttcttctttccgattggtggccacaccttcatgcagctaactcttcccccattgcttgtgatggaagtaatgtcgttgttggccttgcgggtgaccgggaaagaagcggatgacttcaaaccagtgaatggagcgaccatggtggcttgagccggggaggtaaccacagcggcagaggagagcatagaggaagccattacttcttcttcttcttcttttgcttcttttgctcgtttacttactgatttgggggggggggggccccccccttctcccttcgccttcgcctgaatcccccctcgaccccatttctgggcaactccccctacacccccccccccgcctcgatacctcccctttttcacccccaccaatccagggtcaactttccatgttctggcaaaccaggg

SEQ ID NO: 2596 - DNA, 1290 bp, Zea mays
  Clone ID: ZEAMA-23APR03-CLUSTER3991_1
gtccacagcagagtagagtagcacacgcactcgcctcttgtgtctttctttgtgagctgtggtgtggtggtcgagacacacacagcagcagcaacaacaacatacatacatgcacgctagcctcgcctcctacgccgcggcagctatgccggcgctggacctccgccccgagatagcgcacgcgcaccagcccgtcatgtcgccctctcaccacggctgggacggcaatggcgccacagccgtgcccacaccgatgcccaagaggctggacgggaaggtggccattgtgacgggcggcgcgcgcgggatcggcgaggccatcgtgcggctgttcgccaagcacggggcccgggtggtgatcgcggacatcgacgacgccgcgggggaggcgctggcgtcggcgctgggcccgcaggtcagcttcgtgcgctgcgacgtgtccgtggaggacgacgtccggcgcgccgtggactgggcgctgtcgcgccacggcggccgcctcgacgtctactgcaacaacgccggggtgctgggccgccagacgcgcgccgccaggagcatcctgtccttcgacgcggccgagttcgaccgcgtgctccgcgtcaacgcgctgggcgccgcgctcgggatgaagcacgcggcgcgcgccatggcgccgcgccgcgcggggagcatcgtctccgtcgccagcgtcgcggccgtgctgggcggcctcggcccgcacgcctacaccgcctccaagcacgccatcgtcgggctcaccaagaacgccgcctgcgagctgggcgcgcacggggtccgggtcaactgcgtctcgcccttcggcgtcgccacgcccatgctcatcaacgcctggcgccagggccacgacgacgccaccgccgacgccgaccgagacctcgacctcgacctcgacgtcaccgtgcccagcgaccaggaggtggagaagatggaggaggtggtcaggggcctggccacgctcaagggccccacgctcaggcccagggacatcgccgaggcggtgctcttcctggccagcgacgaggccaggtatatatcgggccacaaccttgtcgtggacggcggcgtcaccacatccaggaacctcatcggcttgtgaatcaatgtcaatccgttccaaatatcccattcccatggctaggctaattagagaaggagagagagaaaactgctattagttgtacttgaagtgatcgattttcatttggttgattgattcatcaacaaaagtgttccagcaacaagaaagagtaaaccctcgagccgaat

SEQ ID NO: 2597 - DNA, 1293 bp, Zea mays
  Clone ID: ZEAMA-23APR03-CLUSTER399320_1
cccccccgcccccccgcgcggggtcttcccctccgctggccttttttttttgtgggtggttcgccgcgcgcggttttttcccccctccccccgcggcgtccaacgcgccccccccccgccccaagccccgttcctgatccccccccccccctcgggggcgggacgtcgggtcccccccccccccccccccaacggggctattctcctcttcgattggctccccggcccgcgcggccggttctgtcgtgttttgtacctttgtttacccttccgcgtgagtgtgtgccaccccccccccgggcgtcttttaatacaaccaacgtgacttcattcgtaaaaaagccccgatcctgatcgtcctcccatgtacatgtactgtacgtctgtacccagtaatatacaataccaacggggctattgtgcaaattaaaaagatcagccaaaagggaagcgtattatacaatattttgcagttctagtaacccttccgcataaatatgtgcaacaccgagcccaagcacctgcgactgctagtcttccagctcaacaagctgagcccgtctctcggcagctttcctcctgacaaagataccccaccgcatcgcagccttgatcttcagccacccgacaacagctttgccggacgagcgagcgcggtcgtcctcatcaaatccgaaggctggggcaggagacgggtatgaaagaaagccgtcaacgttgttcaggccggtcggcgccccgcccacgctcaggaaccgcagcatatgctgcatctcatcgttctccaatagctcgtggctcctcgcccttatctcatccatcaagtactcatcgacgctgctctcctgcaaccgagaccagtcggcgaaagggttggtccctgaaggctgtgtggactgacctagcccagagaagtccaagttttgaggctgctgcgttggccgcagcgcaagcatgttggagcttcgtgaagtttgagtctgcacggaggaaccaccactgaactggcctccggggatcaatgacctcgtgtcgcattgcatggtaatacttggtgtcatgtgctgaggattgcctgcatactctcttgctacctggttccccatggacatggatgggattctagttctatcttggctagcattgttcagggaagattgctcagcattcacaggacctccaggcagttcggggggggggggggggggggcttagaaacgtttctcccggcgcaaggccccaacccccgggggggcgccctgggggcgggagcgggcgccccccaccttgcgc

SEQ ID NO: 2598 - DNA, 3880 bp, Zea mays
  unsure (1)..(3880): unsure at all n locations
  Clone ID: ZEAMA-23APR03-CLUSTER39950_1
acggatacctagctagtgatattcatgaaccctgtggcctgacccagtgccagctcgttgacatgaaggcttaccgtccgatacgagcactccaaggcgatccaacggccgcgatctggaggaacggtctcctaacctccgatatttcctttctcccttatcgccttcgcctccgcggctccgcctcgctctccaaggttctgccgaggtttctcgcctccccgctcccccctctccgagtctccgtccttgccactcctcctcccctcttccacctcaatccaatccgaccctcaccattgtagccggaactcgcagcgggacactaggccgcgcatgccgctcctcctctaccccttctccgcgtgcgtgccgccgccgcgggcgctgctccgccgcctgtcgccgccgccgcccatggcggtcgtcgctccgctgccttccgccgtccgtataatcccctcggtgggaacgctcgaccttccggcgctcccgcccccgcccacggacgacttccactggctcgacctattcgcgttcctcaactcccctgccgacacctaccaccagatccccgcgcagggcgaagaggagctggaggcggggctggaactggaactggagctggagctggagaagcacgccgaggtggagaggcagcgggggcgggcgcgaagagcgcaactccggcggctgcggcagcggcaggtcaaggcggagacggaggcctgggcgcgggccgccgaggagtaccgcgagatcgagcgggagatgctcgaccgcaggctcgcgcccgcgctgccctacgtaaaggcgctcttcgtcggctggttcgagccgctgcgggacgccatcgccagggaccaggacgtgcagcgaaggaagcgggtcaagcacgtctacgctaagtacctgcttctgctcccagccgacaaggtggccgtaatcgtcatgcacaagatgatgggcctgctcatgtccagcaaggacggcactggcagtgtccgcgttgtccaggccgcgcactgcattggtgaggctgttgagcgcgagttcaaagtccagtcattctttcagaaaagtaggaagaagaaaatccaaggtgaaaatgatccagcattggagaaggagcaagctaaatgccgtaagcgtgttaagagtttagttaagaggcggaagatgagtgaagcacagaggctagttcaacaggagttggaattggaggaatggggcacagaagcccaagtgaagttaggaagtcgcctgattgaattattactagattcagcatttgtgcagccaccagctgatcagacaccagatagttctccagatattcgacctgcatttaagcatgtgctacgtcagcctataatagaaaatgggaggctaaagaagaagcattgggtgatagagtgtgaccaccttgtgcatgaggggtttgaaagcactgctcggcatgttgatataccctacctccctatgctggtacctccgaagaaatggaaaggttatgataaaggtggtcacctttttctgccctcatacattatgaggacacatggtgtgaaggaccaaaaggatgcaattaatagtgttcctagaaaacagctgcgaaaagtatttgaggcattagatatccttgggagtactaaatggagggtgaatagaagagttcatgatgttgttgagactatctggagtcaaggtggaggcattgcagggctggtggacaaggcaaatattcctttgcctgaacgaccagaatcagaggatcctgatgaaatgcagaaatggaagtggagtttaaagaaggcaaagaaaactaaccgtgaactgcatgctgagagatgtgacactgagctcaaactctcggttgctcgtaaaatgagagaggaggatggattttattaccctcacaatttagatttccgtgggcgtgcataccctatgcatcctcatttgagtcacctaggttcagatctttgtcggggtgttctagagtatgctgaagggcggccactaggaaagtcagggttgtgctggttgaagatacacttggctaacaaatatggtggtggcattgaaaagctttctcacgagggcaagctagcttttgtggagaaccaactgtttgatatatttgattcagcagcaaatcctgttgatgggaactgctggtggacgaatgctgaggatccctttcagtgtttagctgcatgcatggacctttctgatgccttaagaagtccatcaccttaccatgctgtctctcacctgcctattcatcaggatggttcatgcaatggtttacaacattatgccgctcttggaagggactatatgggcgcggttgctgtcaaccttgttcccggagagaaacctgcagatatttactcagaaatagcttctagggtactgaatgttgtatgtgaagactcgatgaaggatcctgctactaacccaactgcttcattagcaagagctttagttgatcaggtggataggaagcttgtcaagcagacagtcatgacatcagtctatggtgttacatacattggtgctcgtcagcagattacaaagagactgcaagagaaagggcttatcacagatgataaattgctgtatgatgtatcctgttacgctactcgggtaactttggatgcactgggacaaatgttccaatctgcccgtggtataatggcctggcttggtgactgtgcgaagatgattgcttcaaaaaatcaaccagtcaagtggacaagtcctgttggtctcccagttgttcagccctacaagaaatataagaattatatgatacgaacttctttgcaatgtctggctttacggcgggagggtgatgcaattgcaatccaaaggcaaaaggcagcttttccaccaaattttgtgcactcactggatagttcacatatgatgatgacagcgattgcttgcaaggagtctggccttcattttgcaggagttcatgactcattttgggtgcatgcgtgtgatgttgatcaaatgaaccagatattgagacaacaatttgtggagctttacagcatgccgattcttgaaaatctgctggaggagttccaaacgtcattccccacactagaatttccaccctgcccaccgcaaggtaactttgacgtgagggaagttctgacttcaacatacttcttcaactaagcttaacaggggcaagttctgcacatgaaacatggtgagaagttgtgtccttggatgtttggagtaaccagatcgtgaaatcattctatgcttgagccatatataggagttgatactgaactaattctcggatggcttttagcataagcaagaaacatgagtcaatcaattatctgcactccagaccaagccaagtggttccaaggaatttgaaatgaacaaacctaaagtagttcctgctgagtttttaggttgatgcagaatctgcttggatgttcaggtcactcattggttgccatgacaactcatggtatactccaccctggagtgcaaaggtaaattatgagatgccagagcagaatactgactgacagttgatcgtgctgacctcattgatcatagacgacagcggaacacaaagttcgctgaatatacgtgtacgttgtaccatcaattttttttgctgtcttaggacttgtagatcgcataatgccgtggcatcaccctgtaataaatgtgtaagatatgatagccaaatagatgtatacgagactagttgctgttgacagcaagttttgaaaagagagacatgaatcaggcagacttcaccggttcactgatgttctgatctcttcctgaaataatcgtagtaccttcattttggtcttaaaaaataaaaaaaaan

SEQ ID NO: 2599 - DNA, 1949 bp, Zea mays
  Clone ID: ZEAMA-23APR03-CLUSTER399_1
gtccactgcgactgtgagcttcgttcgttcagttcatccgtgttcttgtttgcgaggtcgagaactacccatgcccagttctccctgtccaccggccgccgcccccgctgccgtgcgcttaatcctaccgcacgagaccattacctagaacatcagaagcgccaaatccaacggagtagccagcccactcactacccatgcccagttctccctgtccaccggccgccgcacttgctcgaccgccgccgccgccgtgcgcttaatcttacccctgtctgtctcctcatccagtgcaaggaacgcccaccgctgcctgtgtcgtttggtcaccggagatggatggggatgaggagaacgtcgggccgttccgccggactagcgcgcgcacgcgccgcatggccacgcgcatggcgtccgcgctcgccagctcggacaatcgcgcccaggtaacggtgggattggactggttgctcctcttcccccgctgtttccctacagtttgtcaattccctttcgtctacgagtattcactgtgttgaaattagaattgctgttgcagagctcactctatattttatctccgcacgtgctggggtcaaaaaatactatccaattctatctaggagtatcaaattgccatatcaagcattggccttatgtttttttttctagaagaaggattggtctcatcgacaagtagttttggtaatactattacttacgcctatgaactagagcaaatagttaggtgtctaaaaaattgatagtagaattagctaactaacaaatagtttactaactattagctaattatagctgggttgaaccaactaataactaaactaatggatagttgagggtgtagctaatggttagctggactattagatgagagtgtttggatgtctctaactaaaaacaaataatatctaaactattagttgggttattcggatgtcttcagctaattttagcagctaattattagctctagtgcattcaaacagggtctaagtatagactctagaaaaaaaggaacatatttctatcctgggtttacactgcttattatgtgccatgtgtattgttgtacctgtgccttctcatgactccttaccaaaggatttgaggtgttaactcagattccattcatattgagaccattttgtgcttataggttgctgacttgctgatcaattactgtgtctgaaactattctcctttatgttttgctgcctcattatggaaacacctctgtatctgtaatgccattcaggctgcattagctcgccttgaagctcttgagagcgataatggtggggtcgaggtggtagatcttaatgatgatgagtacggatccacggatgaagaagaccctgttctcatgcaaaaaaagcagtccaagatcatgaaacgtaaaacaaggcaagggaaagctttggagaagagggcagcaagatcactcatggatgtgctacaagaagcaaatttggagtccgttcctcctcatgtgccaacatattcaagggctgctgtgggtccaccgagcacttcatctcgacgccactactgctcagtttgcggtagctctgcaacctacacatgcgtgaggtgtgggacacggttctgttcatgccgctgtcaagtcatacacaatgatacacgctgcctgaagtttgtggcttgatcggctggatatgtataagctacatttgatgtatgtccacatcctaatggctgttcatatgtgctctgatcagtatgatatacttgctgactatgtatcctactctgtaggtgggggtgggtaagttgtagaaaaccattttctcagtagtgtactgcagttgcaccgaccacttttgtttttttttcccagaaatgttgtgcgagcttcagttatgcagtagagctgaaagtagctcttggttccaaaaaaaaaaaaaaaa

SEQ ID NO: 2600 - DNA, 1470 bp, Zea mays
  Clone ID: ZEAMA-23APR03-CLUSTER40062_1
agcagttcacagttaagtcttctcattcccatcatctctcgccatgcgcccaacacgctccgctgtgtcggctacggcgctgctcctgcttgccgtggcactggcactggccgccacggcggcggcccgccactcctacaccaccaccaccacccgcgtcccggcgccagcggagcgggcggacgaggaggtgcggcgcatgtacgaggcgtggaagtcgaagcacgggcgcggcggcagcagcaacgacgactgcgacatggcgcccggcgatgatgagcaggaggaggaggaccgccggctgcggctggaggtgttccgcgacaaccttcggtacatcgacgcgcacaacgcggaggcggacgctgggctccacaccttccgcctcggcctcacccccttcgccgacctcaccctggaggagtaccgtggccgcgtcctcggctttcgcgcccgcggccgccgcagcggcgcccgctacggctccggctacagcgtccgcggcggcgacctccccgacgccatcgactggcgccagcttggcgccgtcaccgaggtcaaggaccagcaacagtgcggtgggtgctgggcgttctcggcggtggcggccatcgagggggtgaacgcgatcgcgacgggtaacctggtgtcgctgtcggagcaggagatcatcgactgcgacgcccaggacagcggctgcgacggcgggcagatggagaacgcgttccggttcgtcatcggcaacggcgggatcgacaccgaggccgactaccccttcatcggaaccgacggcacttgtgacgccagcaaggagaagaacgagaaggtcgccaccatagatgggttggtggaggtggcgagcaacaacgagacggcgctgcaggaggcggtggcgatccagcccgtcagtgtcgccatcgacgcaagcgggcgtgcgttccagcactacagttcgggcatcttcaacgggccatgcgggacgagcctggaccacggcgtcacggcggtgggctacggcagcgagagcggcaaggactactggatcgtgaagaactcgtggagcgccagctggggcgaggccggctacatccgcatgaggcgcaacgtgccccggcccacgggcaagtgcggcatcgccatggacgcgtcctaccctgtgaaggacacctaccaccccggcaccggcaccgccacggctagggcagctgccatggatgtgatcaagatggttcttgcttaggagggagcgagcggagcaggcagcagagagccgagggtcttgtcgtgttgaactttacatagggtagctaggtaccactggggataattaagttaatccgttatggtgtggcaagttaattaatatgtgcgtatctcttttgatgagtggcatatatgatgtaatgaagttacataaactcaaataaagtcgtaatcgtaatggtaaaaaaaaaaaaaaaaaactaaaaa

SEQ ID NO: 2601 - DNA, 2448 bp, Zea mays
  unsure (1)..(2448): unsure at all n locations
  Clone ID: ZEAMA-23APR03-CLUSTER4007_1
gcacgagaccattacctagaacatcctaatcgaaaaaccgagcctcccagtcccagtccgcgcgcccggcgcctccctcgaacgagggccgtacctagcgcctctgtcctccgtcggccgtcgcactgtgcccccgtccgcctccggcctccgccaacccgcgtccgcccacgactaggcggctctgggcaggtccttccacaaagatgtgaaggattaaagctcatgtgaaagattctaagactacaattggtatcaagcggttgctttcttatttctcatacgctcaaccatgctcctgcatgctaaggattcagttaggaagatgcattcagttgctaagaactactttgtgtctgatcttactcatcctccaagatccttgaacagagcttccagacatgttgttccattcaagacccgtttctttactcattgctcacttgagagccgttcagttgaccaagagattgtgattgctatgggaagcaatgtatgcgatagagtcagtacattcaacagggcattgcagctgatgaaaagctcagacgtgaacatcactaggcatgcctgtctctatgagaccgcccctgcttatttgactgatcagccgcggtttcttaactctgccattcggggcacaactaggctcagcccacatgagcttcttaaactgctaaaggaaattgagaaggatattggccgcactggcggaataaggtatggcccaagacctatcgatctagacatacttctttatggtaactcccagatccatagtgagactctaattgtgccacatgagcgcatccatgagaggtcatttgttttagcacctcttgttgaccttctaggtgcatctagtgacaacggtatcgaaacaagttggcactctctctcaaagtgcagtggaggtttctttgagttatggaataaccttgggggtgaatctataattggaacagaaagcattaaaagggtattacctgttggggatcgtttgttggattggtgtgagaggactctggtcatgggggtccttaatttgacaccagacagctttagtgatggaggtaagtttctagaagtgggagctgccatttctcaggctaagtcattaatctcagaaggtgcagatatcattgatattggtgctcaatctaccaggccctttgcaaaaagattatctccaaatgaggagcttgagaggttggttcctgttctggatgagattacaaaaatccctgagatggagggcaagttactctcagtggatacattctatgcagaagttgccagtgaagctgtgaaaagaggagctcacatgatcaacgatgtatccagtggacagcttgatccaataattcttaaagtggcagctgaacttggagttccatatgttgcaatgcacatgaggggagatccgtcaactatgcaaagcgaacaaaatgtacagtatgataatgtctgcaagggcctggtagattgagcgccaatatcaatgatatgggcaccttctgagattaatgactccacctggcaatggcattcttcttctactgatgaacacatcactaatgtattttggggattgagctgttccttaaagtggcagctgaacttggagttccatatgttgcaatgcacatgaggggagatccgtcaactatgcaaagcgaacaaaatgttcactatgataatgtctgcaaggaagttgctttggagctatacacacaggtgagagaagcagagttatctgggattccattgtggaggctggttcttgatcctggcattggcttctccaagaaatctggacataaccttgaagtaattatgggattggaatccattaggagggagatgggtaaaatgagtataggtgcttcacatgtgccaatattactgggaccttcaaggaaaagctttttgggtgaaatatgcaatcgtgccaatccagttgagagagatgttgctactgttgcagccgtgacagctgggattttgaatggtgctaacattgtaagagtccataatgctggatatggtgtagacgccgcaaaggtttgtgatgcattgcgtaagcgtaagggaagttgcagaaactgaactatcgctccagttttatacaagaaaaaagtgatgtcgaaaaatgtgatttgtgaagtatcgttgttgtaatgaaccagagataatgctttttcttgtgtcaccaaggaataaagtcaagaagctgctactcaagttgcattggtcctattcagatgattttgctgaacttatttttttgcctatttagtggttgtttggttcatagggactaatttttagtccctttattttatttaattttagtttntaaattgtcaaatctgtattttgcaatttagggacaaatgaaataaaatgaagggactaattagtcctgagataaaaaaaaaaaaaaaa

SEQ ID NO: 2602 - DNA, 1571 bp, Zea mays
  Clone ID: ZEAMA-23APR03-CLUSTER40084_1
gcttcaccctccctgctcactgccgcctaccctcgttgaagcgcgctctctcgctctcgctctcctcgcgcttcctcccactcccactggacagagaggagggttagtggagggaacagcgttagctaggggggaagcacggaagcgggaagcaatggcgaccggcggcggcagcagcaggagcgacgacgtgcgcgggctcaagtttggcaagaagatctacttcgagcaggacggcgggagcgggagcggggcgggggcggtgggcggcaggaaggggaagggcgtggccaccggtggcgcgaggccggcgtccgccgcctccgcagcccagccgccgaggtgccaggttgacgggtgcggcgtggatctgagcgccgtcaagcagtactactgccggcacaaggtgtgcaacatgcactccaaggagccgcgcgtcttcgtcgccggcatcgagcagcgcttctgccaacagtgcagcaggttccaccagctacatgaatttgaccaagggaaacgtagctgccgccgccgcctcatcggtcacaacgagcgccggaggaagccaccacctggacctctcacttcacgatatggccggctcgctgcatcacttcaagagcctggcaggttcagaagcttcctgctcgacttctcgtacccaagggttccaagcagcgtgagggatgcgtggccaggaatccagcacggtggcgacaggatgctgggcaccgtccagtggcatgggcaccaagaacctcctcacccacaccgcagtgcagctgctggctatggcaaccatgctgcatacaactgccatggcggcttggtagcaggcggggccccaatgctctcctctgccgcctttgagctcccgcctggcggatgtgtcgcgggagttgccgccgactccagctgtgctctctctcttctgtcaactcagccatgggacacgacctcccacgaccaccggtccccagcaatgcccgcggccggcgccttcgacggcaccccggtggcgccgtccgtcatggcgagcagctacgcggcgtcgagcgcctggacgggctcgcgggaccccgctgccgacggcgccaggaacgcgcagcgtctcgacgatgctctgcacctggtccacccaggctccgcggcggtccacttctccggcgagctcgagctcgccctgcagggaagcggcgggccgccacacctgccgcgcgtcgaccatggcggctccggcggcggcaccttcaaccattccaccaccagcgcgatgaactggtccctgtagcagcactgcctgccttcatccggtcgccacgccacgagatgtggagggagcacttttgcattggacaccaccctggttttgtgcgccttaccttgccgttctcgttttttcagggtggagaaactgggattcctaaccatagtagatctaccgtgaattcccttcccgtgtagtagcgcattgcgtccatgaactcatttgatcgatcgtcgtgtcaccgtgtgcgtaactgcgtatctgtttggcgtaaaaaaaaaaaaaaaaaaaaaaaaaatccgaa

SEQ ID NO: 2603 - DNA, 2149 bp, Zea mays
  Clone ID: ZEAMA-23APR03-CLUSTER4010_3
gcacgagaccattacctagaacatcctaatcgaaaaatctgcattgcccatccccgcactcctctcctcctagcgacccgatcacccacacgcgaacgccatgggagaagccctgataggcaggctggaggcggcggtatcccggctggaggcactcagcgctggggcgcgcggcggcctgtcctacactgcatcagcgcaggaggacccggcgatcgtggccttcgacgatcttatcgccagcgcgctcggcagagtgtccgcggccgccggcaagatcggggcggacgtcgcagaggtgacgagattggtggagaatgcgttcttggttgggaaagaccttcttgccaggaccagccagacacaaaaaccaacaatggagtcagtgacgacttttatggggcctctgaacgaagcgatcttggaggccaacgcattggtggagcggacgagctcgatctatgccaaccatctaaaagcagcagccggtagcctggccgctttggcatggattggttacaccggcaaaggctgcggtatgcctcttccgattgctcatgtagaagagagctggcaaatggcagagttctacagcaataaggtacttgtggaatacaaaaataaggaccctgatcatgtggagtgggcaaaagccctaaaagagctgtacattcccaatttacgtgactacgtgaagaggtattacccattgggtccttcgtggcaaccgccaggaagcgcagccaacaaggcaccttcagctccgtctgttcctcctccatgtctttccatctcttcagcctcgtcgtcccaaccaaaatctggaatgtcagctgtctttgctgaaatcagctctgggaaaccagtgacacaaggcctcaggaaggtaactgatgacatgaagagcaaaaatagaacagacagaacaggtgttgtggctgctgaaggaaaagagactcgcaattcacctccctttagttcaactaaaggtcctgctaaactggagctccaaatgggccgcaaatgggtagttgagcatcatgttgggaacaagagcttgaccattgaaggttgtgataccaaacagtcggtgtatgtatacggatgcaaggattgtgtgctgcaagtcaaagggaaagtgaacaacataacaatcgacaagtgcaccaaagtgggagtcttgttcaagggggttgtagcggcttgtgaaattgtgaactgtagcagtgcagaggtccaatgtgagggctcagttccgactatatcaatagacaacacatctggctgccaactttacttaagcaaggaatctttagaggcatctataacaacagctaaatcaagtgaaatcaatgctcttgttccagatgcaaacagtgacggtgactgggccgagcattccttgccccagcagtacattcacgcgttcaaagacggacaatttacgacatctccagtgtctcattctggggcttgattgtctgcacggctgccatttcttatttccttttgtttacatcagctagcttattacctgccatctggacttatattttgtagttagcaaggtaactagatattagaacgggtcaaaattttcttcttcctccttattaataattaaatcctataatctattcgggttcactcgaggagatgagtgaatcatgcagaagtttctttggccgattaaacgagtcgttgttagtctggggaagcaaattacctgttgagtcaagtgtcgtgtttgacagggcatgctactcgaagatggtagaggagctatgcgcgcttctggtggacaccccaagcgagacgctgaacctacccatggggtgtcttctaatgatgctcaacgctccagttccggacgagagcaggtcgtcgtacctgcaggacgcactctccgtcttcaccgaaatcctttgcagcgatccgtagcacaagggtccacggtgttgccataatctgggtgaagggaagtgaagcctacaggcaacacgccgaagagtttgtacgtctcatgtttggtacttgtagaaaaaattaggaatgtataactatgacctgatgttgctccggtgaatttgtaactccgtctgaagacatgtgtcgggattttcgttgtatgtgagtaccaggtcttgtg

SEQ ID NO: 2604 - DNA, 1526 bp, Zea mays
  Clone ID: ZEAMA-23APR03-CLUSTER401392_1
aaaaaacgtcggtaactaaaagcaaatgatgctgcccaacactccctcttccaaaggaagcaaggaatcgatctgttcttagcacaaccggcccccaaggccctctgtaggtgttcaattcctgccactccccgcttccactttggcatcttgctcgcaccggggcaaggcaatggcgccgccgcgtcgctacctggccgcgttgctcgccctgctatgcgcgtgcaccaccacgacggcgccggcgggctccgtcgtcgcggccgcgaacgtaccgatcactacgtgccggtcgttctgcggcaacatcacggtggactacccgttcgcgctgcacgaggggtgcggccacgcggggctgcgggacctgctcttctgcatcaacggcgcgctgatgctccacctcccctcgggctcctaccgcgtggtcgacgtcgactacgcgtaccggggcctgaccctgcacgacccggccatgtccgactgccgcgcgctggacctcgccccggctgggcggggcaacggcttcgtcatcgagccgtggcgggagccgtacctgtcgccggactcggacaacgtgttcctcctcctgggctgccgcgccacctcgccgctgttccagggcttccccgaccgccacctcccctgccggaacgtgtctgggatggggtgcggcgactacctcggctgcctcgcctgggacgactactacgccggcggaggcgggcggcggggcccgtcgtcgggcgacgccgcggggcaaccgcccgagtgctgcgcgctgccctggggtgccatccgggcggtgaacgtcagccggctcgagtgcgaggggtacagcagcgcgtacagcctcgcgcccgtgcgcgccgagggcgccgccgcgggctgggcgtacgggatccgggtgtcgtggacgctgcccgagtccaaccgcggattctgcggcgcgtgccgcgccacgggcggggcgtgtggccatgacacggagagccacgccgacctgtgcctctgcggggactggaactccacctccaactgcgactcctcggccgacgccagcacggtcggtcgccgccacgctgcccgctgtcgccgcgcttcgctgggccatcctcgcctcaggattgacgtcactatggtactacgcgtcgacgacatcaaatatgtgatggacggtggattcatgctgtgatcgacaactgcccttcaaacaacagtacacaccacctagagaaagacgatgcgtttcaggagcttgaaacgatcgaatttcagaacccacgatcactatccatactggtttatgtttacaatcactcgtaatggacaaaaggccaaagacgatcatgtttgttgtagcaaggatatttttcccgtttggatgtatccctttatgtcaacagactcgtttggatgtgagttttgtcgcacattagtagctgcacgatgttgtacgggtcagtcggctgtatactgacgatggtttgatggttgatggacatatggcaaaaaaaaaaaaaaaa

SEQ ID NO: 2605 - DNA, 1513 bp, Zea mays
  Clone ID: ZEAMA-23APR03-CLUSTER4016_6
aattattgtataaatttattaaaaatctaaaatggattttgatttgggatggaggaagcagcactcatcaattgagggcctccgccacaggccacagccgctccggagtcctgcccgactgctccacaggccactcgtcaccccaaaccaaaacgaagctgcgggcctgcggcggcagcaacagagagcagagatgctgcaattcccggcgctgatgcggcagtggccatcgccgccgctgatcccggcgtccacgctgctccccgtgccggccacctcccaggaggacgaggtcctcctcgccatggccgagtccgacctcgaggacaaggtgctgtggtcctctccaatcccttgccccttctctaatcaccccccctcgcgtcccctttccttgccctggccagagcccacgcgatgtcaatgggtgattgatgacgcttccctttgtttcactttgatcgtcgctcagttgaatgagatccggaagaccaacagccacctgattatcatcgggaagcccacaggcgacaccaaggaggagtatgacgctgaggtggaggacgacgatgcagacaacgtcgaggagtctgatggcgatgacttcgaccaggagactggttgacccaggcggctccccgctccccccctgcttcgccggcatccttgagcgtcgccatccccactgcccagtctgtatttcgcaatccctgagtcgctcctgctatctagatgttctgttaccctattctgctgctgtctgttctcaggatctgagcatgtccttgtcgtgtggaccttgtgtatgaaacaagtacatgattaatcggtccaatttaaatgctatattagtttcctctattttgccagatactgctacttcttgccattttgttgtttgtgtcgtgaccaacaaatccttgtcaagtttcttacactgttctatttcctttgtggtcgaatcttcttatatgaaaattttgaagcactgctttacagaaaagagacatcaaggagcgaattaaattgagctattagtaatgtcgacttgccgtagtaacactcaagtactgtaattgtcaggtgtcattaacctagacattcacatcgaggattcctttaaaaaaacaaagtgttctatatgagtgtcctcttagcagttgaactataaagtgtttgttgtcagtgtgttgctggaatgtgcttattaattttcattgattgcctgttgattttctgtacttgacacccaaaaaagcttattaatttacttttcagttttctaatttaataagaccagtttgtctactgtgttattaggtatgcgtattttgaagctatgaatattgaatacattgtgtctcattttcctcattctccttttactgaacctgtacgtaaaatttcatcaacatttgatgatccaaactccaaagctctgacattattacaggctgtacaacacagtatgccatagtcgtaataaataattactgcaaactgttatttgctt

SEQ ID NO: 2606 - DNA, 1228 bp, Zea mays
  Clone ID: ZEAMA-23APR03-CLUSTER401736_1
acagtgatgtgcggatgtgccctcccctcggtttgctcattcctcagactccaacgctcacacacggctcacctctccggctctccgtggtccgtgcctacacaacaattctacacgatggcgtgtctgtcaccgtcgccgtccgggcggcgcctgtcggagctgctggaggagaagcaggagcccttcgtcctggactggcacctgctcgaaaagggctgctgctcctcgcgcctcctcgacggctacgactccgcgctgtgctggccggccgccggcaacgacgccgcggccgcgctcaggcgcatggccagcaagaagaacaaggcggccaagctgaagcccgcccggcagcaggctgccggcggcctcctccagctcctgctctccaagatcctccgcggcagcagggcggcggcccagcgccagcggaagcccgccgcggccgcgctgcacttctccggctccttcaagctgccggctgccgtggcgccggcgtcgtgctacgtggagctgggcgccgtcaagaccccgcctccgacgtcgtcgtcgtcgtcgtcaaggcgcaggacgccgccaccgcggggcgctacaacgactccgactgcgacgacgatgagaagcagcagctgagccccgtctctgtcctggaccacccgttcgagagctcccccgtccacgccaccctgctgtccccgtcgtccaaggacgccgccgccatggacgacttccggaacctcctggacgcggcggcgtacagccccgcgctgctcgccatgtccgagcacctccacctcagggacgccgacgaggactgctactacggcggctactgcgccagccccaagagctgccgcgacgacaggtccgccgccaccgcctactgggactgggacgcgcacacgtgggagctggcacgggcgtctcagctggtggcgtccgagctcccgacctccaggctaatcgccgccgacgtggggcccgagcgccgcgacgtcggcgccgaggtagaggcggccgtgttcgaggcgctgatgcgggagctcgtcgtggatctccggagctgctgctgctgctgaccgccatggcagcaatgctccttgcggccaagagaaaacggagcaatgctctggctctgctttgctctgttttgggcggctccgcacaagcacgatgatgtgaatgtgatcgaaaacgttttgttttcttcctaaaaaaaaaaaaaaaa

SEQ ID NO: 2607 - DNA, 1093 bp, Zea mays
  Clone ID: ZEAMA-23APR03-CLUSTER4017_5
aaaagaccaaggtccacaaaatgaggagacaatatcgagtcctctaaactacccttctctctatatatatatcaaaattaccctgtgttggccctctctctcgcatattctctcatctctatccctctctctaaagacgtccccaacttttatttgactagtctgtagatatataatagccacatagccagccaaatcataagcagctgctcatctcgttcgtcgatgttcgtcagccaggcatcgcctttgttgtttcgggtagagagatgacatcctcgtcgtcgacgaatacatcagacggcgccaagccgtcatcttgccggagaggccactggcggcctggggaggacgagaagttgaagcagctcgtgaacaagtatggggcccagaagtggaaatccattgccgaaaaactggagggaagatcaggtcgatcagatcggcaagagctgccggctcaggtggttcaaccagctggaccctcggatcaacaaacggcccttcacagaggtggaggaagagcggctgctcaacgcccaccgcgcccacggcaacaagtgggcgctcatcgcccgccacttaccaggccgcacggacaacgccgtcaagaaccactggcatgtcgtcatggcgcgtcgctgccgcgaccgctccaggcaccatgccagggccgcgagctccagctcccctctctccatgaacttgtctccaagagaaacgctacacgtggatatcggcgaccgtgtccgtcataaacatcgccgaaaggattatcacgccggtgacagcgccgacgagccattgaagaaggacgtgcccttcattgatttcctcggcgtcggcatgtcctcgtaattattcatagtattgcattaattcttgaaataccaatcgatgtagatcaacaagtgtatcgatcggcgtttgttggttattagggcattagtagactgcatgcaggagtagtcgtctagaggtatcagatatgcatgcagggttagagagttcatcttcgttgatggttagggcgttctgatgtgctgattcatcaatcaatcaaataaggctccaggcaaaaaaaaaaaaaaaa

SEQ ID NO: 2608 - DNA, 1690 bp, Zea mays
  Clone ID: ZEAMA-23APR03-CLUSTER4018_1
acttctttctcgtcttcctctcctgtctcctcgcagcagggtgctggaagaagtttctggttaggagaatccggttgaggttgccatttcccaacttcttccagcggttcggctcggaggcgaactgagatgtcctgttcgtgatcggtttgttcttgcagctgcagacagcttgtcgattccttgcttgaggagcagccatggacagaagaaaccgaccagctccgttggttgacagctctgcatgcttttgccgagtggacagatcatccgccgcggcggcggcgaggcgaatcccagtgtcgaaggcgtgcgtgcaaccgagcctcagggcgtccatccacccgctgaagccacggccgggcgcagagcggagccgcggaggggcgtgcccgctgctcccaggccttccggacgacctcgccattgcctgtctcatccgggtgcccagagccgaccactggaagctgaggctggtgtgccggaagtggtgccgcctgctcgccggcaactacttctacggcctccgccggcggctcgggctcgcggagcagtggctgtacgccgtgaagcgcgacggcagggacgggcgcgtgtcgtgggacgtgctcgacccgtcgcgcggcgagtggcgcgcgctgccgcccgtgccgggcgagtacgcggaggccgacgggttcggctgcgccgtgctcggcggctgccacctgtacctgctcggcggcagggacccgcgcaggggcagcgccatgcggcgggtggtgttctacagcgcccggagcaaccggtggcaccgcgcgccggacatgctgcgccgccggcagttcttcgacgtgtgcgtcatgggcaaccgcctgtacgtcgcgggcggtgagggtggcggcggcgggctcaggtccgctgaggtgttcgacccggccaagaaccgctggtccttcgtggccgagatggccgcgccgatggcgccgttcgtcagcgcggtgcatggcgggcggtggttcgtgaagggtattggcgcgcagcagcaggtgctaagccaggcatactccccggtgtctgactcgtggtccatcgtcctcgacggcatggtcaccggctggcggagccccagcgcgtgcctcaacggccggctctatgctgcagagtgcatggacggatgccggttgagggcctacgacgaggccgtggacgcgtggagcacctgcgccgacagcaagcagcaccgagggagctcccaggcggctgccattgtcgccctccacggaaggctcttcgtcgtccgcaacgacatgagcgtctcggccgtccaggtggcggccgaggcgggaaagcagaggtggcagaccctcgccggcaaagcgcataccaagagctttgtcacgggcctgttgtccaacctctctggtcgcagccgcgccaagaacaacatcctccattgccaagttcttgaggtctagctgtcttgctccctgatgagctatgcttataagttactagaatcacgcaatgaaaaagtacgtgagaaatctccatgtctgctcaagagtgctaattaaataagcgagaattacaggcatctgaagaacgcgcgtgatcgttgtataaaactacaaatacacagtttatatggtatacagtatacagatttattaaaaaaaaaaaacgagggcggccgccgacaaaacagctc

SEQ ID NO: 2609 - DNA, 1933 bp, Zea mays
  unsure (1)..(1933): unsure at all n locations
  Clone ID: ZEAMA-23APR03-CLUSTER403847_1
gcgctcgctcttgccccccccccagcctcactaacacctccccccccaactctcactcacaagttagtcataaaaaaaaaaaaacacacaaaaaagtttcaatggccgcctcaaaaatggctaaaacctccactgctttcgccggaaatgctgtgaacctttcccctgcggcatcggaagtccttggaagcggccgtgtggcaatgaggaatactgttgccaagccaaagggtacagcaggcggcccatggtacggaaccgacccagtcaaggagcttgggtccattctccggcgagacgcacagctacctgtccagtaattgggccctggcgcagctacggatccggacaaagttgccggatgagttccccggggactacgcatggggaaccggtggagcatcagaagttacccaagagcagcgggagcatgctcggagccctaggctacgtcttccctggactggtggccaggaacggaggccaagttctggcgatggtcagtgagggattaggcataggaacccggagtttaagttcaggacgaagccggttttggttttcaaggccggttcacagatcttcagcgacgggaggattcgactacttgggtcaacccgagcttggttcacgctcagagcatcttagcccatttgccggttacagagtcccaggaaatgggccgttgggagaggccgaggacttgctttaccccggtggaagcttcagacccattgggttttggctaccgacccagaggcattcctgtcagtttaaggtgaaggagctcaagaacggaagatttgttatgttttttttgtttggaatcttcgttccagccattgtcactggtaagggaccgatagagaaccttgctcaccatttggccgatccagtcaacagcaacgcgtgggccttcgccaccaactttgttcccggaaagtgagccaagttctatctgtttgtactttacttttctttcactcctccgcgttccggggagagacatgaggagaaagagcaggttcggggttctggtgtcggacttccacgtccagatctgaatctctcaccactgtctgtcattggtcaagcaccaatttccctcacgtcaaccaaaaaaaaaaaaaaatcgaccccggcgcggtccccggtccgccctctctcatcctctctccctccttgcctcatcggactcctaggcggttggatgtttctctacctttccgccctcanatagccactggtcgtcttcggncgacttcttgatcgaanactctgctggctcttggctgctacnatcgtcngncgggttatgacnaagcgttggatctcttttaacctccgcncttatgatgggtgttggcaatcgtttgcgacacngngcgtttggggttccgggatgatcttttnttggacnancaanaacctgcnaatgctggatactcttaattccttggaggntttgttacctaantgggtggaagcttgtttanggaaaggctaaaaccggattggattcanatcncggcaattgggggtnggnacnccgncnggatttagnganttggngnnggggaaanggattgaaatnnnaacnaaacctcgttcaagccatcgtccctggtaagggaccgatagagaaccttgctgaccatttggccgatccagttaacaacaacgcatgggccttcgccaccaactttgttcccggaaagtgagccaagttttatctgtattttgcttcagtctttgcttcgtgagtgtgagaggagaaacagagcttgtttagatgtaaaatttgcaagactttgtatttttttcattaatcaaataactcgtttttctctcaaattatctggcaattaccaaattggattcgttttatgtccttcggatcactcaattgcagagtttattaccacaattgaac

SEQ ID NO: 2610 - DNA, 1637 bp, Zea mays
  Clone ID: ZEAMA-23APR03-CLUSTER4039_2
attccctcggctctgctcataacacgcgcaacggctcgcctcgccgccctcgccagtcgccgctgcccccgcaaatcaatcgagcgcggcaaaggaggagccgcgatcaagcaaacggaacctagccttccccttctctttctatcgctcggggctcctcctccaccgcgcctgcacggcaggacgccggggataacagagagggggaccgcgcgggagggaaggggagggcgggatggagttcctggagcccaaggacatcgactggagcagggtggtgtcgcagtacgtgcgcgacgagacctacgagggcatcgaggccccgcactgggccgacctctccgaccccaacgccggccgcgccgccgtcgacgacgaggcctggttttgccgccccgattgccagcatccgaagacggccgaggatttcttcaagctgagccccagccccaagggcaagctgctgcgatcggtttccgccatgctgccgttcgccgaaagggacgccaacgccaccagcctcagggacggcagtagcaatctcaagtggcggggtggcggcgccgttgctgcctccacgccgccgaagccaaaggcagcgcccaagaagaggttccaggaggatagcgagaaccatgaccctgcgctggccacgccgcccccacggcaggcgccaagtaggccgccgttcggcgcccctcggtggaacaagaatgccaaggaggccatcaagtccagtgcggagaagcggccggacaatgctgagaaggaggcgctgctcaataagcacgtcccgccgaggcagctcaagagcaccctctcagcgaggaacctcttctctggaaaggatatacttggccagatttcggagttctacgatgagctgaagcggatggttggtggtggcgtcggccggccagtcacagacacacaggaggagcacagctcagacccagtgaatccgagctatttgatggagaaggtggctcctgatgagacagtgaaggaggaggcgagacaagaaacggtgaaaaagagtccaagcccaatgaagggaaagaaagtggggctgaaggtggaaccagggaagcaaaggtctccctctgtgctgaaggaggtgagggcaacgccgccgactccacagcggtttctatccccatcgccaaaccgcattaagaatgttaaacctggagggatcacagcaggctcgccactcaaaaaggcaccaaaggagaaggggacacctagtaaggacctggagagcaaaaaagatgctgtgaggcaaccctttggtgttaaggatatgaacaatacaagagcatgtgatgcagaagggagctccagcagcatgttttggttcttgaagccctgcactttccttgtggagtagcgtcataacactacaattttttaacgaacaacacttgatatagttagaatccattacttcattcatttccaaatattctctgttcctatttgatcgattcatttcatgggtactctatccgggaagtaaacaaaaagaatcatgtatagtcatacaggttgaaagtcttctccatatgtataattcgagatatagcaaaacgtggttctgctgctttgtcgtttgttcaaataaactgcattttttt

SEQ ID NO: 2611 - DNA, 1199 bp, Zea mays
  Clone ID: ZEAMA-23APR03-CLUSTER403_3
aaggtaggaggagaaccgtcagcagagagacatggcgccccaccaccagcagcgggcgctgctcctgttcccactcgtcttcctcctcctcctccttgccccgcccctcgccggcgcgtggggaaaggagggccacatcatggtctgcaagatcgccgaggtcgcgcccgattccgccctatgaaagttgggtcgaattgtagacagcagagctgggcgagcgctccttcctggaattctgatggatgcctctttgcgcggcgtgcagaagtacctgtcggagaaggcggcggccgcggtgcaggcgctgctgccggagtcggcgggcggggagctgtcgacggtgtgcccgtgggcggaccaggtgcgctggcactaccactgggccagcccgctccactacgccaacaccccccaagtctgcaacttcaagtattctcgggtctgccacaattctcgtggccagcaagggatgtgcgtcgtcggggctatcaacaactacacggaccagctctacagctacggccagaagacttcgtataacctgacggagagcctgatgttcctggcacacttcgtcggcgacgtccaccagccgctgcacgtaggcttccaagatgacgagggcggtaacaccatcaccgtccactggtaccggaggaaagcaaacctccatcacgtgtgggatgtcagcattattgatacggcgatcaaggacttctacaacaagagcatggataccatggtagaggctctcaagatgaatcttacagatggatggtctgacgacatcgtccactgggaaaattgcaagaacaaacacgcgacctgcgcgaacgactatgcgattgagagcatccattattcctgcaactacgcctacaaagatgtggagcaagacatcactctaggagatgattattttttcagtaggtacccgattgtggagaagaggttagcgcaggctggaatcagattggcgttggtacttaatcggatatttggtggaggtgaagcggatgatataccactacaagtacagtaacagctctaataaaaggaagcatagctattacaaggatttgtccattacgtcgtctatacatcaataaattggcatgaatttgtaactccattgctatacatcaataaattggcatgaatttgtaacaactgaaaggatcaagatgccacccttg

SEQ ID NO: 2612 - DNA, 925 bp, Zea mays
  Clone ID: ZEAMA-23APR03-CLUSTER404050_1
tcggcggtacgatatcttttttttttttttcaccaaatttctagcgaagatctcaatatatttgaatgtaattcgaagagaatttatgatcacactaacatacgcgatcattctctacaagtacagtgcaatatacggcaaaatgcatgaacttccttgagactcatccgagcctcgaagcagcatacacaaattaactcttgcactatcaagaaacaaaccaaaaccaaaaagaacatagaacgacgtaacattaggttccacataatcaagacactgtcctaaaaacttcattattttaaatttgatagccagtgctcttcttagtaggactcatggtcaccaccatagccacctccaccaccaccacggccgccgccgtatccaccgccaccaccgtagccaccgccgccgtagccgccgccaccacctccatagccaccgccgccacgagagaagccaccgccgccaccacccgaaggtcgctcgttggcaaagttcacacggacgttcctcccagcaagctccttgccgtccatgttttctgcagcactctttgcatcctcgccactggcgaagctcacaaaaccaaaccctctagaccttccagtctccctgtcagtgataacacgtgcttcaacgacctcaccaaagctttgaaacgcctccttcagcgaatgatcatcagtagcccaggcaagaccgccaacgaaaagcttggagccatcagcaggctggccggcgcacatgaagcgggcagcgttgaacagggcaggagccgagccggtcgaggcactgctcgccacagcactctgcctaagaaggcttccgagcttgatgagggccgccatgaaggaagactaaaacctctggagggcgagctgggacgagacggcgggggaggggggaatggagaatggggaat

SEQ ID NO: 2613 - DNA, 577 bp, Zea mays
  Clone ID: ZEAMA-23APR03-CLUSTER404059_1
ttttttttttttttttggtgacaatatggtcatttatttatatatggatacttgttgcggttgcattgtcatgacataatacatgttgataactcacaagctatatatgattgtgccttgtttgcttcccctccctcggtatctctcatggatgtgccctatgtggcggcggcggcgagaatgactgccacattggtcgtttaggaatctctccgtatttattcccgacgactcgcactgagttgttgcaagccattgaaagaaaagagattttttgaacacttaatcccttctcctcctcggaggtcatggtacggcgaacacaggccatgtcgaccgatcgcacagtgtcgcaacaagacttgcttggacgctcatagcttgtgttgcattcacgcttgaacctttctttttcatcgtagcaacccttctctccccaaagccccatgcgccgtaaatgtggcaaaaaccaaagcaaagaacagaagctgaatgattgcttttgtagtcatcttgtgccaatacgatgttgatgttagtatggcttctatccctagaaggataaagagagccgccc

SEQ ID NO: 2614 - DNA, 1512 bp, Zea mays
  Clone ID: ZEAMA-23APR03-CLUSTER404145_1
ttttttttttttttttgtacgctgtcgttaagtctgtgaattaacatttaaagacaatctagagtatgtactaatagcaaggcagaaaagaattacaaactaaaggacgagacaaaatctcaaaaagatctctaaggcctgccctgcgagtgcaggagtatcagtctccccacacccttgttcccatgggcttgtgcatgtattcagaaacaacctgctttgtcttactgcggcgctccgtcgtcaaactcgttcatgtggtctaacaggtagtttgcggccagggtctcgtccttgttgcaggcgaagtacacctccagaacaagcgcccggtcaaagcccattccttcaagacgaagtatagcttcattctcctcaggagtgacagctatggtctgaggcacaccctcagcaaaactgctctaggagattctcgtcttcatcgccctcagctggctcattgattaaacgaaggaactctgcttggttgtcctgaatcagctgcaaaatctgagggttttgctttcccagctcttgaagcaatggctgtaagatttgagggttggcctgcactaaagaaagtaagcttcggaattgtgcattgttacgcaaaacatccagatttccttcaccagcagcatttgctgaagcatttggcagggcttgagggaagaggtccaaggggctagcattaggaccggaagaggcaactgcaggttgagctgcttgcgaagccagggcaggatcagctggctgggcacttggtggtggtgcaggaatctccatcggctcaggaataccagaatataaatactcaacagcccgctccgggttgttgaatgcagcacgtagggcacgcagcacagtgtctctgtcccatgttccaccacccatttcaagaattgactgaattgttgcctctagggtgcctcccgcgacaaggtttgaagcagcctgaccataagtttctgcttcagtggagacagcaacagcaggagctggggaggcggtggcagctggaccaggagcactgacaggtacaataggtgctggcgcagccactgcttgaggtgctggtgtggctggtgcttgagaggcaggagtagcaggcactgtctgagtagggggtgcctgatttgagggttccttggatttagctggagctgcacttgatgagcccttattctgtctaagcattatcacaagaaagttgttttcaacaactttgttttcctccaacgtagtctcgtccttaagaactgacccttggtatatgagcatttgttgatcagctgggtacacattctgcccttgtgaagtctcaatgagcttctttacatcagaaaccttgtcggcggggttcacttcgatctcgaatttggagcccttgagcgtcttcacggagaccttcatctcgccgccgcgcgcgcgtgcgtcggtcgcggcgctcgacgagttcgagaggcggaggcggaggcggagggggggagagggagaggggagagaacaagg

SEQ ID NO: 2615 - DNA, 1260 bp, Zea mays
  Clone ID: ZEAMA-23APR03-CLUSTER404462_1
gttttttttttttttttggcgtaaacccccgggctgttacatacggtatcatgttccatcaagctaaaatttccaaatttatacaacctcagtttatatattctaagctcaagggaatgcaagatgcattcctcacatgattgaggtctcacactctgattacgtaattcacgtgccattctagtaaaaatacataacctccaacatttattcaaagtatatgaatattggcgacgataggatttaggagtttaaaggaacctatttaggtattcatccacggtaatgtaaggcacatcagggtaaagctgagtggcttcaactccaaatgatgggtcgatctcaaagttagtgtggtcccccttcaaccagacagagtggctgattgccagtgctacattcagcggcgctgatgactctcgaatcttcttcaggagttcgtcctctgggaggtacaccctctcaagtgtcttaccaagtttcttctcccagagtgagacaagctcattatgggacaaagtgttacttggtggcctcagatataggattttgttcagggtccttggatcatctacagctttaatagtgtaggttcccacgtcttcctccgccgcaaagattccttttacatttccatcacccataatgagaaccttctcggttggaggctccgtgaccccaatctgcgcaaggcttcgcaagaaacgaccagcaaagaagttggaagagacatatgtgtagggaatcccctcagcctcaatggcacgccttatatgagctttcccaccgaatactgtctttgcaggttcaactgcatggttacgatccacatcattaccatactctgatgggaagaatctctttacatgcccaacttccttaattgccgagataatgagagtttgatccggtagctgttgataacccacggccgagatcacaacatctgctgatttaatggctgtcaccaggctctcatgatcatacatatcacccttgacgatggtgacgccggcatcccggaatccctggaggacggcggccttggctgggtcggcgggcgcggcgtcgcggacgaggacggcggtggggtggccctcgcgtgcgctggcggcgacgatgaagcggcctatgtagcccgtgccgcctatcaccagcacccggctcctcccctcgcctgcaaccgacgccatgtacagcagagcggaaaaatagaacacggcaagaacagaacggagaggcagaatatagtggtcttct

SEQ ID NO: 2616 - DNA, 793 bp, Zea mays
  Clone ID: ZEAMA-23APR03-CLUSTER405_4
atcgcttcagctcggcgtcttcacaaacgccggcgcaaactctcgcccgagcccgacagatctctaattccccataccgtccaccggtcgaccttcacgccagtctcggtctcttccgaaggcgtcgcgcgcggttgtttgagaggagaggaggaagatgagggagtgcatctccgtccacatcgggcaggccggcaacgagcaccctgcacagatcgtgaacctccacacctcaacgatagatggcggggttcagaagccttgcacccaagaccaggaacctggtggtggccgggggactgtctgccttcgtgctcggggtctactactacaccatgagagcggtgggaggcacggacgagctacaggtggcgatcgacaagtttgaggagacgaagaagcaggatgctgctagaaactccagctccagcgcaggaggatcataattcataaacacgcggacacgccctggatctgctgcaggctgagtggctgacatggtacgacgacagtcacgtcgctcagtaggccatgaccatgcgttctgcttgtactgtggaataaataaatgatgggttatggtactctttatctggtagagtttggcagcttgtgctttgagggatgtaatagtggccccgatgtttgtattttcatggcgagccggaaattttgtggatcaaaaaaaaaaaaatgtgtgactcccttttctctagctctctgtggccattgcatatttgctgcattggtgtttggtaaggacagctccgtctgtgaagggaagcaatgagcc

SEQ ID NO: 2617 - DNA, 1856 bp, Zea mays
  unsure (1)..(1856): unsure at all n locations
  Clone ID: ZEAMA-23APR03-CLUSTER4064_8
caaaagatcgtcataaaaaagttgaaagtattaaaaagacagtccaggtattcatgcttttaaaaaaatattgctcaaccaagaaaccagccctctcacaccggggcgtatcgtatgcctgtgctaccactcttggtcatgaccttgaagctatccgcggtaaaggtaaagcccccatgctcatcaccaggctctgcagtcacctgcctctccagaacagagtacgcacagtactccacgtcgtagatctctagtcccatctcaaagtaggaaatggatgcaccaacgccctcaccgtgtgttactaatagcaggttttcatgaggatatttgtcagcaagagctttgattatgcttgcgtatctgcttcttgcctccatgatggattcctcccactttggtagctccgggtagattggttctgcagaatggtcgatggttccagccgggaagtcggcttcaagctctggcaagtcaggaaaccacttgctgacgttgggagccagcttgctaacagtaatgcccattgcttgggtgttcatcatctcagacaatccatactcgatagacaccttgacgcgtgaggtgtcgaggggcacattggccgggtcgccgaccgcgagcagcgcgtcgtcgtcggggacggcacatagcgcggcgacggcgcgcgcggcggtctgtcggcatcgcaggaacggggagacgaggacccggtggagggcccatccctgcttggcggcggcggccctgatgcacttgccgacggtccaggcgcggaggaggccggcgtcgtcgagaggcggatcccaggggcgcggcttgttggcgggccacatgggctcggaatggtcgaggcgatcgccgtggcgcatgacgacgacccgctgcattcggtccccgacgaaggagaaggcggcggcgggaggagggagtcgtggtccggggccgtcgggggacacgcacgcgcggcagcagcaacacacgcaactcatccacaacaaacaactgcgtcgacttcccacctgcttctctgtcttgtgcctgccattcaaattacacttcgctctttttcgattaggatgttctaggtaatggtctcgtgctgctgccaccagcagtggtgagccatcaacatggtcacgagcncagcttagagtatagaacgactcatccttatcctcatcaacgtaagcttgtagaagagcgaaactaccattctcaaggcagcggtaagttgtcacgcggttgccgccgacggtggcgaagacgtcgtagtagcgcgcgtccatgaagttgaacccgatagcatatagcgggcgcttcccctcagtgtgcttgccgcagggcttgtactcccgcttccggctgggcacgagcgacccctccgccgcctcgcacccgagcccctgccccgggcccagcttcgccatggccggcggcagcggcaagatttccggttccgcccggtacttctccccctcctcagttgctgccccctcctctgctactttcccctccgcctgattctccttgttatgcaccggcagcggcctaggcttcgggttagaggcggcagcaacggggacactgacctcacgcggcgacctcttccggcgtggctgggccggcgccgcgctgtgaagtttagggatttaacgcagcacagcagagatcaaatataggattggcaaattggaaggacttccacacttcaaatcgaatctcaaatcttggctaaaacaaaagcttgaatttgctggaattcaattcttcagtcattctggtggtgtagaccgttactagtgtcgcgggctcgcggcgaccggagagcccggccggcctcgaggtacccaatg

SEQ ID NO: 2618 - DNA, 1736 bp, Zea mays
  Clone ID: ZEAMA-23APR03-CLUSTER407056_1
ttttagcaccacctctcatgactatcacatttctttcgggaaagtagaaaaaaatctattacccatgaggccatgatactttccacttggacgaagcgaaattgttaattcctcccttccagtatatagctcgctcgctcacactcggagctcgtaacaaagtcatcactcatcacatgagcttgcttgtgactgccagctttgcccagtgttcatcgcccatggaagagcgggcactgttcccggtgtccgattccagcaccacctgcagcagctctggctgtaccggccccaactcccctgtctcgtcgtcgcagtatttggacgacaccagcgacggcgccggcagctcgagcagccggaagcggccgcgccgggagctgaagcatcagtccaggtctcctgtctacagctacctagctagtatctacccgccattgcattgcaccacctctgtcctcgatctctcttgctcgaccacacacacccccacacgatcgactaacaaccctgtatctgtatggatatggcaatgagccagcacagctccgacacctcgtccacgtcctcctactcgtccgacccctcctccacgtcgtccaccaccagcggcaagaagcgcccgcgcccgcacgccgccgccgccccggcgtaccgcggcgtccgcatgcgcgcgtggggcaagtgggtgtcggagatcagggagccccgcaagaagtcgcgcatctggctgggcaccttcccgcgcccggagatggcggcgcgcgcgcacgacgccgccgcgctcagcgtcaagggcgcgcgcgccgtgctcaacttcccggccctcgcgcgccacctcccgcgcccggcctccctggcgccgcgcgacgtccaggccgccgccgcgcgcgccgccgtcatgcacgagccagagcctcaacaacctgatgagcccggacggcagcccgtggaggaggtggccctggccgccgagctggtgttcgacgacctggcgcctctgtgggtggaggacgtggtggagttgggcccgtgcccgtcccagcatagctcgtggacgccgtgcgatgggctcgacgccgccgcctgtctgcactctctccctctcttgtgggactactagctgctactaggctccttgctccgtttgtacatggccttgaaccattttcgtttccgcttgtttttttttttttttggttttcacttgttttcatatatccaccggagctacctacaaagagtaaatccctactcgcactgtactacttctcgtatatttggactaaattttggcgggtagccatcgcttaaaccaaaaaaaaaaaaaaaaatggagatggagagcgtggcgccgcccacttctagcgagtctcgcgacggcgcccgcaatgacgaaaatgaagggccggccgcatctagctcgtccggcaacgacgccgacaatgcccagaccgaagagcgggctgcgccgtccgagcattcgatgctggctgacgggcacatccttaatctcgcggtcttcgagctgccggacgtcctactcgagttcggcttcgcgccgccgccgccgtcgacgtcttgtggctatgatttgtcctgggacgagccgttgctgctctgggagcactgacgagcaagagggggcaacgtgacatgcatgccaatgtgaagttagataggtgcagctgatgatccgcatacaagcatacttttactaatcagcattgatttgt

SEQ ID NO: 2619 - DNA, 1062 bp, Zea mays
  Clone ID: ZEAMA-23APR03-CLUSTER4079_12
gcactgcatcagagcacgaccacactacccacccacctccactactgacgaccgattcctaaaagctcgatctagcgcgcgcggctgcagagtgcagacgacgacgtacaccatggcgcggcggtccctggccctgctgctcgcgtcgtcgctcgccctgatggcggccgccgtcgcgtcggcggactcgtggctctacgacaaattcaacacggacggcaccgtccgcacccagtacgacgcgtcggggcaggaggtggcgatgctcagcctggaccgcagctctggcgccggcttcaactccaaggagcagtacctgtacggcgagttcagcgtccagatgaagctcatccccggcaactccgccggcaccgtctcgtgcttctacctctcgtcgggcgacggcgacgggcacgacgagatcgacatggagttcatgggcaacgcgagcgggcagccggtggtgctgaacacgaacgtgtgggccagcggcgacggcaagaaggagcaccagttcgacctctggttcgacccctccgccgactaccacacctacaccatcatctggaacccggccaacatcctgttcaaggtggacggcgacgtgatccggtgcttcaagcgctacgccgacctgccgtacccgagcgcgaggcccatggcgctgcacgccacgctgtggggacggcagctactgggccaccgagaagggcaaggtgccggtggactggtccgccgcgcccttcgtcgtctcctaccggggctactccgccaacgcctgcgtcagcggcggggcctgcggcggcggcggcgacgacgggtggatgagcaagcagcccgacgacgccgagtggggcaccatccggtgggccgagagcaactacatgcgctacaactactgcgacgacggctggcggttcccccagggcctcccgcccgagtgcagccgcagctaagctagctgattccgccggttttcgtacgctcggcggcgtccgctgacgacacacgccttgttggtttgttcttgctggacatcatacatctctatatgcatgattc

SEQ ID NO: 2620 - DNA, 1207 bp, Zea mays
  Clone ID: ZEAMA-23APR03-CLUSTER4079_14
agaaccacagaccaagaagtgccctccactttgtaagctcgtttccgaaaagagctctagagccgccacacacacacacaccatggcaccgcgttctctgctggcagtgctcgccgtcgccgccctcgcgctcttgcacgccgcctcggccaagtcgtcgtggcttgacaggaggttcaccacggacggcaccgtccgcacgggatacgacgattcgggccagcaggtggtgatgctccgcctcgaccagcactccggcgctgccggcttcaactccaaggagcagtacctttacggcgagttcagcgtcgagatgaagctcatccgggggaactccgccggcaccgtctcgtgcttctacctctcttccggcgacggcgacgggtcgcgacgagatcgacatggagttcatgggcaactcgagcggggcagccggtggtgctgaacaccaacgtgtgggccagcggcgacggcaagaaggagcaccagttcgacctctggttcgacccctccgccgactaccacacctacaccatcatctggaacccgaccaacatcctgttcaaggtcgacgacctcttcatccgctccttcaagcgctacgccgacctgccgtacccgagctccaggcccatgacgctgcacgccacgctgtgggacggcagctactgggccaccgagaagggcagggtcggcatcgactggtccgacgcgcccttcgtcgtctcctaccgcagctactacgccagcgcctgcgtcagcggcggcgcgtgccgggccgccggcagcggcgggtggatgaacaggcagcttgacagcgccgagtggggcaccgtcaggtgggcggagcgcaacttcatgcgctacaactactgccaggatgggtggaggttcccgcaaggactccccgccgagtgcgcccgccactgatatgcgtccgccggttaattcttcgtcgacgatccagcttggcgtcgtttgttctttgttttgttgggtattctttttttttctacgggtatatgattcttgctcttctttgtggatttgtgattaaaaagcagccctgcagcttgcaacgtgtgggcggttgttgtacaccttgcttttcctaaaccgaagcatgtattttatttttaatcgtgcctttggacgatacaggcatgcagcatatatagtatttacgtacgcaaaaaaaaaaaaaaaa

SEQ ID NO: 2621 - DNA, 939 bp, Zea mays
  Clone ID: ZEAMA-23APR03-CLUSTER40888_1
ggccaaaaaaagaaagataattttttttttttttttcattacactcattttatgccatattcacagacataaatgccgacttgaacaaaaagaatttatggatattgactagcaaaacaactagtagttacaagttggaggatggcatgctcctgacatccgacggcatgaaggtggcgagcgcggcgaggagcaggagcaggcacaccggcaccagcagcagcagaggcggcgggggcggcagcggcggcaggaccagcggcagcacgataagcgacacggcgacgcacgcaagaaccaggaacgcctccgcgctgagcccgcccgcgggcggaggcttgggcgacggcggcgaagcgttctgacgctgctgccctttggccaccgctgcggcgctctttctgcagacgaccatggtctgcctcctattctgctgccgctgctgctccgcccaggcgagttggtccttctccaactctatcgccattagcgacgcagcaaccggcatctaacgcgcagcagcgagcgaagtgaggctgtcccgacgtacgtaccgactgatggaatctgagcttggtcttgattcttgaagattatatctgaagcaacgcccaaccaacggtgtctctgatcttaagcttcgcgacgccgccggcttgccgcgctgcttctttcttcctttttattgatctcgtcccgaccgagtgacagcaggacaggagaaagtaaaacagagctggaatgcagcagaagagttgtgcaagaagaaccaacgccaaaaaacgcagaggactaaatggcgacctgccctgccctgctgcgcaacggaagccgggcgcgcgcgcgcaggtgcgcttgtggagacccggacggggagggggacgggcggtgtcccccgctcttggcagcgtaggggcgccggcgggcgcgggaatcggt

SEQ ID NO: 2622 - DNA, 1965 bp, Zea mays
  Clone ID: ZEAMA-23APR03-CLUSTER4093_1
gctattaacttccgccccccaaaatccaaaagcagcgccagcggggaagcggtcacgcgccgccatgggctaccagtgcgcgccgggcggcggcgggaagccatcgctcgccagcgtgcgcttcgccggcccccgggcgcgggctggacggggcggctacaaggagctgctcgtcatggcgctgcctcaggacgacggcctcgacggcgccacggtcgcgccggccggcggcggcaagctaccgctcgtcggaggggccgtgaggactgttgtggagagcagagaggccagagaatttgctagtggagcactagctggtgctatgtcgaaggctattcttgctcctctagagactatcaggacaaggatggttgtaggagtagggtctaggcatatttttggtaccagcgtgccggccctggagcggaggcatggcaagggctttgggcaggaaatacaatcaacatgctccgcattattccaacacaagcagggagggggcggctacaaggagctgctcgtcatggcgctgcctcaggacgacggcctcgacggcgccaaggtcgcggaggccatcggcgtcaggctaccggacgtcggaggggccgtgaggactattttgaatagcagagaggccagagaatttgctagtggggcactagctggtgctatgtcaaaggctattcttgctcctctatagactatcaggacaagaatgattgtaggagtaggacctaggcacatttttggtagtttggtggatatcatccaacaaaacgggtggcaagggctttgggcagggaatacaatcaacatgctccgcatcattccaacccaagcagtcgaactcggaacatttgaatgcgtcaagaggagcatggcagaagctcaagagaaatggaaagaggacggatgcccaaagatacagcttggtaatatgaaaatcgagcttccacttcacctcttatctccggttgctatcgctggtgctgctgctggaatagctggcacactggcatgccatcctctcgaagttatcaaggatcgcttgactatcaatcgagaggtttatccaagcattagccttgccttcagcaagatctatcagacggatggtttaggtggtctctatgctggcctctgtccaacgctaattggcatgcttccttacagcacatgttactattttatgtatgattcggtcaagacctcttactgccgcttccataaaaagtcgtctctgagtcgccctgagcttctacttattggggctctttcaggtcttactgcaagcacgatcagtttcccgctggaagtagcaaggaagcgactgatggtcggcgctctgcaggggaagtgcccgccgaacatgattgctgctttgtcagaggtgatccgggaggagggtttcctggggctttaccgtgggtggggggcgagctgcctgaaggtcatgccaaattccggcatgacctgggtgttctacgaggcatggaaggatattcttctgtctgacagggacaggcagcacgcttagcgaacaagctgtttttgaacaatggaggcgttgtcgtagatggagtttgctcattttactgggagttctgaaccattttcagttttgggaatgggtagataggatgtgtttctcttttcggctgagtggaagcatttgctgtgtcatcaattctgaatctgattgatttataggttaagaaacggacttcatgaactcctaatgtatatctatcatctatgtatcctatataagtggaaccgctaagtgtcttctctggactattgtttagctaatcgagctgactcagacatagtttggactttgggaaactcctctaccaaccagtttgagctagacatttcattccagcagagctcttctaattgtattattcccaaccagtttgggaaactcaaactcttattttgaaatatacactgtttgct

SEQ ID NO: 2623 - DNA, 995 bp, Zea mays
  Clone ID: ZEAMA-23APR03-CLUSTER409742_1
ttttttttttttttttatcaaagactgattttactccacatgatagatgtttcgccattacaaaccgctcagcaattcaactatttaaaggtagcaggcattcaagaccagggcatcactcaaaaacaaaaccagtagcatttctgtaagaggggtaactaaatgggacgacataatgttttccagatcaaccaatcccagtaccaagaatccagcagcaacaggtgggcgaacaaagattctagatcttgttgaaggcaacgatgtcacacgactggacatactcgttgatgggcgcctcacagagcacttcctcaataagggtgtcgacagacacaaggtcgtcgatgatcgtcagcatgatctggagcttcttgatgccataacccacaggcataagcttagatgcaccccaggtgagaccctccatttgaacactgcggacagcctcctccaacttcttcatgtcagtctcatcgtcccatggcttgatgtccatgaggacggaggatttgccactttctttcttctttgcaggcttggcagcctcacgctcagctgctgctttcttgtcctcctcggtctcatcgccgaacagatccatgtcatcgtcatcatcttcatccttggaagcagcaggagcagctgcagcaggagccgaggatgcactcaccccagaggcctggccagggaaccttgaagaaacggccgcggcgacggcgtcgtaccagcgggcagcgttcaggaactcggcgctgggcttcacgggcaccgccgcgaacaccttgacgtcgtccttggtgatcccatcgccggagatgtaggtcttgccggcgaggtgcgcctcgagggccttgagcccgtcggcggtgtggaggtcggagaacgtgacggccatcggatccggcgagctcgggggcttgtcgaattcgctggggggcggcggcggcggcgctggaggctaaaatcccaaaaccctagcgagaccgagagaa

SEQ ID NO: 2624 - DNA, 915 bp, Zea mays
  Clone ID: ZEAMA-23APR03-CLUSTER409858_1
ttttttttttttttttcatgacagaacacatcgacattcaacatatccaaatatgtctgaacaggaataggtttcacaaagacaagcatcaggcacgttcttgccactacatcgaaatgttcattccataaaacttaacgcatagctaaaacagttctagatatcttgtaaaacacattcacttcaaaatctccagccaaaagcgagaccctcagatgcacatccatcttaacggttagccttggcaacacgctcaatctcgtccttcttcttgatggcatagctgttggatgagcccttggcagcattgatcagctcatcagcaaggcactcagcaatggtcttgacgttcctgaaggcgctctccctggcaccagtggtcagaaggtagatggcctggttcaccctcctcaggggggagatatccacagcctgcctcctcacaacaccagcagacccaatacgggtagcatcctcacgtggaccactgttgatgatggcatcaacgatgatctggatggggttggcgtcggtgaggaggtggatgatctccatggtgtgcttgatgatgcggacggccatgatcttctttccgttgttgcgcccgtgcatcatgagggagttggtgaggcgctcgatgatggggcactgcgccttgcggaagcgcttggccgagtagcgaccggccgagtgcggcaggaaagtgtagtgcttcatcgacgtcaccgcgaggtagtcgttcagcgagatgtcggtcacctgaacatcctcgaaggtccagcggttgaagagcttcacgtcgcccccgggcaccggctccgcgaccgccatggctgagggtgtggtggggggaggggaggtggcggcggcgggtgcaggggagttggaaaacctagtggaatcggcgcgcggggc

SEQ ID NO: 2625 - DNA, 1581 bp, Zea mays
  Clone ID: ZEAMA-23APR03-CLUSTER4117_5
agttccgcggttttgagtaaacaagcgagcgaaaaaataagaagagagagaaaaagaaaaaggagaggcctcggcctgtagtgggattgtgggaagatgcctcgggatggcgcgcaggcggcgccgccaccggagcgcggcgagatggacgaggtggtagaggcggacccggatacggaggcggaggatcaggaggagaggtgggcgaggctgctgccggagctgctctccgacgtggtgcggcgcgtcgaggcgtccggcggcgagcggtggccggcgcggaaggacgtcgtctcctgcgcctgcgtgtgccgccggtggcgggaggccgccgtctccgtcgtgcgtccgccggcggagtccggcaagatcaccttcccctcctcgctcaagcaggtcgattgcatggcttcccttatatggcgtcatcagcggttttgatacgtaccggccattcagatatttaggatatagtttgagaagtttcctggccaattcagtgtcgtagtgttttttatttgacatctgtgtacctaaatcttacaccatttctcaaaacacagccagggccaagggagagaccaatgcagtgctttatcaagaggaataagaacaactctacattctacctctaccttggcttcacaagttcacctgtggataaagggaagtttctcatggctgctagaagatttaggcgtggtccccataccgagtacattatatctcttgatgcagaagacttatcacaagggagcaatgcatacatggggaaactgagatctgatttctgggggacaaacttcaaaatatatgatagcaagccaccatatgatggtgctaaagcatcaagtagtcgatctagtcgtcgtttcggaagcagaaggattagtccccaggtatcggctggcaattatgaagttggacaggtttcatacaaatacaacttgctcaaatccagaggccccaggagaatgtattgcactctcgaatgcccttcagcccaagagacttgggaaaactcactcaagacaaagttcaggcgccccctgggccccacaactttacgaaataaagcaccccgctggcatgagcacctgcaatgctggtgcttaaacttccatgggcgggtaacagttgcatcagtcaagaatttccagcttgtggctgctgccgaccccagtgagcctactaccaacgtggatgatgaaacggttctgctgcagtttggtaaggtcgatagcgatatgttcacaatggattaccggcaaccactctccgcgtttcaagcatttgccatcagcctcagcagctttgggaccaagctagcctgtgaatagcgatgcagtttgatgctcttcgtgtggctatatggtttgtgttggtggttgcttgcttgtttcttgttgttacgatgtgatccgttcttcgttttagttgagtatttatgtactatttgtaccacaagagatgtaataaactattgtattgtcaaacggatttgttcaaggaaattatgtgtaatgaacttttgctctagttccatgcaaaagacatttcaatgtacatctgttcatggtg

SEQ ID NO: 2626 - DNA, 1075 bp, Zea mays
  unsure (1)..(1075): unsure at all n locations
  Clone ID: ZEAMA-23APR03-CLUSTER411817_1
natttctccctccgccccaccccaagggggggggcccaccattttgggagaagggggaataagtggggggcccctcttttttttttttccccccacccgggggaaaaagggggggttttttcccaaaaggggtttaaattggggtcccccccccggggttcccccccccccccccctctcgagcccccggccgccgccgcccccggccgtactgccccccttttagggggaattgggtgcccgggccccccccgaggttgccgggtatcgataacctttttttttttttttttgagatctgacttcattattctatcgatccggaagctagaacaaagaaaaccttgctttgcttgccctacaggctacagctactctgcctgctggtcgcagcggcgggccgcccgaggacacggtccccgcgctcaggcggcgccggcatcgtccacgccgacggcgggcctctcgacgtcctccatgtgctcctcgcggacgaacaccgcctggtccagcaccgacggggcttgcccgcgcgcgccgccgacgtcggccacgcccccgtcgccgggcccggacgactcctcgtcggccgggacaaagacgcccgtctcctggtcgggcacccactcgtcgcccgcgccgcgccgcgcgtcggccgggaccagcgtcgcggagccggagcggtcgacgtcgaccacgtccgcgttcttgcggttcagcgccgcctccacctgcgccgccgtcgcgtcgccgtggccctcccgctcggtggcgctgctgctcttgtggggggagctcggacgagctccttcgcgcctgcagcccgaggagagaagggcgagcccgtcctgaccggccgcacggcggccggcgacgagcgccgctctcgtggccatgtacaagcagcagtcgcgctgatcggcgaagaaggcgcaccggagactgactggagaagtaacccgtacggacggtcctttcaacttcaatcctgctctcggtcggtctcgatggatcgatctttgttttctgctctcgatcgcggggccacgctctcttacaacaaacgcccgggcgg

SEQ ID NO: 2627 - DNA, 2658 bp, Zea mays
  Clone ID: ZEAMA-23APR03-CLUSTER4124_4
aaggaatcccaccccactcccgagagcagcgaggaaggcgtgtgctttctctagtctgtgcagtgcaagcgccggtgcccgccgccgccggcgcggccatgtcctccgcctcgggcctcggcgggaaggaggtcccctccgccttctccgtggacctcgcggccgccgcgcgccggctgctgctcttcctccgcgcggcgccggccggggtgggcccgcggtccgtgcggaggtacgaggagctgtggatgccgctcgcggcggagaaagcaggcgtaggaggagaggcggcgatgctggtgccgccgcccgacgtgcacctcgtctggctctgccactgcttccaccatgagagctactccgcgtactgcacgtcgaggtttggacgcctcatcaaccgtccatcaatttttgatatggagaatgaagagtatgctgaggatctttgtcgagatgtctgggctactcatttcccatccgagccatttgaccttgactcgaatgagattgatggaaacagtgttgataatataacatgtgacagtgtcaatggtgaaattgtcaaaatggtgagacagtacgctggcctagcagaccgttttgcctcactctttgtgcaggaaggtgtctaccatgttgctgctaggcggcgatatgtgcgtttcctggaccttatgaagaaggttgcgtgtgcaacccaagagtgcacacggcttgtgcctagcctagacatattactgatgtggcttgctcaccagagttttcctgtgtgttatgccacggatatggtagcgatgggcatcagtgacaatgttgcaaaagtgggtgtttgttatggcgaagtggtgagcaatgaggcggtaaggaggacaaaggaactgtgggaggatgcatatgatgaaccatatgatatggctggatcagaggttgatgtgggagcagttagcacagcaagggaggcattttactgggtgccagcagcatcagaggaggatgccaaccggctatacaagagtttgcagccaagattccttattgaggtatatgtgttcttgaagggagaatttgataaggagcccaccagcaaggagttcctacgattgcgaacacagaggtgtcacagatcactaaagctcaacatatcaatgtccaatttatcctgcaaaagctggcagaaagtatggcacttgtattgtgaatttgcaactcggggcctcttcattgagttcaggcgcacccttagtgggtgcttcaggaaaagcaagttcctcaagaacatctcattctcatggagcgatgtgttgcatgagaaagcacttgctctcacagaacaacttgatgtcaggatgagagcgatggcatcaattacccctccagttcaagcaccatacttgttgaagtgtgtgcctgatcgagtcactgatgatggtggggccatgatttctgatgtcatattgcgcatgagaaattaccgtccccaagaaggacgttggctgacacgcactgtacttgatcacagtgggagagaatgttttgtcatccggatgagagtaggcagagggatttggcggagaggtgctgaaactcccatggcagtgaaatgggaggataggagcattgaggttcgagaaggatcatggtcatacattgctagtacaagctctgttggttatgctcctgatagtgggcacaggaacagtgatgaaagatcaactggagaataaggtagtttggagcttatcaacaggagatacgctgacaataagtttgggagatgaactcagctttcagttaaaaaatgacagctcagaagaagaggcaaggctgcttgtcgggaggaggttgagctacagagtaaacacagataatgcatcgagcaacctagtcgaggaggagcaatacctcacacttgttcgtaagtcaccgtatcatcatggtgacagagcaacagtgcttctaaactggaaattacttgctgtggagttcttacctgaagaggatgcagtttttgttcttctcctatgcatggtgattgcacggaccatgacagagatcaggagagaagatgtggctgggcttttagtgcggcggaggataagtgaagcaagggccgggcagagagactggggttcggtgatgcttcctggctcgctttcaccggatcctcatctgcagccttggtaccggaacgcaacgcaggttttgagctctgcggagacaggaccaatgctcacaaagtactcacctgctgacgggaaggacatgttgtacaggcaagctcttataccctgatgaagccctgatagagattattaccataccatcaggacttgcctgatagataaaaaaaacgaacccaatcttcctgggtatcgcagggaaattatttcatttcctcaatgctatgacatacgacatttgtacaggacaattttttgtggttcgagctgttgtttcactaatgatgattgtcctttcatacgaatccagtgattgctgtcatatattgtttgtactgagaattttacacatttcatttcaagtttgtctggtttctgtagtttgacaatgaactaaaagaagagcttatgtccatttgaacaaaaaaaaaaaaaaaaaaaaacgattcagaatatctagaactagtccgcacgcccc

SEQ ID NO: 2628 - DNA, 1674 bp, Zea mays
  unsure (1)..(1674): unsure at all n locations
  Clone ID: ZEAMA-23APR03-CLUSTER413428_1
gtggttttttttgagaaaaatttgtggcggggggttttttgagacaaaatttggtcgcgggtgtctgagttgtccccctttcgccctttcagggggtgccaacaactttgtggggaaggaggggattggcggggcggggcctcttttttccagttttccccccaacgggggggaaaagagggggaagattgcttctccaaggcgggatttaaatttgcgggggaaagcccaccgggggttttattccccgcgctcccgcngcgtttttgtaaaaaagcacccccccccgttgaagaccgcgccggttatatccggccctcccctccgccgcgggcgcgccgcgggggtgcccgccccccccccccctccggggggccggcccccccctggaggttgccgcggttcgccaacctttttttttttttttcttttcttttttttttttttttttttttttttttttttttttttttttttgcaagaaaatataaattaacatattaagaaacacaagttgctgctatcttcgaggttacatataaaatcaaatacaaagacggaggtgaggatggatttctatgtcacaacatctcgaacatgcatttcatcgaacatattgcatgtgtatccatccaggcatctatcggtgctgcttcatgccaaacgtttcaactgcacgacatctactaaataccaacagcctccacggatccctatccagtctcatctctcgtccctcatgctggcactgcttagagtgaaccaggcgatatgtagtggtagcgccacttcatcagagctgggggttgctcattccacaaggacgtagaggtctatcgcgaccgtggcggcgtgggtctgctcgagtcggcggctgctgtggccgctcatcctagatcgggcctctcgtggtaaataatggacatgacgtgggcgagttcagggcaaggacgacggcgcagacgcgaacaacgaggtcaatggcgccgtggcgcatatgcaacgagcgacttcacggtagggagaggtggaggcggcagcggtgtgggttagggtcttagggacttgaggcgcgtggagaggtcaaagtttttccataggatgtccaaggaagtggcctccggccaattccctcggggcccggggtattcatcagttccacccggccgcccccaggcccgccccccacctgtaagctccttattcccccttgaggggaggggttaattggcgcggcttgggcggtaattcatgggccaataactggttccccgggggggaaacttggttaatcggctcacaaaattcccccaaaaacaattcacgagccggaaaagccataaaaggggaaaaagccctgggggggggcccaaagggggggggagccaaactccacctttaaatttggcgttgggggttccacttggcccggtttttccaaggcggggaaaaacctggggcgggccccatcggcatttaaaggaatcgcggccccccccccgcggaaaaacggcggcttttccaaattgtgggggttctttccccttccccccgctcacaggaacccccgccgcctcgcggccgtcgggttgggcgggagggggatacctctcccccgcaaggggggaatacacgctcactcaccgaaaccgcgcggacaacgccgggaaaaan

SEQ ID NO: 2629 - DNA, 1300 bp, Zea mays
  unsure (1)..(1300): unsure at all n locations
  Clone ID: ZEAMA-23APR03-CLUSTER41381_1
acgactaaaagtagcacgagtaattaatcatgcananctcacatgcatactacacatgacggaagactcgatcaattcaagacacacatatatataccacgactcgcaatatttcttttccctttttcacaaaagaagcaagaaatataaataacaggacgaaggaatcaatcgtctcaccagccttttctagctggtcatctggaggctggagctatagctatgcgacatggctacggagtacggacgccgaccctggaagaagatggctgtcaccatccgccatgtgtgcgtggtgtcgtgtcgtggtccaccgcttgcttgctcaccatgcagcatcactgccagttacagacttacagttggagcgagcgatactgtcctcggagtcggccggagcgccgccgcatcacacgggacaatccgcggcgacggcgacggcgacgtcgtccttggcgtccctggacttgtcagtgagggccgcggcggcggttggcacgactctgccgcggaagagcgggcacgtggtgcggcgccgcagccacgtgcccacgcagtcggcgtggaaccggtgcccgcaccgcgggaggacgcgcaccgagtcgccgtcgcgcagctccacgatgcacacggcgcactcgggccgggccttccttccttcctcggcgccggcgctggagtacacggacacgggccagggacgacaccacgttcttccatcggcgtcgaccgtgcgccgtggccctcgatacggtagcgggacgcccatggggacgccacgggcagtgagtcctcgtcgtcatcgtcgtcggcgccgtgtgacgtggacggcccccctttcccagagaagaaccgccagaagaaaccgaagacgagcaggatcacgagcacgttggagcccacgacgcaggccgtcagcaccgcgccgtgcggggcccagtggccttccacctccggcgccgccgcagacgcaccggcagcagggctaagactaccgctcccgcgcgtggacatggcttggttttggacaacccaaacagcagagactcgctgccaatggtgtgcataaaccacaacaattgcgctttcttagaagctaataccttccttccaagaacaagatgttgatcaagtttgcaatcgaattgggagaacaagtcacaagcttgcaaagtctcttctgagaaattaagaagcaccaaattaagagtaagagagataaggagagagaagaggggagaagatagatagccaagaacaagaatggctgaagagaaaggaggaagctggcgtgctgtgt

SEQ ID NO: 2630 - DNA, 937 bp, Zea mays
  Clone ID: ZEAMA-23APR03-CLUSTER4138_5
gccatttccctgcgcttctggaactgttgttctaaacccccaaaccctaacggcctaacctctgcgctgccggcgtcgccaccgccggagctgcggccatgaacgccttccggttcctcggggacatgacccacctcttctcggtcctcgtgctcctcctcaagatctacgccaccaagtcctgctcaggggtgtcgaggaagacgcaggagctgtacatgttggtgttcgtggcgagctcggcggcgattgtgtggtgcatgcgccgccacccgcaggtacggaggacttacgacaaggagcaggacaccttccgccacgcggtgctcgtcgccgccgcgttcctgctcgcgctgatgttccacgaccggttcaccttccgagagatatgctgggcattttcgatctatttagaggcagtggcaattctcccacagttagtgttactccagagaagcagaaatgtggataacttaactggacaatatgttttcttccttggggcctaccgggcattttacattctaaactggatttaccgttatttcacggagggtcatcacagcagatggatcccttggcttgctggtttggtgcaaacagctctgtatgcagatttcttttactattatttcttaagttggaagaacaacgtgaagctcgagttgcctgcttgagcatgcttcgtcatgccagaaagtgtgcatgctacatgactcaagttttctagaaatttgtttatatgggcatgggcatggggagacctgcgaaaattgatatttgtgtttccatggcaaagtcgatacgattcgaaagctaacagatgctgctgcacagaagtagactagttcctttttgtacctcgatacttttgatatggaaaatcaaaaacagttcagttggtctgttgtttaaaaaaaaaaaaaaaaaagcggcc

SEQ ID NO: 2631 - DNA, 2247 bp, Zea mays
  Clone ID: ZEAMA-23APR03-CLUSTER413_6
gcacgagaccattacctagaacatcctaatcaaaaagatcgaggcagggcgccaattgcggtggccaccacttccaatccactccccgcgttcgcctcgccgagctgttcttgctctgtcctctctccaactccacgatttgttccacacccggttcccgagcctccgcagcgcttcttgctgaaaaagggaactccgagttctccagctctggatcggcagagagcggtggttccttttgcggactctgaggtccagttcttgtttttgatttgtctcatcaacccaccagtcgggctgcaggcttagagctggaaggaataatttgactagagaaatggggcagtgttgcagcagagctacggccccggactctggacggggaggtgccaatggttatggctattctaaccaggcaaagccggcgcaagcacctccgagtttacaaccctcctcagcaggcggccgaggtgaggtacacaccatcggcgacgaactcttcggcagtcccacccgtggctgtgccgccgaagccaacggcggacacgattcttggcaagcagtacgaggacgtgcgctctgtctactccttcgggaaggagcttggccggggccagttcggggtgacatacctctgcacagagattgcctctgggaggcagtacgcctgcaagtccatctccaagcgcaagctcgtcagcaaggcagacagggaggacattcgaagggagatccagatcatgcagcacctgtctgggcagccaaacattgtcgagttccggggagcatacgaggacaagagcaatgtccatgtggtgatggagctctgcgcaggtggggagctcttcgatcgcatcattgcaaaggggcactacacagaacgtgcggctgctacaatctgcagagcagttgtgaatgttgtcaacatttgccacttcatgggtgtgatgcatcgtgatctgaaacccgagaacttcttgcttgcgaccatggaggagaatgcaatgctcaaggccactgattttgggctttctgtcttcattgaagaaggaaagatgtacagggacattgttggaagtgcttactatgttgctcctgaagtccttaggcggagctatggaaaagagatagatgtttggagtgcaggtgttattttgtacattcttctcagtggcgtgcctccattttgggctgaaattgaaaaggggatatttgatgctattctgcatgaggagattgactttgaaagtcaaccttggccatcaatttctgagagtgctaaagacttggtgagaaagatgttgacacgagatccaaagaaaagactgacttcagcccaagttcttcaacatcagtggctcagagaaggtggggaggcatctgataagcctatcgacagtgctgttctatctagaatgaagcaattcagagcaatgaataagctgaaaaagatggccctaaaggttattgcttcaaaccttaacgaggaagagatcaaggggctaaagcaaatgttcatgaacatggacacagacaatagtggcacaatcacatacgaagaactcaaagcaggattagccaaacttggatcaaagctgtcagaagctgaagtaaagcagttgatggaggctgctgatgttgatgggaatggatctattgactatgtggagttcatcactgccacaatgcatagacacaagctcgaaagggacgagcatttgttcaaggcattccagtactttgacaaagataacagcggcttcatcacaagggatgaactggaatctgctttgattgagcatgagatgggcgacacgagtacaataagggagatcatatcagaagttgacacagataatgatgggaggattaactatgaggagttttgtgcaatgatgagaggagggatgcagcagccaatgaggctcaagtagcctgttcccttaatagaaacggtgtaccactagttactgttcactttttttcttcatgtttggtacttggtagtcggataaagcttacaatgggtgttgctttttgtattgttgagagatgattgtctatacctttttttccctgtttgctcgtgcttgttgcattgtagttcccttaaaaaaaacgggggaccccaaggtacggttcccttttttttttcatgtttgggacttgggaggcggataaagcctccaatgggggttgcttttgtattgttgaaaaataattgtcaaaacctttttttcccctgtt

SEQ ID NO: 2632 - DNA, 1863 bp, Zea mays
  Clone ID: ZEAMA-23APR03-CLUSTER41481_1
ttttttttttttttttgggagactggaattttttaaagaaaaagtcaacaactctccaccatatccaatgggccaaatttcaatggcatgtatcacatcacaagcaaaaacaaattttcatatgagagactggaattttttttaaagaaaaagtcaacagctctccaccctatccaatggaccaaatttcaacggcatgtatcactccaccaacgagacgcacgagtgcgactactgattccgtctagaaaactcttgtcttgttaagctggcctctaatcgtcttgtgatcgttggatgtccatcgggtgaaatattatgttattataagattgtataatatcatttgcaattttagttgcatccatagaaacaccaagtagaccacgtctcgagaatccagcagcatatagaccattctttcctttccactcatttggtctacatggaaatccatctttccgtgaaaaaaattcattttccttcaaccaatatggaacattacttttataaccagttgcaaaaataacaacatcgaatgattcgattctaccatcaataaactctacaccatcctcttgaaaacttttaattcccggaaacacttttatgtctccggatttgatctttgcaatcgtgccaacgtcaagtaccggtgtcttaccagacaattgttttagttccattggacctaaattaggtcgaggaataccgatacgcctggtgtcacctagaatgaaccaggctagtacaagaaggatttgatccactactttaatattaaaaaatgtctgaagccacaaggacaatgtaaatgtagagattcccagtatctctcttggaaggacgtgtcccgaatcacgcacaaccatagaggtatgcacattgtagttggcaagatccagcgacacctccatgccagagttgccacaaccaatgacgagcacatttttgccttgaaattcctcgccgttgcgatagtcgcttgagtgaaagacttcacccttgaagcttcgcatgcccttaatctcaggtaccaccggctcagcgttttcaccagtggccacaattagccatttggagcggtactccatagtgcaagaggaaagcatagaccctccaacattgtcgctggtatccttggtgcgcacgcaccaatactcaccgtcgtactcggcgctgacaacctccatgttgaagaaggggcggatgccgtgctttcgcttgtactcatcgaggtaggccagaaactgctgcctaaccgggtatgtggggtagctatgcgggaagggcatgagcggcagctggcagtagcgcttgggtaggtgcaaacacagcctatcgtacgtgcggcggtgccacgttgatgcgatgcacatgtcacgttccaggatcacgtagggcaccaatcccatggtgagcatcgccgcgcatgctagccctgctggtccagcgccaacgatgaggggcccccgtagcacggccacaccttggtcgccgatggggatgccggttgcggtggccctcgcggcgctgcgcgggctgtacatgagcaggtcgtgctccatcttgcccccagtctccgtggtcagtggatcctgcaccatctcccccttaccagtctcgacaaagcggtcccacctcacctcagacttggcgatggagcgttccatgccaggcgatgctctcgcagcgctcgctcccgcaaactctctagatacagatgggatatgcttgcggtccctcctcccctcggtctgggtgatgaagcggtccatgtcggatggtgctctcgcaatgctcgctctctcaaactctctggatattgatgggatatgcttgaagatggtgatcgagctacgc

SEQ ID NO: 2633 - DNA, 1998 bp, Zea mays
  Clone ID: ZEAMA-23APR03-CLUSTER41520_1
tttttttttttctttttttttttttttgtaaaaaactgttttcaatacaataacacgcctgatcctcactgctgcaacactgaagctgcaaagtagcctgtaaaccaaaactacagatatcgagacagatatgtacatggccaattgctaaacaaagcaatcattaggctaataattagcaagggggggccagggggagggggagcataacctacagaagatctactaactgaagacctccaccactacaactgttggagtagcggacggcagagaggggaacttcccgtctcctcccaatgccgaaacccccctagcttcttactcacatagccccctagcttcttactcacattgcgtgtgactgcttggtataatcagcctgcccatatgagtaataatacacatcattccttactcggcagttcctccagccattgattgcaacgttgtgttcatccgtttggtgctttgatttcattggttttgagctgatggggcctccactatccctggtgtgtcttctacccgagtggctgttccgcgttctccagtgagtccagtgttcatatggcacgccgtggccgtcaggtacctcatagctaccttgatggctctgcaatatatcggcctgaatagctgcaggatcccagccgtaatcatgcttccaagcattctgggaaccatccctcataatcgagaggctaatgcaagaattcgtctgctccccatggctgctggtttgatcctgctgtttccctgagttttgctgaccagttgtttgagcaggtcgcttgactgaataatcccaatttgccgacatctgcttatgatttgcttcaactgagtgttttagctgattgccccaatttacagggacctgctggccatcagtgaagctggtctccgtgtcaccccatcctgtaactggaactgtcttgtcagagaaaataaaagagtcccatacatcagaaacaccattatcttttctgggaacacgacgacgtgacctctccagatcagccaccaattcaggatcaacatactcatctgggttgattatatcaataaacatgtctgggtcaggcaagggatatcataatgttgaccatgatatacagcgcagaagcgcgcctttgcatcgttgaaggcttctaatgcagccgagtcatcccaatcaaccacacttttgtacagagacatcaatctcttggtctcacacagtttagcccaggggatagcacaagcatcaatgcaaaaattcttttcccacatcggaactgacaaatttaccctgccctgagagcgcggccgccgccggggcttgcggggctccctgtagatcggccgcctctccgccatggacggccgctgcggacctctcctctcctctcacggcccaacccctaggcggaacacgagagaaaagacgcccagactccctcccctccactccagcgcccgcggacgcaacccgcagagcgacccaaaaggcgcagaccgccgagcaccagaaacggcgcgcccggttagagtcggagtgaagtgggaacgcgtgggggaggaggcggatttgccggtttgggtggcgtcgttggtttcgctcgcggccgccgccgaggggcgggggtgtctgcaaagagtaggaaaagctgtgaaataacacataagttgccctctcgctcacgaacgggagcgggacggaggcgagccggaagacggggtcggagaaggggaggaggatgtgagagacgaaggggccggaggtggggccgtggctgatgacggcgacgacgaggaggaagggagccagcggatgaggtcgacggaggaggcgagcgggcccgaccacggtggtggactggagacagagggggatctggcgagcacgcatggggagacgaagatagagttgaccacgatgggtgctgacaccttgcggcggagcggctgcgagcctggctccgtcgagcggcggcggcgtggggagtatgcgag

SEQ ID NO: 2634 - DNA, 2020 bp, Zea mays
  Clone ID: ZEAMA-23APR03-CLUSTER41536_1
ctattcttcttctccagtgcaaaccggcgcttctcgcgccgtccttccccttctccttgcgcaggttcaggcctgaccgcctgagaaactggaaggtggcggcgacctcgggggttgatcggcgacttgggtcggattagtttccggaagagcactggaggagaaggcctgtttggagcaaatttcgatggcaaccggcgagaccgccgtggatcgtcgcaaggaccctctcggcccccgcgacatgcatttgtcaggggaggagcacgtccccaaggcgcggaagccgtacacgatcacgaagcagcgggagaagtggacggaggacgagcaccggcggttcctggaggccctgcagctgcacggtcgcgcctggcgccacatacaagagcacatcggcaccaagactgccgtgcaaatccggagccacgcgcagaagttcttcaccaaggttgtccgagagtcatcgtcaggatgtaacgcctctgcgggcgccgcgccggcgatccaggtcccgccgccgcgccccaagaggaagccggcgcacccttacccgcgcaaggtggacggcgcggccaagaatcccgcgccggagctcaagctgctggagaagctgcccccgcgcgaccgggatgaagggtcgccgacatcggtgcttgcctcggcgcgcacggcgtcgcgagcggaggtgttaggcagcgcgttcgcgaacagctcgagcgccagcaggtcgctggccctttcagcttccggtttggatgagcgtggtgacggcggcggctcgctggtctcgtcggtggccggggagcacggctgcgcatcgccaagaacgagagcgccatataccaaggtgctcgttgaagcaaacgaagtgtcgcatctaggaccggaagctccagtcttgaagctgttcggaaagaaagttgtggtgaaagacctgaaaacggactattcacctgcggctgcgagcgttgccaaggcaagcagagaccataatcctaccggtgccgcaggagcgagctcatggagtccgtgggccgggcagcgtgcaggtgcagcagctcatgtacttcgttccccagcacgacggcctagcggcgcagcccgtcgctccgtggttcggctacagcgggagcgtgccgtgcgcggtgttctacccgcaggcggtgggttcagctcaggagcaccagcaagcttcagagcctctggatcacaaacgcgcgcagagggaaaggtccctgacaggttcgaacatggcctccagcgccgcgtcggcggcgcagaactcggacaccgcgcagtcccgccacggccccgggcaagaaaacaccggcgacggctgcgcggcgctacgggctgccatcccgcggctggccaagtgcgcgagttcggcttccttcagcgggagagggttcgtgccgtacaagcggtgcgcggccgagagcgaggcgccgcgctcggtggcgcccggagaggaggatgacggcgagctgacgaggctgtgcttgtgacaactgacaagagctgaaacctcggtgtaaagaactcacgacgcactttttggatgttgagctgctgctgacatgcatggctgcctgtacatgctctgcagaagcagctagcctgggaacaggttttccaggagagacggatgagcaactctggttctttacccctcggtatatacgcgtatatataggcaaaatctgtactcatattccgcttttgttcactacttgtgtaattttttccccaacatgagatagagagggttgtgtgtgtgtgtcaatagtctgaccacatgtaaattttaggtttgtactatctggacgaaatgtaatagggagcaggcggaatgagccacttttccaactcgggagatccaggggcctatggcagactgtgctaacctggatctcagagagagttgtgtgttgtcaatagtctgaccgaccgcatgcaacaacaaatccagaaaggaacatggtgttttattaaaaaaagaaaaaaaaaaaaaaaa

SEQ ID NO: 2635 - DNA, 2011 bp, Zea mays
  Clone ID: ZEAMA-23APR03-CLUSTER41536_2
aaatctgcccctacgtgaaacgttcccctcctctcctcgccctccttgcgcaggttgaggcccgaggtgtagtgcaaggtggcgacctctcggcggcttgggtcggattgttttcgggaagtttggtctccagtgacccgagcactggagatgccctgtttggaggtaacatctacgatctcgcgttgcttgtattgttttcctggcccggctgggagaaagatcgtatcgaggttgaaattcactcgagccgaagcccccgattggtttgaatggtgtaatcgccttcttgtcggggagggggggtctgaatcgtggatcgatgtttcctctgcttcccgcagcaaattccgatggcgaccggcgagaccgccgtggatcgtcgcgaggacccccgcgacatggatttgtcaggggaggagcacgtgcggcccaaggtacagcggcggctgcagattccgtggcgatccgcgtgttctcactcttttctcccacgcttgcctgaccaggcgcggaagccgtacacgatcacgaagcggcgggagaggtggacggaggaggagcacggtcggttcctcgaggccctgcagctgcacggtcgcgcctggcgccgcatacaagagcacatcggcaccaagactgccgtgcaaatccggagccacgcgcagaagttcttcaccaaggtggtccgagaatcgtcgccaggaagcaacgcctccgcgggcgccgcgccggcgatccagatccccccgccgcgccccaagaggaagccggcgcacccttacccgcgcaaagcggacggcgcggccaagaagcccgcgccggagctcaagcggctggagatgacgtccctgcgcgaccgggtccgggacgaagggtcgccgacgtcggtgcttgcctcggcgcgcacggcgtcacgagcggaggtgtcgggcagcgtggtcgcgaacagctcgagcgccagcatgtcgccagccctgtctgacgccggttccgacgagcgtggcgacggcgacggcggcggctcgctggcctcgtcggtggaccgggaggacggctgcgcatcgccaaggacgagagcgccatgtaccaaggtgctctgtgatgcacacgaagtgtcgcgtctaggatcgggagctccagtcgtgaagctgttcggaaacaaggtcgtcgtggtgaaagacctggaaacggacactccgcctgcgagcgttgccgaggcagccataaacgggagccctactaacggtgccgcaggagcgagctcgtggaaaccgtggccggagctcacgtgcctcgttccccggcgggacggcttcgcggcgcaacccgccgtgagcccgccgtgcgcggttttctactacccgcaagggcttcggctcaggagcaccagcaagcttcagagccgctggatcacagacgcgcgcagagggaagggtcgtcgccgacaggttcgagcgtggcctccagcgccgccgcggagtcccgccacggtcccgtgcaagagaacgccagcgacggctacgcggcgctacgggccgcaatcccgaggccgaccaagcgcgtgagctcggcttccttcggcgggagagggttcgtgccgtacaagcggtgcgcggccgagagcgaggcggcgcggccggtggcactggcactggcacccggagaggaggccgacggcgagctgacgaggctgtgcttgtgacaagagctgaaggcggctgcaatgcacatgctctctgctgaaacaggtaaccccggtttcccagaaatggatgagcaacaatgctggttctttgctgctcggtacatacgcgtcgtatataggcaaatctgtactcgtgttccgcatttgttcactgtgcgttcgtgtaattttttctccaactcgggagatccaggggcctatggcagactgtgctaacctggatctcagagagagttgtgtgttgtcaatagtctgaccgaccgcatgcaacaacaaatccagaaaggaacatggtgttttatt

SEQ ID NO: 2636 - DNA, 951 bp, Zea mays
  Clone ID: ZEAMA-23APR03-CLUSTER41557_1
agcccaccccccaccagctcgccatagttgattcatacacaatacaagcatcctctctactactgaagagatcaaattccattcagggtagatagaaatggcatcctccagcttttatcttctcagcgttcttctcatcgtgatcgcttctggcgcctgggctacggatcctagtcctctccaggacttctgcgttgcagacaaagaatcgcctgtacttgtcaatgggtttgcctgcaaggatgctaaggatgtcaaggtcgacgacttcttcctagcagccgacctcgacaagccaagggatacgacgatgagcaaggtcaagtcaaatgtcacattgatcaatgtgatgaagctggccggcctaaacaccttgggcatctccatggctagaattgactatgcccctcaaggacagaacccaccacatacgcatccccgtgccactgagatcttaactgttcttgaaggatcactctatgttggttttgtcacttctaacccagacaacaaattcattagcaagctactcaacaagggagatgttttcgtgttcccacaaggtctaatccactttcagttcaatccaagtcatgacaagccagcggttgccattgccgcactcaacagccaaaaccctggtgccattaccatttctaacgcagtatttggatcgaaaccaccaatcgcggacgacgttcttgccaaggcatttcaggtggacaagaaggttgtggattggctccaagctcagttttgggaggacaaccataactaagtgaagaggctattgcccttgtttttacacaccgatgtaataagtaacaccactgttttcattcatttgtttgatgtagcaaactactatataccttttgccatacatatattatgttaaaatgtcaaatgaccacagttacaaacgtaaaaaaaaaaaaaaaaaaagcggcc

SEQ ID NO: 2637 - DNA, 1226 bp, Zea mays
  Clone ID: ZEAMA-23APR03-CLUSTER4164_1
atttttaaattattgtttatgtaatctaaagtttagaaaaggttgtacctgagacgaaatccgggcggcagcagccatcggaggctgggcggcagccgccagcctcccgctcgcacgggagccacacacggacaccacgctgcgttcactcgcaaccgtggcccgtggcccgtgggtttcgcctgtggtcaccgcgaggccgcatccagtcgcccatgccgccttccgcatcgatgccggcgacgcacacggccgtgtacgtggcggcggtgcccctgcgggcgcccaagggccccgcccagctgctgatgtcggcgggctactcgctgggcatgtgggacctgcagcacttcatggtgctcctccgtcccgacccggcgctggcccaggcgctggtcttcgatttccagccgcgggacccggaggacgtcctcgccgcgctcgcggtgctgtcgcggagagagatccctggcgtggttcgcagaagaacgctgcggagggtcccggacgggcggtgctggctcgtggggcactgctgcgacgccgtcggtgccgccacaaggttcagcgagcggtggacgaccggcctggtggtcggggagcacgactgccgggactacaccaacggtaatctgtcagcactctcatagtcgtcgccattgcaaaatcgttgtgtagtgcgatccgtctcatatatcctctctttgtttggtggatcgctaagggctggtcgaggtcctgacaggtgaaaaacgtgtcctggagtcgctcagattgcgcggcaacggcagcagcaccagtggggcggcgccgccgtgatggatgatctaaactgtacggactacggtcattatcggattctataaactggagacccaacacgcaatgcagaaatttcatggaaacgaggagacgttttgaaagggaaaaaaaatgaggagagaaaacaaagaagctactactcaagacaaggcgatggtgtaacgaagaaatgaggccacttgactagttgactgtgaaagatactagaggtgctacgtgaagcaagaaattagacacgctatgtggagaagcaccgttgactaagtaaacttaggaggtgtttggtttgaagaaatcaatctattctaaatgaggtggtatatcatgagtctattatacaaattttgtggaataaacttattctttatattattactaattattagcccaaaaaaaaaaaaaaa

SEQ ID NO: 2638 - DNA, 1755 bp, Zea mays
  Clone ID: ZEAMA-23APR03-CLUSTER41839_1
atccaccaccacctctctaccgcgcctgcacccatctccagctctatagcagcaccatctctaccgccgcacccagctctagcagcagcagcagcacctcctcctccttggtgaaggccggcccgcgccactgcacgagcacgcacgaacgcacagagacgggtggccgccgtaccgacgcccgcgcgcgcctccaggtagactagactaattcgtttacctctctctttctctctctgtgtgtgtgtgtgtgcaggaaaaagaagggagctgtgctaaaatttcttggaggggagggggtagatgacgtttggtagcgccgacatggaggccggcggcggcgagcaccgccacgcacaacaggaggaacagtcatcatccgacgagcggcgcgcgcggttcgcggaggactggggctgctgcgcctgcgcctgcgcggggttattcctggggcccaacccgatggtggcgcgctacctgtacgcgctcatcttcctcgtcaccaacctcctcgcctggacgctccgcgactacggcgactccgcgctcgccgagctgcagcggctgaaggtctgccagggcgcgcgctactgcctgggcgcggagggcgtgctgcgggtcagcctcggctgcttcgtcttcttcttcgtcatgttcctgtccaccgtgaacgccaggaaggtgcacgactgccgcaactcgtggcactccgagtggtggccggccaagctcgcgctctggctcggcctcaccgccgtcaccttcctcgcgccgtcgccgctcgtccagctctacgggaaggtggcgcatttcggagcaggggctttcctggtgatccagctgatcagcgtcaccaggttcatcatgtggctcaacgactggtgccgcgcagaaatgacccagaagagataccacttgcagattcaggcggtgtccatcgtcacgtacgtggggtcgctcctggggatcgtgctcatgtacgtgtggtacgcgcccagcccggcctgcaagctcaacatcctcttcatcaccgtcacgctggcgctcgtgcagctcatgaccttcgtctccatgagctccaaggtgaaggcagggtacgtggcgccggggctgatggggatctacgtcgtgttcctgtgctggtcggcgatcagaagcgagccgcacacggaggtttgcaacaggaaggcagaagtcgccacgagcgcagactgggtgaacatcgcgagctttgtgatcgccgtcgtcgtcatcgtggcggcgaccttctcgacggggatcgactccaagtgcctccagttcaagcaggcggagggggagtcggagtcggaggaggaggacgacatcccctacggcctcggcttcttccacctggtgttctccatgggcgccatgtacttcgccatgatcttcgtcggctggaacgcgaacgcgagccacaccatggagaggtggacgatcgacgtcggctgggcgagcacgtgggtgcgcgtcggcaacgagtggctggcggcaatcgtgtacatatggatgatgatcgcgcccgtcatctggaagacgaggcaggtgggatcggcggcggagacgtgagcagtttttttccactgattctgacagccggaatctatatatacatacaaacacaagagcaaatgaaaggccaagggacgggaaacgggaagaggtggtgcgtgctaactcctatgcatcgcattcctggatgttcattggtcaatgacgatgctgcactgctgc

SEQ ID NO: 2639 - DNA, 797 bp, Zea mays
  Clone ID: ZEAMA-23APR03-CLUSTER4196_8
ccctcctcacggtaacccttcctgttcaaggagactcggcagaatcagacgccgccggagtcttctaggcttcctcgccccttccacatcgccggcggcatcatccttgcgccgcccggccagatcacagccggtccgccgcttgcctgtagggaagagagggtggaggaagtgggggaggatgagcgaggagaggccggtgccgcggcgggagagcccgtggggtctgcctgagggcgacacgcggcagcccaaggctcaccgctgtaacgaccgcgccgaggacgtcgtccaggcttgctttgaagggaacccattcaagacagttccaggcccatttaagctcttctggcaatgcatgcgctcaaaacctggggaggaaccaaccgagccctatacctacctgcagctagatcctccgagaagggtggaagtgaatctggagcaaacaggaagtgaaccttgaacgagcatgccaatctcgtgccgatttgtcttcacctttcgagcagactttttcctcctagggatcacatcatgtgagcacaaagctgcatatgtttggatgtttatataatctacctaataaaccgtgatccccagagctgcctgtccaggctgccaactccttgaaattcccccccccccgtgtaagaattgtgcccctttcttctgaataaatggtgcacgcccaagtccacatgccgccagacatcagagctagtgcatctgaatggttgtgctcctgttctgaaacagagtgatccatatggtttttgtgtttaaaaaaaaccaac

SEQ ID NO: 2640 - DNA, 1713 bp, Zea mays
  Clone ID: ZEAMA-23APR03-CLUSTER41987_1
cttcttccctcggttcgtaacgcggggacggggatttccatacgtctttacttaccgtttactttggagcacatatccggtgtacatgaaagctttatacatatgctgcacatattaaatcatcactatccattttaaatttaacatctctgattgatcattaaaatttacaaataacatcttccaccactacagtccaccacgttggaagatgtccttaacaaatatactaaataactatagacgttagatctaaaataagtattgatgatttaatatatgcataatgagcatgtgcattagataccttctcttcctctcaatcttttccttccgccttcgtagttcccaccgcgccgcacccgcaagccagcatgtccgcatctacacgcgccactctttcccttcccgccgcaccgccaatggcttcgcgcctccgcctcgtcggcccgaccccaagcatagacgcggactccgctcagaacccaggcatctccggcaaggcagcgggtgaaggggagcgagtgggagaggcgaagacgccgcagccgcggcagccggatgtgacggaccttggcggcggcagcgaggtggtctacatccctcggttcgtggctcgggagaaggcgtgggagtggttcgactacctcgacaacgccatcccctggacacgccccgaaatccgcgtctttggccgctctgccatccagcctagagatgtgtgctatgttgcagatgaagggttgacagatttgagatatagtggccatcagcatcttccacattcttgggatgaattccccgtgctcaaggacatcttgaaagtgatacaagacaggttcagactacgtttcatggcatgcagacgatgagcccctctacgggccgactccagagatagcatctgttacctttgggtgtgaacgtgacttcttacttcggaagaagcctaccaaatcgcaagccacttctggatctggagaagctggtcgaaagcggctcaaggtcgatgcacctcagaagccacatcattttcttctgaagcatggctcgctgcttgtgatgagaggctacacccagcgggactggcagcactcggttccgaagcgagccaaagtgagctcaccaaggatcaatctgactttcaggcatgtactgcggtgacacactctctttagcatgccattgaaatcacaatgaagctgtcactgaattcgaatctaagcccaacaattttgagtggattgacaagcaaaaaaatagaatgttacgtgtgtgaagcctatccataaggagtagccagacaaaaactctcaacttattgcagcacttggatttccatatccaaacaaagtgatctagtggttgcatgtttctgtatagaagacgataaattttctttgagctaaaattgtgtgcccccatatgtaaatacattgatctcttgaattgctgaggatctgttcggttgcaagcattgcgttgagatcttggaattcctgatacgcttgtgaagacaggggtaaatagaagtgctactccaaagactgatgagatgaacttggagacagatgtttttgttcttggcataagagaagaatatgggataggtttgctgtagcaacttatcattctgcaacaatacattttgcaactcctctgtaaagatcttttagccaaaatgatgtccttccactagaaaggttctctttc

SEQ ID NO: 2641 - DNA, 1736 bp, Zea mays
  Clone ID: ZEAMA-23APR03-CLUSTER419_4
gcaggaggattaggaacttaggatcggggaccggcggagcccgacgaccttctcggtccacccgcccggcgatcgaaccatggcgctcggcgagggcggggatcacggcgccgccctgcccctcatcgcggaccaggcgaaacatgccgccgccggtggcatcgtccgaagcgggagcatgtggacggcagcggcacacgtgatcacggcggtgatcgggtccggcgtgctgtcgctggcgtggagcatcgcgcagctggggtgggtggccgggccggccgccatgctcgtcttcgcggccgtgacggcgctccagtccacgctcttcgccgactgctaccggtcgccggaccccgagcacgggccctcaccgcaaccgcacctacgccaaagccggtggaccgcaacctaggtagcagcagctcgtgggtgtgcatgcttctgcagcacacggccctgttcggctatggcatcgcctacaccatcacggcctccatcagctgcagggcgatcctgaaggcgaactgctaccacgagcatgggcatgacgcgcactgcgactacgatggcaactactacatgctcatcttcggcggcgtccagctcctcctctccttcatacctgacttccacgacatggcgtggctctccgtcgtcgccgcggccatgtcgttctcgtacgccttcatcggcctcggcctcggcctcgcaagaaccattgctaacgggacgatcaaaggaagcataacaggtgttcggatgaggacgcctatgcagaaggtttggcgcgtctcgcaggccatcggcgacattgccttcgcgtacccctactccttgatcctcctggaaatacaggacaccctgaagtcaccgccggccgagaacaagacgatgaagagggcgtcgatgatctcgatcctcgtcacgacattcttctacctctgctgcggctgcttgggctacgccgccttcggcagcgacgcgccgggcaacctccttaccggcttcggcttgtacggtccgtactggctcatcgacttcgccaacgcgtgcatcatcctccacctgctgggcgggtaccaggtgtacagccagccgatattccagttcgcggagcggctcttggcggagcggttcccggacagcgggttcgtgaacggcggctcctacaccgtccggttcgcgtgcctgcgggcgtgccgggtgaacccgctgcgcgtgtgcctccggacgctgtacgtggcgtccacgacggcggtggccgtggcgttaccctacttcaacgaggtgctggcgctgcttggcgcgctcagcttctggccgctggccatctacttccccgtggagatgtacttcatccagcggaacgtgcgccggtggtccgccccgctgggtcgtcctgcagaccttcagcgtcgtctgccctgctcgtcagcgccttcgcgctcgtcggctccatcgaggggctaatcagcaagaagctaggctaggctagtccgatccagtggaacaccctatctgcaggtctgtcagagagtggcagcgggctcggttattttcacagtgttgccttcctcctgcatcgggttgtaagttgtaacatatatgtcgtattgatactggcgagttcagatgttcagaagaagtagaacgcgtgtgacgattctgtgttgctgaatgccgcctatgtagtttcagttccagaatttgagggtttccatatccgcagcagtttc

SEQ ID NO: 2642 - DNA, 1890 bp, Zea mays
  Clone ID: ZEAMA-23APR03-CLUSTER4225_19
gcacgagaccattacctagaacatcctaatcgaaaaaagcacatgttcactcgagcctgttcgcggtggagagtgatagctggggagtggagagtggcgaacccaagtggcggctacggttttacgatctctttctccttagcctcgtctgtcgtcttccttctacctccgttcctaaaccgtaaaccctagacctctcgtgtgtcgatacgatttgcccattcatggcattctctccgacggcgttgttcttgattactgattgagaggtcggattggtgtttcctttgatctgtgagtggagtttgaggcaaggagaggggcgacatggtccatgggcacgaagaactagttcgatctcctcgttgctcgcacctcatcgtggccgccgagaagaaggcgggccgcatcgcccaagccggcgaccgtcgctccggccaaactggccaccgcccgcgcaggctgtaaaagagaccaggaactatggggctccagctattggggcaggacgtggtagatgtagcttctgtggaggcaggatgggaccaaggcgtgaatttggtgagggcaatggcaatggtgttgagggaggttatggtggtggtggatttggagatagtggtttcccgcggagggaggaaggtgatggaaaggctatgggaagaggccatggaccacgtcagccttaccgtggtggtggtcgccgtggtggctatactgatagtgaggctggtgatgagtctggtcgcccccctcgccgggcctatgagcgccacagtggcacaggtagaggttatggaatgaagtgtgaggtgcgcgaccggactcgttctttcagctaactacactgcacgcaatggccaccacggcgaccgaggcggcgccggcgcaggagcagcaggccaacggcaacggcgagcagaagacgcggcactccgaggtcggccacaagagcctgctcaagagcgacgacctctaccagtacatcctggacacgagcgtgtacccgcgggagccggagagcatgaaggagctccgcgaggtcaccgccaagcacccatggaacctgatgacgacctccgccgacgaggggcagttcctgaacatgctcatcaagctcatcggcgccaagaagaccatggagatcggcgtgtacaccggctactccctcctcgccacggcgctcgccctcccggaggacggcacgatcttggccatggacatcaaccgcgagaactacgagctgggcctgccctgcatcgagaaggccggcgtcgcccacaagatcgacttccgcgagggccccgcgctccccgtcctcgacgacctcatcgcggaggagaagaaccacgggtcgttcgacttcgtcttcgtggacgccgacaaggacaactacctcaactaccacgagcggctgctgaagctggtgaagctgggcggcctcatcggctacgacaacacgctgtggaacggctccgtcgtgctccccgacgacgcgcccatgcgcaagtacatccgcttctaccgcgacttcgtgctcgtcctcaacaaggcgctcgccgccgacgaccgcgtcgagatctgccagctccccgtcggcgacggcgtcaccctctgccgccgcgtcaagtgaaaacatgccctggcctggcctgccccaccaccgccaccgacggcgccgccggccgcatcctcattccaatcataatagacgacccgcagcattaattatccaccggcttttttttttggctctttcttgcccctgtaatctttctcctcctcttcttcttgggaattgtcgctgccgtttcgatacgtaaatcacgagatcggtaatacagtaatgctcctcaattttacaataaaaaaaaaaaaaaaaaagcggcc

SEQ ID NO: 2643 - DNA, 1393 bp, Zea mays
  Clone ID: ZEAMA-23APR03-CLUSTER42389_1
aaaaaaaggccaggaagaaaagaaaaaaaggttctttccgatcatcgttctcttctgttttggtctggatactgaaatcacaggcgtttcctttgagattcttgctggcaataacatgaacatggataagacaccaatcgcaggcgacggcggcggcgatgcaggaggcggcggcggcggctccggcaatggtccggagatgcaatcctcgttggacgcggtggcgccttcgccgactcctcatacggagttggacatcagcagcatgccggacacccccctacgcaagcccggccaccggcgcgcgctctcagagatcatcggcctccccgacgacctggacctcggcggccccggcgccggcgacgcgcccgcgctgtcggacgagaacgaggaggagctcttctccatgttcctcgacgtggataagctgaactcgcggtgcggggcgtcggagtcggagccatcgtgcgccatggccggcggtccgggagaggcaacggagacgtctgcggcggcgtctggggcagcgcaggggcagatgcatcatcacaaccggcactcgatggacgcctcgagctccatcgacgcagagcatctgtttgggacaacggtgacggagggggtgtcgccggcagaggcgaagaaggcgatgtctgccgcaaatcttgccgagcttgccctaatcgatccaaagaaagcaaagaggattataaataatagacagtcggcggcaagatcaaaagaaaggaagatgaggtacattgctgagcttgagcggaaggtgcagttcatgcagagagaagccacagcactcaacccagctggcattgctacagagagacacggctgggctgactgttgagaacggcgacctgaagatacgtctggagagcacagagcagcagatccacctacaagacgcggctgaagatggcgacagggcaggcgggcaaccagatgatgaacttcgccgaaccgccgcacacgttcggcggtgcgaaccagcaggtcttccaccacccgggccaagcagtgccgccattcctggtggcgatgcaacagcagcagcagttgctgctgccgcacatgaaccagccgttgcaccctctgcagagccagcagctgcatcaggcggcgacgctcagcatcgacatggaagggctgccggcggctccacctggccagtggcaatggggtggtgacacgtggtcggagagcagcagtagctgattcggcggcgacgacgacgtgggttgtggatgtatgccatgttcgcatgattaggatatactacctcgttttgtcatccactagtttatttttatctaaactgtgataaataaataaaaacgaaaggagtatatattgtacgttaaaaaaaaaaaaaaaa

SEQ ID NO: 2644 - DNA, 1156 bp, Zea mays
  Clone ID: ZEAMA-23APR03-CLUSTER4248_2
cgcaccacaacaagcatagagacaccaagcgtcaaacttgtcaagcagctagcaaccaacccaagaaagacaccatacccatggctcgcgctagcgtcgtcttcgtcgttgctgctctcctcttcgtcgccatggttgtggcaccgatggccgaggcaaagtccgctgatgccccctccgccgatgcccccgcccccgctgctgacgcacctgccgatggcacctagcggaccggcaggtgcacctggtccccagggcttggttgatagacccagcagaggtggaagaagtggaggaggaggaagtctgtgttggggattgggtgaaggttaaggactccgttggaaccccagtttatcaatggggtgatgtgaaccacagcagcataggggtggtccaccgggctgatgatggagagctctggattgctttctgcttctgcgagaggctatggttatgcaaagcatgggaggtggaaaaagtgaggcccttcagacaaggtgacaaagtaaggatacgacctggtcttgtatcccccagatggggttgggggatggagacctacgcgagcaaaggcgaggttgtaggtgtggatgcaaatggaaagctgaggataaagtttcggtggagggatagactttggattggggaccctgctgatattgttcttgatgatgtccacttattgacggaggcttctaatggcttggctttttgttcataggcttgtggtattcttttgataccatatctgatatattgcacccatccattttgcagcatttcaaatttagcaaaatcttaacctgcagtggacttgcaagttgcacataactatcatcgcatcggcatgccagggtgtatttcatgttgataaccggggaatgagaagacaacgatagtgtagagctggtaaccatcacctagttttttcttctttggtttacatgtataattatgcctcctgacacctttttgggtttcagtgtatcatataccagtgtacaggttcggacctgaacattaatttaattgatagtggtcttgtatgtttaaaaaaaaaaaaaaaaaaaaaaaaaaaaaaaaaaaaaaaaaaaaaataaaaaaaaaaaaaaaaaaaaaaaaaaaaaaagtactctgcgttgttaccactgct

SEQ ID NO: 2645 - DNA, 1070 bp, Zea mays
  Clone ID: ZEAMA-23APR03-CLUSTER42739_1
cgccattgtcacaccactacaccagcactctctatttcaaattcatggtgaatttcttgcccaaccccaaaagaccacatgcctgaccggtcgcctgtgagtctatgaccaacctgcttaccagggcaaccgatcgcccagatgtacaacgacatgttgcagcagcagcccattccctaggaacatcctaatcaaaaaatgaagaaactacccgtcaccgcgcgcacgcaacggcccgctccaggtgctgcagcgacttgttgtagctgacgaagcccatgaaccagaactcgaagccgtcggtggtggcgagccgcacgtacctctgctccggccggtgcctgttctcgctgggccgcaccgccccgaccttccgcagcgggacggccaccttgtacggcgcgcggaagctgcagtcgccgcgcggggtggacaccgccagcgacagcgaccggtcgctgcggaaggccacccgcgccgtcgacacgaacagcacgccggcgatgggccccgccgtcgtccacaggtggcactgcgacgcccgcagcagcttctcgtccttgtccgccgagaaccactgccggaacagcttctccacgctgccgccggcccggaggatcttcgcgcccagcgagagcttccccttcaccgtgtcggagagcttcggtcccagggtcactgcacgcgatgcgtacaaatcggagcaagcatcagcttcagttcagtctaaaggcatgtttttgcttgggttttggaggctctgtttcttttttcttttcagaatacaaaagttcaatcaaaggagttgctttttttttgtgggcgtctgcgtctcctccgccgggaagtcgggctcctcgatgccataagccctggtgctcaccgggatcccaaccacgtggccttcggtcgtcgtcgtcgacccctccatcgcgccgatcgagtactcgtctacacagcgctgcgaagacgaaggccgagactttttccaggcagcttccctgattattagctagctcggttcttgccggcctgtgcctctcggtagtacctaacgtgcggtggttgtg

SEQ ID NO: 2646 - DNA, 802 bp, Zea mays
  Clone ID: ZEAMA-23APR03-CLUSTER4278_11
accaaagcctccgcccccttccctgacaccctcgccgccgcgcacgcacgcacgaaccagcgaagagatgggcgtctacaccttcgtgtgccgcagcgccggcggcggcgagtggaccgccaagcagcactccggcgagatggaggcctccgccgccaccccctacgagctgcagcgccgcctcgtcgccgccgcctccgcggccgactccgcgtccggcgtccagtcgtccttctccatggtcacccccagctccgccgtcttccaggtgatcgtcggtggtggcgcgatgatggttagtggcggcggcggcggcggtgcggccgccgccgcgtcgggtggcgctgcggccgaagctcccaagggaggagaagaaggaagaggagaaggaagagagcgacgacgacatgggattctccctgttcgactagagttaagctgcgtgtgcatggttgcggttcggtcgtgtcgcgcgaaacgtgaagagctcaagcggcctttttgttccagtcccacatgtgagagctttgatacgttgtctggaatgaaaaaatttccccttgacaccttgtctgcaccgagggaggagtaggcgtgggggaaaaactgtagaacctgtgggatgcaaaatctatctagtctagttttgggatcggttacgaatttgtcttcaacaaatagtttggatgagacgagtggaaaacatgggtggtgttgatttcagaaacgaatggcgatatgacatgtgttgtggtatccaaaaaaaaaaaaaaaaaaaaaaaaaaaaaaaagggccggacgc

SEQ ID NO: 2647 - DNA, 1202 bp, Zea mays
  Clone ID: ZEAMA-23APR03-CLUSTER4292_2
agaagaaagctccaatctttctcgccctctcgcggttcggaggagggacccgggcgcaaagactaaagcgcaggtgagctccgggcggggaagatgttccccagcctgatccaccacgctagccacggccgacccgacgtcgccgtcgccgaggacgcaccacgcagtggctgcgggttagggctgcccgggcacggcggcgggcccagcgtggtgctcacggccgatcccaagcctaggctccgctggacggccgacctccacgaccgtttcgtcgatgccgtcgcccagctcggcgggcctgataaagcaacaccgaaagctatcatgaggacaatgggagtgaagggcctcaccctttttcacttgaaaagccatcttcagaaatacagattgggaagacagtctggaaaagagttaacggagcaatcaaaagatgcttcttaccttatggaagctcaaagtggaacaactttgtctcctagaggttctactccagatgtgaaagagagtcaagaagttaaagaagcactcagagcacaaatggaagtgcaacgaagattgcacgaacaagtggaggtccagaagcatatgcagatccgaatggaggcgaaccagaagtacatcgacacgatactagataaggcgttcaagatagtatctgagcaactgagtggcttcagcatatctgaccaagacctaccgattctcacctctgctagggccatgcttagccctgcagatcacttgagttcgtctgtcttcccccagctctccgtcagctccgttagccttcacaatcctggtcctggaggagggaaaggccttccgcatgttgccgacagccacgtgttctcccagaggccacctgaacaattcaagcgcaaatcacgttgagaagcattgctagctcgacgcagatgcatgacctgatcaagggcacactggaaaatcagaggaatttcgtctgacatgtgcacggtgcaatcgttcgcccatcctcccgtagcacatctgtgaaaatcaaggttatcttggtctatttcggtacatctagactgacctttattaatatctaatgtaatgcctaagtggactagataagtaattcgcttgttgtataaactgcccagctgtaggatccagttttaaagtcctgttccacgcacttaaaacttgggggccgtctcttgggcggcttc

SEQ ID NO: 2648 - DNA, 985 bp, Zea mays
  Clone ID: ZEAMA-23APR03-CLUSTER42_40
gcacgagaccattacctagaacatcctaatcgaaaaaagatccagcaaaccagagttctccaaagcgcgaagctccagctcaagctccaggcaaccgtcaccgtcagggaacgcgcgcgcagcaatggccttttactacggcgtgggcggacagtcgtcggcgtgggcggcgccgggcggcagcaggccatggaccaaggcggaggacaaggtgttcgagggcgcgctggtgatgttcccggagcacttgccgaaccggtgggcgctggtggcgtcccggctgtacgaccgcacgccgcaggaggcctgggaccactaccaggcgctggtgaccgacgtcgacctcatcgagcgcggcatggtggaggccccggactcctgggacgacgacgcggccgccgccggagggggacgctcgggccgcggccgcgggggcggcagcggcagcggcarcgragaggagcgccgccgcggggtkccgtggaccgaggacgagcacaggctgtttctggaggggcttgagaagtacgggcgcggcgactggcggaacatctcgcgctggtcggtgaagacgcggacgcccacgcaggtggccagccacgcgcagaagtacttcatccgccaggccagcgccgccagccgcggcgacaccaagcgcaagagcatccacgacatcaccaccccgtgatggctcctgctcgtggaggacaaagctagcaccgagagatccagacctggctactgctgctacctgcattttatctttacctttgcgagacgggaacaaaaaaaaacaaacagccgtccctgtggttgtagaaatgtaggcaaagctaagttagcctggctggaatctggggtccggtataactgtattaagcggcactacaatgactatcgaataaataagttttgcaagtttgtctggatttccgtaatccagcctttaaaaaaaaaaaaaaaaaaraaaaaaaaaaaaaaaaaa

SEQ ID NO: 2649 - DNA, 1322 bp, Zea mays
  unsure (1)..(1322): unsure at all n locations
  Clone ID: ZEAMA-23APR03-CLUSTER42_42
gcacgagaccattacctagaacatcctaatcgaaaaatcatccacagagagagccagtaaacaccgcgcacgcaaacgcaacagagagatcgtgtcgagcagccggggcgacttgcgaggcatggacttccaccacggctgctacagcagcagcatccacgcggcggggccaccgccggcgcggccgtggagcaaggaggagaacaagatgttcgagagcgcgctggtgatgttccccgagcacacgcccgagcgctgggcgctcgtcgcggcgcaactccacgggcgcacgccgcgggaggcctgggagcactacgaggcgctcgtcgccgacatcgaccttatcgagcgcggcggggtcgacgtgcccgcctgctggaacgacgacaaccaagtccgcggcggctgcggcagcgagggtggcactggcaacagccgccgcgccggcgctgaccgggcgtgccgcgagggccggcgccccgggaaaccctggagcgaggaagagcacaggctcttccttcaggggctggagaagtacgggcgcggggactggcgtaacatctcgcgcttcacggtgcggacgcggacgccggcgcaggtggccagccacgcgcagaagtacttcaaccggcagctcaaccccgccagccggaactccaagcggaagagcatccacgacatcaccaccccttgaccctggccgccgacggcgacgcgcgctccctgcttccaacaaatcgcgacagccactcatctcatctcgagatcagaatagaagaaacaagtaggcattactcgtagtccatgacaatagctaaatccttaggtcgcatgggtcgttccaatcagcagctagcacatggtttaggcttactcgtagtcattaaaatagaattaggagtccaaacatctaatggagtctgacgtggcaccgtcgcgtcgagtttaggcgaatgcagaatgggatgagtttctcgctcgagaaacaccggtttcctgcctttaaattttcttgttcccgctactgacccggaaaccaaaaacggttccgttttcagtgttatttaggtttagaatttaataatacaagagtcaaacgaaaaacggttcggttttcagtgttatttaggtttagaatttaaaaatacaagagtcaaactttggtcacaaaacggcatccgaaaaatgcagaaccaaattgtaatcctatcaatgcccgagtcactgttctagtattgtattggtttacaatggtgttttattttaaaaaaaaaacccccccccggccgtntagaggaccaagctaacgacgcgtgcaacga

SEQ ID NO: 2650 - DNA, 1516 bp, Zea mays
  Clone ID: ZEAMA-23APR03-CLUSTER42_46
aatatccaagaactcattattagaactacgtcgtggtaaccttatcttctctctctacggaacacacaccgtgtcgttctagcgttctcatcctccatccgcttgctcctgctccctcgagtcaaagcagtggatatggtggcgcgagcagcgagctagggaggctaggtagcagactagtgtcgctattaatcgtaccacgccgccgccgggaaattgcccttctccgccactgccactgaagctatactgtcgcagagagagcgcccaccacccgcggaccagacatctgcgatgaccactctggcgacggacacggcggtcgtggacacgggaggaggacaaggcgttcgaagaacgcggtggcggccgccgcggcgccgccggccgacgggccgcctgatgatggctggttcacggcgctggtggcgagcgtgccggcgcggacgscggaggaggtgcggctgcactacgaggcgctggtggaggacgtggccgctatcgaggccggccgcatcccgctcccgcgctacgctggggaggagtcgtccgccgcgacgccctagggctccggtgccgccggcccctccacgcccaaggacggaggaggagggagcgggcaccgacgcgaagaacggaagggcggcgtcggcgctgacgcggggaagagttgctctaaggccgagcaggagcggcgcaagggcgtgccgtggacggaagaggagcacaggttgttcttgttgggtctggacaagttcggcaagggcgactggcggagcatctcgcgcaacttcgtcatctcgcggacgccgacgcaggtggcgagccacgcgcagaaatacttcatccgcctcaactcgatgaaccgggaccggcgccgctccagcatccacgacatcaccagcgtgaccgccggcgaggtggccgcggccggcgcgcccatcacgggcgtkcggcccgaccgcggcgggggcaaatgccgatggggccgggcggcatgaagcaccaccacccggttccgccgatgggcatgtacgggcatgcgcccatgggccacccggtcgctgggcacatggtggcgccggcggccgtcggcacgccggtcatgttcccgccgggccatcactcgccctatgtcctgccggtgggatacccggcgccaccgaccaagatgcaccagtgatcgtctacgaccggcatttgcgcatctgcacaactgcattcctttgctcgttctttcttgatttcgttgatgatcttgtgtagccaaagctatctatatccatcctttcctcatctcccgggtctttgatttttgacgtaacatatagatgacttgagcgagtgcagggcaggcaggcgaataatgagtatcgctacttacaggaaggctcaaggaatgtgtaattagtagcagccttcctgggtgcaaatattcatcatttgtgcaactggggactgacagaatcccatttcccggatgtaaatcgattgtctataatatctcatctgtgcg

SEQ ID NO: 2651 - DNA, 1585 bp, Zea mays
  Clone ID: ZEAMA-23APR03-CLUSTER432310_1
acaacaccggaaccggaagcgcagaaaataatcggaacaattccgcgttgcccatccatcccggaaatatccccaaggaaaccctcgcccccctccttccccgccgccggtcgccagatctccggtcatggacgacgacggcggggcctcccggtcgccctcgccgtccccgtcgcgctctccgtccccgctccccgtggccgaccccgtcacggtcgccgcggcgccgcccggccacgtcgccgtcgctatccccctccgcaagcactcgccttcctccggcggcggcggcggcggccgcgaggacgcatggagcgacggcgccacctccacgctcatcgacgcctggggggagcgcttcgtggcgctgggccggggcagcctccgccacccgcagtggcaggaggtcgccgaggtcgtctcctctcgcgacagctactccaaggcgcccaaatccgacgtccagtgcaagaaccgcatcgacacgctcaagaagaagtacaaggtcgagaaggccaagcacgactccgactggcgctacttcgaccgcctcgacgacctgctcgctcccgtgctgctcaagcccaattcttcttcctcctcggctgctgctgcggcggcggcggcagcccggagcgccgggcccatggtccctccgcgcatcaacttcccgcagcgcacccgcacgcccctccactcctccgcgggggcaaagtggaggatgccgtctgccgctgctccagccgtcggcgtcgtcctgactcctccgacgggttcccgccgtccgcggtggcgaacggcaagaggcagcgcgtggaggagcccgccgccgccgccgccgccgcggacaacggcgcggagagcagcgtcagccgcgcgcagggtctgcgcgagctggcgcaggcgatccggcggctaggggaggtgtacgagcgcgtggagagcgccaagagggaccaggaactccggatggagcgggagcgcctggactccgcccggcagctggaggagcagcgcgtgcagttcttcctcaagatgcagatggagctctccaaggccacgggcggcgcggccaccgccacgcccacgcccatggccgtcccgatccctacggacggcaacggcacgcggagagcgggcgtgaccgccgaggtcgccaccagcagcaatcaccgcgttcggtaccgcatcaagggcagcaggcaccagcatgccccgcagcaggcgcattaccagaacagcacaagccccaccgggggcgatgacaacggcagcgattcggacaaggaagcccaggaggatgcggaagacgaagatgaagagagccagtgaatcagtgattgctctcctcttcagcaatggaatggtaactcaacacaaaatagtgtgggggtgactgtgtgtaacttgtacctgccagtttgttcccgtgattgtggtctgttgtcttggagagattgtcatcgtatgtaacatgcttacttttgtgggaaattgttagctctattcgtgtttaaaaaaaaaaaaaaaattcttggaatgagtattgctgtcctagagagaatatgttcataggactgcttgg

SEQ ID NO: 2652 - DNA, 1601 bp, Zea mays
  Clone ID: ZEAMA-23APR03-CLUSTER432311_1
gcacgagaccattacctagaacatcctaatcgaaaagaccaatcgttcctatgaagatcaccgtgcagtcgtcgaagctggtcacgggcagctccagcggcggtcgtccttcttccgccgatgccgccgaggcggtcccgctcacggtgttcgacaagctccactacgatctgtacgtgcatgccttatacttcttccacccgccagcgccgcccagctccgtcctcgaggccgggctcgccgccgcgctggccgagtacccggagtaggccgggcggctcggcgtggacgcgcgcggcaaccgcgccatcctgctcaacggcgcgggcgcgcggctcgtcgaagccacggccgccgccgccgacgtctgctcgctcgacagcgtcgtgccgccggagccagcgactcccgcgaccatgagcctgcaccccagcgccgaggacgccgtcgacggcgaggtcctgctgctccaggtcacgcggttcgcctgcggctccttcgtcgtgggcacggcggtgcagcatgtcgtcggcgacggcgccgccttccactgcttcgtgagcgcctggggccaggcctcgcgcggcgccgccgtggaccccgcgcccgtgcacgaccgcgtgtccttcttcgtgccccggcacccgcccttggtcgagttcgagcaccgcggcgcggagtacaagcggccgcctcgccctcgcgagggcgaggagaaggccgggggcagcgagtcaggggccaaggccaaggccaacgccgacgtcggcgaaaagcagctggtgacgcgtagggtgaactttagccgagagttcgtcgccgagctcaagacgagggcgtcagcgggggcgcccttgccgcggcggtacagcacgctgcagtgcgtggcggcgcacctgtggcggtgcgtgacgagggcgcggaggctcgacgcgcgcgcccgcaccaccctccgcatcgccgtgaacgggcggtcgcggatgaggaacccgcgggtgcccgaggcgtacgccggcaacgtcgtgctctgggcgcgggcgaccgcggccgcaggcggcctggtacggagcccgctcccggaggccgtgcggctcgtgtccgaggcggtggcggccgtggacgacgcctacttcaggtccgtcatcgacttcgccagctccggggccctggaggaggaaggcctggtgccggcggccgacccgttggagacggtgttcagcccggacgtcgaggtgtacagcctgctgggggcctcgttccaggacttcgacttcggcggtggcccgcccttcttcttcatgccgagctactcgcccgtggagggcgccgtattcgtcgtgtcgtctttctccggcgacggcagtatcgacgcctacgtccctctcttcagccacgcgatggacatcttcgacaaatgctgccactccctgcctgctgcggacgcacgactttaggcgcgttgactttgcttcgtccgagatgatacatttcgtgaaataatcatttgcaaaaaaaagaagtaagatggattcggttatcatgtcaggagatgaatattaaggtagataattaagatatttcctaaaaaaaaaaaaaaaagt

SEQ ID NO: 2653 - DNA, 1597 bp, Zea mays
  Clone ID: ZEAMA-23APR03-CLUSTER432480_1
acttgcgttgcgttcccccacccactcacaccggcagcatgagcgccagcgccaccctccgcctcgccattattgccatggccgtggcggtctcgcactcgctcgccgcgtcggctccagcgccgcgcgacgcccgagaccgagaggggccaccggcgtcgacgacggtgcgcgccggattctacctcgccgcggccgcccgtctccggccgctcgacaggctcgacgcctccctctacacgcacctctactactccgcgctcgccgtgcaccccaccacccacaagctcgtgctccccacggacccgaaccaggcgggcctcctcgccaccttctgcccgacgctcaagtccaagaaccgggcgctcaaaaccatgctctccgtcggcaccccgggcattgcagcaggtgcggattcccgggccgacccagcgttcgccgccatggccgcggacccagcgtcccgcgcggcgttcggtgccgcggccgtcgcgctcgccagcgacagcggcttcgacgggctcgacgtcgcgtggtggttcccggcgtccgccgtggagatggccaacttcgggttcctcgtctccgagtggcgcgccgccgcgccgccggggttcctgctcaccgccacggtctacttctccaaccacgtctttgacgcgccgcgcccgggcgtggactacccgtccgaggccgtggcgaggtgcctcgactgggtcaatgtggtggcgttcggactccacccgcttgccgcgggtgcggccaacgccacggccttcgacgcgccgctctatgacagggcgtcccacttctcggcgagctacggcgtcgtgtcttggatcgacgccggcgtgcccgcgagcaaggttgtcatgggcctcccgctctacgcccgctcgtggttcctacgcaacaaggccaacagcggcgtcggggcgccggtggtcgccgcggggccgaagcagcgcgggagcaacgccaccggagttatgtcctacgccgaggtccagaaaatcgccgctgccggcgggggcggccggcgcgcggtcaccacgacattcgacaacgcgtccgtagcgtcctacctatccattggtgacgtctgggtcgccttcgacggtgcggcggtcgtggccgagaagctcgccttcgcagcgcagcgtgggctcctcggctacttcctatggccggtgaactacgacgacgccaacctcgccgtctcaagaagtgcattggatgcctggatgaagaacgagatttcgtcgaatttgaagaacgataccggcctcaggcagacacaggggccggtccggttgccgccggctctccagtcccctgcaggaacgcctggaccggcgcccgcacccacatctgggtcgcgctcatggctgccttggacgaagcttgatgcgttcctgcgttttgggtgtgccaattcttgtgtgcttttagtcgtaacaagcttgatatggtcctgcatttgggattactaattctgagttctgtaatcgaagagaatcattattgcctaaattgtgcaatttgtattctaaaaaaaaaaaagtgtagcttagcaaatagcaacattttcaatatc

SEQ ID NO: 2654 - DNA, 785 bp, Zea mays
  unsure (1)..(785): unsure at all n locations
  Clone ID: ZEAMA-23APR03-CLUSTER43308_6
cccggcggccagttaaatgagctgtggcctcttttatagaacagctaattcgtaggaactgcatgttagtcatctgtggtcctttaagggcggtccgccttttttttttgttttgttttttttttttttttttttttttttttttttttttttgttttttttttttttttttttttttcatttgtgcaaaagactttgacttttgttgaatcagcacgaccagtttcctagaaagagcatagtaagatgtctagaaaagagaagaaaatgggagggtggggggaatctgcatggaatatacatgtatatattctttctacgctttctggcaagatacaatgaaccacccgttcaacgtcactcttatcanagacccattctgaatgccattgttgcaacaaccactcttattttgttagagcaaaaaagcttatgtacacggttcctattcttcttaagaagtccattgtggtacctttattgtcctcggagtcgaatttgctagaaattagagatgttttcattaagtgtgtgggaccatccatggagtatatttccttattattaaagcagaaccgaaatctcctcctgttgttggagttgaagctgtaggaaattagagatggtttagttcaacgcgatgggccgacttgcagaaattgctagaaaaaataggctagtaagcagtaagcgatgtaaataaatgaatctataaagaaaaatgtatatcctaaagacatgcacatgcaagaaatagtaacaacttttattggaacacacaatct

SEQ ID NO: 2655 - DNA, 1123 bp, Zea mays
  Clone ID: ZEAMA-23APR03-CLUSTER4331_4
gaacacgcatcgaccctacgactacgagtagcgagagaggattgatggcggcgcagctgcggtacatgataagccattattttgataccccacctagcaagggggtgatccaagatctggactacgccttgaggacaaagaagggaggtttgacccccaaggaggagaagacgctcctggcttgcaatttacttcctggtgtttacttcatcgtgggttcagtactgggcactttcgcgatgttgttgggtatccacaaaggttgctcactccctcagctctcgatttaatatttgataatgttaaagcatgccattcctgagaaagcgataatattgtgtcaacaatctgcgagcaccaaattgtgttaaaaaaacatgccaggagcatgactgcggccttgtatatcaaggttaaaacctgaaatagtattcaatagccatactcgtgcaaaccatccaggatggggattggggaggacagtatctctagataaagttcaaagaaccgtgggtcatctggcaagcaacattattccattcttatggctgtattttgagagctccttccctaaatgttgcaccacggatgctgttgtgctgctatcaagtgggcacaccagggcaaacaaattatattctgcttttgttgttgctcctacttttcaaggatatttgtatgcttaccctgcgccagcattctgccattgttattactgttcaatgatatctgtctgtccctaccctatcctcttactagccacggtgaatatgttacttttggagcaatttggcttaatttatgtttacaaatctcgctatgctattgtgcatttgatgcattgtataaaggcacaactccctcacatttgagtgtagccttgggccattcgaagtgctggtgcctcgcgtgatttgttcctgagtgcaggcatgcttgagttatagagcttgttgtagaaatgttatataaatagtggggcttgaacattatagttactgttttcctaatcagtaaaacaagtctctatatggtcaatgcatttattggagagggacaatgcaagtcatcagattttgactacagttgattcaattaagtgtcgtataaacaaaaccgcaac

SEQ ID NO: 2656 - DNA, 691 bp, Zea mays
  unsure (1)..(691): unsure at all n locations
  Clone ID: ZEAMA-23APR03-CLUSTER433205_1
gatgggtccaacaccagccgccgccatgtcgaagcgaggcaggggaggttcggcggggaacaagttccgcatgtcgctgggtctgccggttgccgngacggtgaactgcgcggacaacacgggcgccaagaacctctacatcatctccgtcaagggcatcaagggccgcctcaaccgcctcccgtccgcctgcgttggcgacatggtcatggccaccgtcaagaaggggaagcccgacctcaggaagaaggtgatgcccgccgtcatcgtccgccagcgcaagccgtggcgccgcaaggacggtgtctacatgtacttcgaaggtagcataccgatctggcgtcaccaataattgcttagatttacgttcaatttacctttggtcctggtgaaacatgctgtctatctagtttanacgtgaaattctttatccttgaccgcagggccgcgaggctctttagctttttctggagcagaagtagttagtttctgcaacgccattgcggtgatgatttccattgaatgtttttatccgtcaggggtagtccgtagtctcatactccatcgccttgtgtagcagcgtcgctgacatcaaaatttgggactgacacatttcacacatttttgtattctgttatttttactggttcacatggttctgctaatttttacatgtttttgcttgtattaa

SEQ ID NO: 2657 - DNA, 1739 bp, Zea mays
  unsure (1)..(1739): unsure at all n locations
  Clone ID: ZEAMA-23APR03-CLUSTER433613_1
atggtttcgcagcggttcactgtgcagggggtgtgtggggggcggggggcgccctcctgcgccctcgttcttgccctgctgcctctctcgtggtcagcgtgcggcgggcgccgctgtacacatgctaacagcttccctgtcttccttcctcgtcctggcctagtgcatcttgtctctggcccaatcgatcccccctgtcctctgcccgtgcctacaagtcttgcccccatatatagcagagggaagacaccaaaccacaagaaaaagtagcaaaagaatttgaagagggattgaggggggaggggagctgtctccttcgatctcgttcttgcctttttgcctctctcgaggtcagcttctggtggattcagcaaaacaaatggcgtagagcggggagcaagagattacgcacgccgcgggcaccgatttccttcaagaatctgcaagaagcggaggatctgtcgagtccgactgttctaagaagcagctcgattctcgaaaccctagctagcaaagtagcaagctagctacaagagaaggaagctggcgaacaggtggtgggacgaggggcggctcggcctgccggagccatccctaggcaagaaccaagaagaaatggcgccttcgtccaaggacggcgccaccgagcagccgacgagcggtgggagcggcgacgaccgggagaacggcaccggtgagcccaaggaaggtgcggtggtcacgggcaaccggcggccgcgcgggcggccgccgggttccaagaacaagcccaagccacccatacttcagtgacacgtgacagccccaacgcgctgcgcagnccacgtgatggaggtggccggcggggccgacgtcgccgagtccatcgcccacttcgcgcgccgcaggcagcgcggcgtntgcgtgntcancggcgccggcaccgtcaccnacgtcgcgctccgccagcccaccgcgccgggcgccgtggtcgccctccncggccgcttcgagatcctctcgatcaccggcacgttcctgccgggacccgcgccgccgggctccacggggctgaccgtgtacctcgcgggcggccaggggcaggtcgtcggcggcagcgtggtcggcacgctcatcgcggcgggccccgtcatggtgatggcgtccacgttcgccaacgccacctacgagaggctgccgctggacgacgccgaggaggatccagggcaggcgcagctgcctcccggccccggcggaggcccccctctgataatgggcgggatagccgatccctcggcgatgccaatgttcggcggcggcggcggcggtgtgccgccaagcctgatgatgccaggaggcgccgccgcctccggtgcgggcctgcagctcgggcacgaggggcttgcttgggctcgtgcacggccaccgccatactaggaggggatccatgtctgagaaattcgagtagaaatggaggatcgttcatcgctccggcagcctcaaggacgagctgagtgcgactcatcatatagttacttcaagctagaactgaagatcgaattaagcatgctgccaggagcaaataaaaggttgttcgactagctaatacactatctggtaagaaggtaaactagtactttatactacgactacaaactgcatgcatgtgagataccatcgagcttgcactgtatatatatggtttagatgcagcgtgataaattagatgacgggatgattattgtaaaaaaaaaaaaaaa

SEQ ID NO: 2658 - DNA, 1176 bp, Zea mays
  Clone ID: ZEAMA-23APR03-CLUSTER434870_1
ttttttttttttttttgacacacgacacccgatatggtacttcaaaatgaagttctatacaaccaaaaggtggatcttcattatgcccattatatgtacctccaagacgaaatagaggcataaatcacaccatgttgaagcatcaaagagtttttacaataaggcttaggttagatcatcctcatcatcctcttgtttcttcagctcattctttgccctcagcagcagtgtcgttttccaaggatccaggcgtgtcatgccgtcaaattccttgatggcatcagtaaatttggcaatatctccatcgtccattgatgcagcaagatcagctaaaagtttgtattcacgagttcctgagaaagtcggatcgatttcctggtatctctccaacgaattttgtatagcaacagcatcagctctacatagttggcagattcctgcattaaggaggatgcctctgacactatacttcagcagattgttgttaattgattgacgagcaatttcttcaaaaatctcagttgcctttgggtactgttccaactgcgcagcaatttctgcaactttctgcttaatggtgtttgattgagatgtctgtccttcactgtcgaaaagatcagcggccctttctaggtaatctgaagccttctccaaatcttgctcttgctgataaatctcaccaatgtccttgcagtatcttgcagccatgctcaatctaccaatttccagaaaaagattaacagcctggtctagcgcttgcgcagcttcctgaggtgagaattttttgtagcagtttgcagcttccacataagctgaggcagcttcatgcttactatcacccttcatatggcaattagcaatcttgatatacacagatgcagctctgttccagttcttcgaaagcttgaaaaagttggcggccttatcgtataggtcggcggcgtcctcgtacttggagccgaagagcccccagccggagagcttcttatccgccttcctctccgtgtcgtcaccgcgcgcctcgtggtcccccatcgctgccgacgggccgctgctccgatcgcttgtgccggcggcgaagcgaccaagatttgttgcgggggaggagcagaaaacgaagggagaggaggaaggggatcggaaacgcagcacgcgaccccgcaaacaaaaaaagga

SEQ ID NO: 2659 - DNA, 1394 bp, Zea mays
  Clone ID: ZEAMA-23APR03-CLUSTER4353_3
ggttcacaactcacttcactcatcagagattttggaaatacccaatacatagtagacgttcagatatcctagagtacacacgagggtgctaacaaaaataatctgaaacatatatggttcagcataacagcgacaagatagtcatacagagccctgagatacctcactcgctaacagaaagagacccctgcctatgaggagacctgctaacaatggggcttgcactccttgatctgttgacagctggggaacgcgacaaagatctctcccgaggtcgaggagccggggaccttgaatagtgctttcgcttaggtgctggcgagtagcttcggctttgggaccgtgatctacccctaggagaaccgttaaacccaggtgaccttgagcgcaacctcccatcataagaacggcctctgccacttattttttccctggccctcatgtcagaaggcttcttcctgttttcctctgcaaaaacaacagcaatttcccttccaagcagcatcttcccatccatatagtactttgcatcagaagcatcctcaggatcaaagtattggatgaacccaaatcctctaggttcccttgcagtcatcagtgtttagagatacacttgaaactcttcataacttgcatatctctttaaacctctatttcttccttttcttcaatagtactcttaagacttgcgtcttcaaaaaagttactttcactgttaatctcagggggtgcgtaaagcaacccagtgtaaaccatacgatacagagaataataattaaaaatctgtaaagaacatgcttataatatgttaaaaacaagcaacaacaatcataatcctgttctggagcaaatatactttagtgtactataaagttcagggagagatctccaagttgcacataggtgtccatgggcaaacacccactcacaataattaagtcaaggtaccttaccgagtgtagtaatcctttggcagatatatgtctttaacggggccaaattttccaaatggtctacgaaggtcatcaggcctacaatcccgacgaagattcctcaccaaaagactagttgggaggtccctatcagtatcacggcctccataccgaccacgaggacttgggctgcgagttcttctcctgtagcctcttggtggcgatggactgtgattatagcttctccccatgttgttctcggcggagcaaatcgggcgagggcactggcggcagactatcagcaatcgccaatcaggcggcgcaatcctctccgctctggaaccggaggcgtacctttcctctttgtctagggcacgggggaggggggggagcggctggttgtctcctgtctccggaagcttccgaggccagaaagcgcgacgggtgtgtgaaagaggatta

SEQ ID NO: 2660 - DNA, 1407 bp, Zea mays
  Clone ID: ZEAMA-23APR03-CLUSTER43573_1
agtcccagacgaaacaagcctggtggtagtgggtacttcgccgttgcccggcctggccgcctggccctcgtgtgcgttcctcgctcgatctccctccttcggtcaaaagccaacatgacaacacacgagtctgggtagctgtcccccgcgcggctcgccccctcgctcctcggcgccgctgccggcccgcgcctgcgcctgcggggcgcgctcgcgccctctatacctccgcccgcccgtccccctcgtgccgctctgcctgccccccgcattccgcgccgcctcgccaccgaactgggaggaatctgcggggaagggggatatggggtcgccgggtgcggggagcagcggcggccacgagtgctccttcaagttcctcctcatcggggactcgggcgtcggcaagagcagcctcctcgtcagcttcgtcgccgcctccattacctcgacggcgacatcgcccccaccatcggtgttggattttaaaatcaagttccttacagttggtggaaagaaactaaagttgacaatatgggatactgctggccaggagaggtttaggacaattactagttcttactacagaggtgctcagggaattattctagtatatgatgtcacaaagagagaaagtttctcaaatttggctgatgtttggactaaggaaatagaagcaaactcaacaaacaaagactgcataaaaatgcttgttggaaacaaagttgacaaggatgatgaaagaatggtcacaaaagaggaaggtcttgcttttgctgaagaatatggatgtctgtttcttgagagcagtgcaaaaacacgagaaaacgttgagaaatgttttgaggaacttgcattgaagattcttgaggtgcctagtctcctagaggaagggtcttcttcggttgtcaagaggaacatcctgaaacagaagcaggaaagtgatgcaaagaacggtagtggatgctgtcaatagatgtatgtgctgatccacaccacacggttggctttcttcgtgtgagctgccctgattgtctgctgtacatgttcttgtgagtaagaagggcgagcataattgatttgtacaaaggacatgtcagtttggtgtcatagttttcctcatctccagtttagtatagcaattttgttgtcgccctagcaatggtaatatggaatcctctctctacagtattgctatctggccggctggcccttagaaaccgggaccgtggaacttgttcacattcctcgttccaaaaatgttcgttctgttccaaaaacgtgggaacaattttgtttccgtagtgttaaaatcttgtttaaggattagtttggcaacttcattttttcatgggatttctaattttccttgaaaaaatggacaaaaaaatggactaatttccttgagcc

SEQ ID NO: 2661 - DNA, 1087 bp, Zea mays
  Clone ID: ZEAMA-23APR03-CLUSTER4376_62
attgtactactaagcccgttaatcaagagcagtgaggagagcaagcgcaccaacaaactgagcatctgaccgacctcttgctagggttttattccccctctaccctcttggccagcaccacctcacatcaccgtgatcctatgacagccatggcggccgaagcaccaccgtcggcttcaacgttctcctcctcaacctcgcggctacctctgcctctagtggtggggcggtcagatccgcagagttgtacatcgggagccgcattagcttgactttgaagagcgagatcgggtacgagggcgtcctttacaccatcaacaccgaggagtccaacatcgggctttgcaataatcttggaaatgaacactgaggattaagctgaggaggatggtgctaacattgatttaaactcacaaggaaaggaaaatgtgttgttctaaaagcctccacaagacaactattagctaggaacttgtgagatgatattattgataaggattacaacacacatggatatgtgaacttaaggtgcgaaggttgacttggaagaaattgtggcagcaccagttcaggatggacaacaaccgaaatctcctacaaaagttgtttctaatgtgctatcgagctccagtgtgttcctatgcaatctggtcttcataccgcctccaagaaaagctccgcaatgacagtttctgcaaaggttcaacaactataggatcaactggaggtcgagcaacaagaaaaagatggacttcatgaagaagtggaaaccttagaggctggagcatctcaggacaccattgatagtatgaagaggtcaatgaaaggaaataacaatattcttcatcaactattaagcttcaattgaggccaagtttttccatcttaagtctgcttgaccccaataggacctgcaaccttatgactactttagtagctagttacaatagctctggatttgtagttataggattattttcaattatgcttactgtttaatactttgagttgaagttattggattatctttggaatttaagttaaaggatttgcatctatacgttttgaagcaaaaaaaaaaaaaaaa

SEQ ID NO: 2662 - DNA, 2032 bp, Zea mays
  Clone ID: ZEAMA-23APR03-CLUSTER440462_2
gcacgagaccattacctagaacatcctaatcgaaaaaaagagaaggctccatgtaccaaaaaaaaagtcatttctgtttatgtagtgcaaacatggctctcgaacccatcgccctcctgctcacggtgctcatcgccgcgccgctcacggtcctcctcctcttcctcgtcgccggcaacaagaaggccgctcgcgctgcttctcccacgccgcctcgccgccgtgatcgcttaaggctcccgctgccgccgtcgccgcggggcctcccgctggtgggccacctgcacctgctgggcgcgttgccgcaccgcgcgctgatgtccctggcgcgcgcgcacggcccggtgctgctgctccgcctgggccgcgtgcccacggtgatcgtgtcctccgcagccgccgccgaggaggtgatgcgggcgcgggacctgacgttcgctaaccggcccgcgagcgccatggccgagcgcctcctctacggccgcgacgtcgcgttcgcgccctacggcgagtactggcgccaggtgcgccgcgtctgcgtcgtccacctcctcagcgcgcgtcacgtcgggtccttccgccgcgtccgagagcaggaggccgccgcgctggccgcacgcgtcgcccgggacagcgccggtggcgcggccgtcggcctcagcgatctcctcaccgagtacgccaacgccgttgtgtcgcgcgccgcgttcggcgacgagagcgcgcgcggactgttggacgaattcgactccggccgccggcagaggaaggtgctcagcgacttacagaagctcatagggacgacgcccctcggggagttgctgccgtggctaggctgggtggacgccgtcaccgggctggaggggaagatcaggcggacgttcgaggcgcttgacgggttgctcgagaaggtgatcgatgaccaccgccggagacctcgcaacggggaggacggcagccaccgagacttcgtggacgtgttgctggacgtccacgagaaggatcaagagcatggcatccaactagagagcaacgaaatcaaggccatcatcttggacatgttcgcggcaggcacggacacgacaaccacggtgatggaatgggccatggcggagctcgtcacccacccgcgcgccatgcggagagcccaggacgaggtccgcgcggcggcggccggttcaactggcgtcaacgaggaccacgtcgcgcagctggactacctcaaggccgtgctgaaggagacgctccggctgcacgcgccggtgccactgctggtgccccgggagccggcggcggacaccgagatcctggggtaccacgtcccggcgcgcacgcgcgtgctggtcaacgcctgggcaattggccgggaccccgcgacgtgggagcgcgccgaggaattcgtaccggagaggttcttgggcggcggcgccgcagccaacgtcggcttcaaggggcagcacttcgagctcctgccgttcggcgccggcaggaggatgtgccccgggatcgcgttcgcggagggaagcgccgagatggcgctggcgagcttgctgtatcattttgactgggaggcgagccggggccagaaccgggaagggacgccgtcgctggacatgaccgagatgagcgggataaccgtgcatatcaagtccggtctgccgcttgtatccaagccgtggagtggatcccccttgaactagtagcagaaaaacattgatagggcgcattaaagatggcaatggatacctaaaatccaaatacccgacggacccgatataaaggtgggtatgggatgatttctctacccgcgggtatactaatgaataaaaacctctacctattggatagacggatacgcgtacgggttggtactatccatatctgtctacccataagtaaaatatacccacatcaatatcattataacgatttaatagagccaatcttagctaaaataaactcttctctacactatcatgttgtctacgatcccacagttatgtgataatatcctttgttatatgtgaagttg

SEQ ID NO: 2663 - DNA, 992 bp, Zea mays
  Clone ID: ZEAMA-23APR03-CLUSTER440598_1
gttttggatcgatcggtcacgcttcctttccttgctcagctagcttgtgctcctaaagctttgtcatggcggcgtcccgctcgcccaaggccgcgagggaggcggccgccgtggacgccaacaccacgttcgtgcaggccgaccccgcgacgttccgcgcgctcgtgcagaagctcacgggcgccgcgccagcagcaggcgggacgacgacagcgacagcgccgaagcaggaggacgacgacgacgcggctgcggtgaccgtcgcgcacgcgccgaggcggccgaagctgcaggagaggcggcgcgcggcgccggccaggctggagctgtcgccggcgtcgttgtactgctaccaccaccaccacgcccactcccgctacggccacgggctcatcatgcactcgccagtgtcgcccatggacgcctacatggtgctggcggcctccgcgtcgccgtcgccgtcgccgtcgccgtcgagcggcggcgcggtggtgacgataagcagggaggaggaggagcgggaggagaaggccatcgcctccaagggcttctacctgcacgcgtcgccaaggggtggtgacggcgaccggcccaggctgctgccgctgttccccgtccaatcacccaggatcagtgaactccggcgaggctagcaagctagtcatgtgtggctaattcaccgttagtgacatatatatatgcatgtaccgcctatatatatatttgcgctagaacttgatggtgttaaaatttcatggttgcaacgtacgtactacgccttgttagtttttgtagccggtaaatctctagctaattaatcctctgccacaaaaaaaaaaaaaaaagatagatgatgcgacgtcgtacgcttgttaattaatttttagctaggcctttactgctttatagttagtagatggctaattaatcatctgaatgtaatgacgcgcgtggcgtgaatgaagtgtgtctcccgaaaaaaaaaaaaaaaa

SEQ ID NO: 2664 - DNA, 783 bp, Zea mays
  Clone ID: ZEAMA-23APR03-CLUSTER4410_3
agagtaatcggctcagaaacgcaggcagcccagcccacgccgcgaggaagcctgaggccgagagaggactgagcaagcgtcccgcgagaaactggtgttccggaccaccacgcggatgggctcgggcgacccggcggccgaccccctttcttccttcctccgccaccccggcgcgttctccttctcccgtcgcgtcgccatggcgcgcgacgccaccgccacatccgtgccagcgctccgcccctggcttgttgacctcctcccgctcctcgtcgtcctcctcatcgccgcccacgtcctcgctctcggttactggatctacaggctcgccacggacgggtccaggcagcccgcgcggagcaagaagcactaaggggacggcgcccgcggccggatggaacgcttgaaaccagtttgctatttcagtcctgcatccttggcttgttgatctccaagccttccaacgtcagatgatggcgtggaaagttcctgaaagaactagaacagggaaccgatcttatccaatggtttgttcagatgttggtgtcaaaagtgacgatagctgaatagctgatatgtggaaggaggcccttttgagcataaatagttttcggttgctggataggtttgacatctctcgacctctccgtgtaaagaacagtagctagacagatgtgccgtttcatatgttgtggcctggcgggcttttgtaattcatgagcagcattttattactgggcaattaagttaacgaggcaaaaaaaaaaaaaaaaaaggccccta

SEQ ID NO: 2665 - DNA, 1492 bp, Zea mays
  Clone ID: ZEAMA-23APR03-CLUSTER44130_1
tttttttttttttttttttgcacaatcagaaacaagagatccattggataagagaagctagctgtaaatcaccggttcaccaccgccttaacaatctgtatatcctgctgtgttagccccccaagtcgatgtcgatttacacacaagaacacgaagatccgagaaaaattaaacaaccagagaaaaatcaaacgccatatatgtgaacactaatcacctcctccaccgtaccctcttgataacttggatccttgtctctatccctatctccgcatgctgccaacggcgcgcgcgtgcatgagccatgcatgccgcgccgccttaccaatggcctccaccaccattgctgctgccatttccgatcaagctattgctccagaacccgcctggagtctcgtggccaccggtgacgctgctgccgtcgcctgcagcttgatctttcctgtggtcgttttgacgatgatcagctccgtcgttgcttgcaccgccgccagctgcgctcaccgccggcttcaagtcctcgaaggggaagagcatcctgcccaccgcgctctcctgcaacccgccggcgctgtaaccccccgttccgtgcgtgtccagcgagaacccgagcacactctgagactgcggcggcgggggaatgcggaactcgccaagcgtgaatcccgcgggtgctgcgtactcggcgggcatccctagctgaacgtgctgcagggggacgtagcagccggtgctcctgagcagctccatagccgagagcgcgcccatgcccctgccggcggcgccgttgcccagcatggcggctccggggtagcacacgctgctgctctccaggttcgggaacgacgacgggaactccggtggctgcagagcgcggccgttgttgtggtgagggaaggccaggttgaggtcgtggtgcgcgccctcgtgcaccagcttggggttcttcacggagaccgtgccggacatcgccgcggaggtggaggccgccgaggacgagctgcgcttgttcttcctggagccgccgcccaccgggacgttgcggagcgagccgccctcggtccagtagcggcggcaggtcttgcagaagtagcgcggctgctgcaggctgtagttgttgtaatagcagaacttggtgttggtggagttgcaccgcgggcagttgagcgccttctccttgtgcggccgcgcccgccgctccgtgcccgccgcccctacggtcgcgccagcgctaggcgctgccgcacccgcagcgggaggaggagcgccaccacccctctggctctgggtctgggccccgggtgccgagggcgcagcagctggcggtgggtttggattcgcgtttccagccatgagcatctcctccatgggcttgcctagccctagcggcccgtaaaactccactttgtttgtgctcttgtagggttgcgcttgtggcgtagtagcacctctactcttttcgattaggatgttataggtaatggtctcgtgc

SEQ ID NO: 2666 - DNA, 1251 bp, Zea mays
  Clone ID: ZEAMA-23APR03-CLUSTER4421_2
atatcaaatcttaaaatttgtctcctttcccacaagtcccgagagcagccgcgaagagagatcccgcgctcaaccaccgattctcggccgcggcctccctcggctcctccttgatcccttcctccttccattggtggtcgccggggacggggagcgaagaagcctcccttccttccctccgttggtcgccgggaggagtgaagaagcctcccttcctcttcccctccggtggtcgccaaagacggggagcgaagaagcctgttttcctccttccgtccggtggtcgccagggacgaggagcaaagatgttctatggggccatggtgtgggatccgtggctgatcgtgtcgcagatcgtatgcctgcagtgcctctactacttgtcgctgggcgtcgccatggcgctgctcgtcggcacccgcgtcccgcgactcaccctcctctacctcttcgacttctccacgctcaccccgcgcacccccacaggttggtgcgccatcgcatcattcctcctcgccgccgtcactggagctgggttcatgctttatgtgattgagcgagccaaaaagtgcctggactttgcagcaacactctacataatccatctcttcatgtgcattgtttatggtggatggccagcttcagttacatggtgggttcttaatataactggtttggcaaccatggctctcctgggtgaatacctatgcatccggcgggagttgaaagaaattccaatatcacggcttcgtgcaagtgtttaagctcacatgctaaaagattataggtgatttcaaatggtgttatcccaggaggtgcttgttaatatgttccttaaggaatacagtgactcacaatgaatgctttattctgtgatttccaatggatacttctcaaacttcgcatagagcgttcatctgatgcccaacctcccagttgaccatgatgaactgattgatcctagaggttccaccaacggaaatggcagctcactttctaaatcctacattcaacaagtcctcccttgccccttataaaaaagagttcctggcctgcctctcatgaaagaaaacttcctcccttgcctaagttctagctacagtttgctgcttgataatgtacgactagataccaacatgtgcattcttcagtaatatattgttcttaatacatgcaggcacccatggatctcttgtctgtatcttgcaaatgatatttgcagtgttatatgctaattctgtaattcatgct

SEQ ID NO: 2667 - DNA, 2025 bp, Zea mays
  Clone ID: ZEAMA-23APR03-CLUSTER4444_1
gcacgagaccattacctagaacatcctaatcgaaaaaggtcgcagtaacatcagcagagcggcgagagccaaatcgcaactccagcctcttcggaagcattctctccccaagatttcagagcagagaaggttgcgccgttcccacaccgagaccaccaggacgagtcttcaatttatgggattgtaccgcaacgaatgggctgaagctctgggcatagagatctccagcccgagggccaaggacggcaccatggtagtgaacaggaggaccggcttttccaacggcaagctgatgccgtcgctgagcttcaagctgtgggaggcagaggcggtagtcgcttccatggaccacgacggcagggccagcgagtgcctgcgggattccgttccggagttggtgttcatggcgtctccgactacgaccaccccgagcccgcgggtgtcgtccagccccaaatgcgagctggacgccgcggcggtgaagctccagaaggtgtacaagagctaccgcacgcggcggaacctcgccgactgcgccgtggtcatcgaggagctgtggtggaaggcgctggacttcgcgtccctcaagcacagctccgtctccttcttcaacggcggcaagcccgagacggcggcgtcgcgctgggcccgcgccaggactagggtggccaagcttggcaaggggctgtccaagaacggtaaggcgcagaagctggcgcggcagcactggctcgaagctattgacccgaggcatcggtatggccacaatctgcacatctattacgatgtctggtccaagagcgagagcacggagcccttcttttattggttggacattggggaaggcaaggaagtgaaccttgagaaatgccctaggagtaagcttcagagccagtgcatcaagtaccttggaccaaaagagagacaagagtatgaggttgttgtggagaggggaaagctcgtgtataagaaaaatggagctcttgtgcaaactctggacgattccaagtggattttcgtcctcagtaccaccaaggcactctatgtcgggcagaagaagaaaggctcgtttcagcactcgagtttcttagctggtggagccataacatctgccggaagattggtcgtcaaagaaggaatcctcaaggctatatggccgtacagcggccactaccttccaactgaagagaacttcaaagagttcatccgctacctcgaggagaacggtgtcgacctcactcatgtcaagaaatgcccagtcgacaaagacgacgagtaccccttggtgagcaagcctgaagctcaggccaacgccgccgtctcgaacggcactggcggagcagaacacagcacggcgtctgaagccatggttgaccatacgagtgactccgacgcggccgacggcgacggtcacggggcaaccggcggtcgagtgccggtggtcacgggaccaccgtcgagtgctgctgctgctgctgctcaggttggcaagaaccactcgacgtgccggtggtctacgggcacgggcccccgcatccggtgcgtccgcgactacccgcaggacctccagtccagggcgctcgagcacgtcaacctctcgccgaggctcaccggctcgccgtcgaggaagagggacccggtcccttcccctcgccccagcccggcgatgatcctgtctccgaggctcgcttccgtcggattccaccctcagacgacggtgtccctcacgctgcccgacttcaagaggagcagactgcactgaacaactctgttcttgtttcattgtttcgcttggcgatcagaagaataactcaactggtcagcctgtttactgacaggccagtgacctttttccctgctaggttgatcagtagattacttcgtttttttcttctgttcattgctttattgatggcaacaattttcggttgtagatactatttgtgattcttttgttagatgtatgtatgcaaggagtacatgtacattgcttaagattgaattgaaaaaatggcgattttgttt

SEQ ID NO: 2668 - DNA, 1810 bp, Zea mays
  Clone ID: ZEAMA-23APR03-CLUSTER4444_3
gcacgagaccattacctagaacatcctaatcgaaaaaatgacacgcgggcaccatatgccacctgccgtccctcgcccccaccggcaccgacccccgccttcttcaaaaactttattcgccgaaaccccttgccacctcgccgccaccgcccaacaaacaggcgcgacgacctctactctacctcgtcgccaccgccgtcaccggtcaccgccgccatataagtaaacgctcgcctcgtcctcctcccagactcgccaccctccgcctccgacacatggcccagccgcacctcgtgctcccctcgccgaggcccctcctccccgccgccgccactccatcgcgccgcgccgtcgccgtccgcgcggcgctctccaccgcttcgccgcccgccaaggccgcggcgggagcggaggcggtgcggtcgatccgcgcgcgccagatcgtggacagccgcgggaaccccaccgtcgaggtcgacctcgtcgccggggacggacgcctccaccgctccgcggtgcccagcggggcgtccacggggatctacgaggcgctcgagctccgcgatggtgacaaggccgtgtacggcggcaagggcgttctccaagctgtgcgcaacatcaacgaggttatcgcgcctaagctcgtgggcgtcgatgtgaggaaccaaagtgatgttgatgcaatcatgctagacattgatggaactcagaacaaatccaagttgggtgccaatgctattctcggagtctccttgagtgtgtgtagggcaggcgctggcgcaaagggggttcctctgtataaacatattcaggagcttgcaggaattaaggagcctgtcatgcctgttcctgctttcaatgtaataaatggaggtagccatgctggcaacaatttggccatgcaggagttcatgcttttacctgttggagcagctacatttgctgaagctcttcgtatgggcagcgaagtttaccatgtcctgaagggcatcattaaggcaaaatatggtcaagatgcatgcaatgtcggagatgaaggaggttttgctcctaatgttcaagacaacagagagggtcttgtcttgcttatggatgccattgagaaggcaggctacactggaatgatcaaaattggaatggatgttgcggcatcagagttccttacaaaggatgggaactatgatctaaactttaagaatcagcctaatgatggagtccatgttctttcagcccagcatctgggtgatctgtacagagattttgtcaaggatttccctattgtatcaattgaggacccttttgatcaggatgactggagttcatgggcatcattgcagtcctcagttggtatccaaattgtgggtgatgatttacttgtcacaaacccaaaacgaattgcagacgctattgacaggaaggcttgcaatgctcttttactaaaggtcaaccagattggtactgtcactgaatcaattcaagctgccctggattcaaaagctgctggttggggtgtgatggtcagccacagaagtggtgaaaccgaagacaacttcatcgcagatttggctgttggcttagcaagtgggcagattaaaactggggctccatgccgcagcgagaggctggccaaatacaatcagcttctgcggattgaagaggggcttggcaacgtgcgctatgcaggggaggcattcaggtctccataagaaatagactttaaatcaccgcgcgtgtgtgagaaagtgccagctttatatggacaagactattcagagaggataatgaatgagagctaataatttttttacac

SEQ ID NO: 2669 - DNA, 1395 bp, Zea mays
  unsure (1)..(1395): unsure at all n locations
  Clone ID: ZEAMA-23APR03-CLUSTER445940_1
atcgttcaccgaaccggtgcttctccgtgcatatatatataagcccgcgaccccggccgggcggcatcacagcacagcagtgcgccgtcattcattcatcgctgccatggcttcccctgtcctgctcgtcgccgcgctctgctgtctctgcgcgctgctcggagcggcgggggagccggcgaggggagcggcggcggaagcgtcggcactccgcagcaaggcggccacggaccccaacatggaggtgaagttcgacttcacgccgttcctgatccagtacaagagcggccgcgtgcaccggttcatgggcacgtcgttcgtcccggcgtccgtggacccgcgcaccggggtggcctccagggacgtggtcgtggaccacgggactggcctcgcggtgcggctgtaccggccgagccgccaagccgtcgccgccggcgtcggcggcaggctccccgtgctggtgtacttccacggcggcgcgttcgtggtggagtcggcgttcgaccccgtgtaccacggctacctgaacgcgctgacggccaaggccggggtcatcgcggtgtcggtgaactaccgcctggcgccggagcacccgctcccggcggcgtacgaggacgcgtgggcggcgctggcgtgggtggtggcgaacgcgaacgcgcgacgcggcggggccggggccggggccggggacccctggctgtccaggcacggcgacgcgtcccgcctgttcctcgccggcgacagcgccggcggcaacatcgcgcagaacctggcgatgcgcgcggcggggcagcagcagaggatcagggggctggcgctgctggacccctacttcctggggcggtacgtgggcggggtcgcggcgcgcgcgtgggacttcatctgcgcgggaaggtacgggatggaccacccgtacgtggacccgatggcgctgnnggcggagnngctgcggcggctgccgtcgccgcgcgtgctgatgacggtgtcggagcaggaccggctcggccccttccagcgcgcgtacgtggacgcgctccggggcagcgggtggcgcgggcgggcgcggctgtacgtgacgcccggcgagggccactgctacttcctcaacaacctcgcctcgcccaaggccgccatgcacatggccacgctcgccgcgttcatcaacggcagctgatagcttgtcggcagcgtggtagtgctgctcacccgatcgatcagccagccctctgtacgtagctatagtggtctgtctatctcactggtgagtggagacatctgtaaccaccataccgtatactgtattttgtcagtggccgcccgagagagaggtgtttagcatgcatgttatgtaatgtaatactacgcgcacgtttttgttcaaaaaaaaaaaaaaaa

SEQ ID NO: 2670 - DNA, 1749 bp, Zea mays
  unsure (1)..(1749): unsure at all n locations
  Clone ID: ZEAMA-23APR03-CLUSTER44602_1
agaccttgtccggttattcccatcttatatagattggatgagttttttttttttttttgaaagattttgtcttgtttaaaattgaaactcatttaatcctaccaaatccacatagattgagaccaaaacgaacaagccctaactagagccaagtttggatgccacttttgcacagtttagtcaggccatggaagcaatacaggaaaccaaacacctagatttgcatatacttaactagcctggatagctggctgtgcatccaaccaatcagccccttatgcaccattaccaagctcgcgtgagcctcactgggcacacgcagccataccatatatagttggtaattgatattcatcttgagtttcggatgccccgggcaacatcgatgcaagaagccattgaacagttggtcttgattgtatttgcactaatatgagatctacaagcagaaaacccctccttccgcaatgaattgatgagggtgccgagtgggggagagttaacttttgctcgtctcgaaatctcatcaagtcttatatatccaggaggcaacctcgggtcactctcttcaatcatcatgccaagaagtttttccaaagagacaccattttcaattgtgcatgcccatccccattcgttggccaagcttagcatttccgtaaggaaagaggcatcgtggagaggacctgtccaaagtgggcctacaacagtgattgaatcggcatctgttgtgtctgtacatccacaagaaatctgccccagctcatcaaatccaaaagtttgagactgaccacaactcttgcaatgacaaatgaagccatagttactgatgccatcatcttttccgttgcatagttgtaccattactcgataaataggaccatgatacgcaaaatacgagaataggggtgttatgtgaaatcccaaaagagatgcttcccgtgcagagccacctataaccattcgcaaaccgacctcatttggatatggcattggacgaacatacgctccatatgaagacaaagagcttctcgacccatatcctctcgccgaccgccaatccgtggacgtcaggtagagcagccccccaattttgagcgccaagagcgctgccctcacgtaagcggcgtcgccgccgaacgagtcgacgtcgatgacatcgaagtactcgcgccggaggtagcgctctgcgagcagacgggtggcgtcgttgtgcgacaccacccacctcctgcaccccgccaccgcttccggcgagccccgctcaaagcgacagaggttggcaaggatgatggggcgaagagcctcggaggcgtcgttggcccagacgaagtcggcgccggcctgcgcgaggtagcggagcgcgcggacgccacagccgcacatagcatcgaggcagaggaatggggcggaagggtcggggcggccacggcggcgatggagagtggctgcgaggacggcgaggtcacgacccgcggcgctgtcgctgcggtagaaggcggagccggggtcgaaggagacgccgcgctcggactgcgtgcaggctggtggcgctgagcgccggcgcgtgggttgaaggagagagggagagtggggcaaagagatagcggcggcagccatgttagcggggaagagtgggggaaatggcttctccttaggattgggttcaggcgttcagctgaatgtctagtcttttcggtttcgggtccggtancataaaaggtgacccggccggcccgagggtcccaa

SEQ ID NO: 2671 - DNA, 1756 bp, Zea mays
  Clone ID: ZEAMA-23APR03-CLUSTER4463_6
gaacatcctaatcgaaaaaagccccagcagtttgccactcccacgcgaaacagaagccccagcagggcggcactcccgacgcgacgcccctgcttgccggccgggaggctcactcgactctgcctccacttcctcgtctgtccgttggagcacggcgccgatggcggcggcgccagcgctcgcgcgggagctgctggacgcggcgcgggagccggagttcgcggagtggcagcgcggcgtgcggcgccggatccaccagcacccggagctggccttccaggagcaccgcaccagcgcgctcgtgcgcgccgagctcgacgcgatcggcgtcccgtacgcctggcccgtcgcgcagacgggcgtcgtggccaccatcaccggccccgccgcgggccccgtgttcgcgctccgcgccgacatggacgcgctccccatccaggaaatggtagaatgggagttcaagagcaaggaagacgggaagatgcatgcgtgcggccatgacgcccacgtggcgatgcttcttggagcagctaggttgcttcagtctcggagggacgatttaaagggtacagtgaagctcgtcttccagccagccgaggagggacacgccggcgcataccacgtcctcaaggaaggcgtcctggacaacgtgcaggccatcttcggcgtgcacgtggacacggcgttgccggtggggctcgtcgggtccaggccagggccgttcctcgccggatcggcgcggttcacggcgaccatcacggggaaaggcgggcacgcagcggggccgcagcacgtcgtcgacccgatcgtcgcggcgtcctccgccgtgctcagcctccagcagctcgtcgcccgcgagaccgacccgctacagggcgcagttgtgtcggtgaccttcatcaaaggaggaggcggagctttcaatgtcatcccagaatccgtcaccatgggcggcaccttgaggagcatgacgaacgatggcatgtcctatctcgtgaaaagaatcagagaggtgatacaaggacaagccgccgtgagccgctgcgccgctacggtggacttgatggaggagaggatgaggccgtacccggccaccgtgaacgacgaggccatgtactcccacgccaaggcggtggcggagagcatgctgggcgaggccagcgtgatgctgtgcccccagttcatggcggcggaggacttcggcttctacgcgcagcggatcccggcggccttcttcagcgtcggcgtccgcgacgaggcgacggggaaggtccaccacgtgcactcaccgcacctggacatcgacgaggccgcgctccccgtcggagccgcgttgcacgccgccgtggccatggagtacctgaacaaacacgcaccatgcaaataaacacaaggctctggccatcccgataatacatgtcattcttattgaagtgactgcatgccgcaaaatcttccctccttggagcggtaagaatttgctaccccgcatccgtgctctgtacgtcgaaaataaatgtgtccagacatccctgaaagattggtttggttgtactgcgcctgttccaccaattgtatgtaaacacatgtgcctgaaattcatgtaatgattaatttagattgcaaaaaaaaaaaaaaaaaactgaggctaggcttcctgtgctgttactttcgtttcgacaaattgattatgctgtagcccttcaggtttcatctagacatttcggtgtcttggagcaaaaaaaaaaaaaaaaaa

SEQ ID NO: 2672 - DNA, 1852 bp, Zea mays
  Clone ID: ZEAMA-23APR03-CLUSTER44833_1
ttttttttttttttttattgagaaaagagtcggatctgatcatagaaggtgaaaccaacagtgatatgctctgccctccagaaaatgagataaagctcaaatgtaaaacatcatctaactacaaaaccttggcattaaaaaaattctgagtatgaattaacgtatatatgtcatctggactgaaaaatgcatccagaggtcatcatgaagttaggtaacagactgatgatgataagaccttttttatgattaggagttgagcttttgcttcacattctcatccttgcatcgtcgctgatcagcaatcatcgactcaaaaacatccaagagatcatccagtccctttgaatcctctcccagtttcctcatggcaacaactatactctcaatggtagacaagcacccagccttcggctcatgcctcacctcactatacaagctaaccctatctgactccagcttcacgtgtggcagaagttgcagccatggattctcatggtacatcctctgtgcttttgcccaagtgccatccaacacaatcaaatgctgtacctgacaacctgaagcatcaatgctgatcgcccgctggcacggaaatagcaaagcagattttggcggtatggtgattgagaattcctcaaacattgttatttctccagtgagtttacacttcttcatctgtatctttgtgacaagaaagccatttgagacagctgcttcacctagcgggcctcttgataaccatctgattttgggtttcactccacgctcaataccaatccttagttccttctctgtgtacgcaatagtgcacttatccatgcttttcctggtccagtcctgtccaatagcagcgctaacttcatctatttcttttcccacaccgttgcagccattgactatcccattaacttcatctgagtctgagtcatttgtaactacagaatgagacagattaccatttacattatacgccacatcgacctcgcttctatggttgctttcacctgtagttgcttcatcaacagagttctctatctgctttgcagcggagctaggcctttcaagtccagcaggctgttcatcactattcgtcttcttgatgaatctgacacgcccaccatcgttgtggcagcaactaagagaaccaacctctccagcaagatcgcagaagatcccaccattgacgtccccaagatccaacatttcacaagaaccaccaaaactgaggtcttcagcgcccagataaccacaggcactcaatccggactcgtcaaaatcacaggtcgcactatgctttccatccgatttggcaccacaaatcccagcacgaggaaacgcaaggccaccgccatcctgcaactcgatctcctcaggcccgtcagaccggtcgtggtttccaaaacgagcagccacaggaccgcctgcaggacccgaagccgccgccgcgccgccgcaggcatcaagcgtggtgaggatgaagcgggcacggtggttgacgtcggtgacctgagcgacggcgaggtttcggaggccgaggcgtgccacgcgcgtggagttgagcgggtggtgggcctccatcgcgtgctgcagaacggtgactccgacggcgttgtccaccggcgaggagcggaggcggccgcagaggcagaggcggaggggcttcgtgcatacggcgcacatgggacgacgctgccccggctgccggtgaggaacatcgctctggctcgccgccgccgccgccgccatgggtggactgaggccggctagtgtgggagaggtttgggcgtttggccgagtttagggtttggactggagggggtgcttctctttccccttgtgttcgaaatgt

SEQ ID NO: 2673 - DNA, 773 bp, Zea mays
  Clone ID: ZEAMA-23APR03-CLUSTER44868_1
ttttttttttttttttttttttttttttgtttagattataaaaaataaaatagtgatagatgaacttattatattccacaaactaaacaaaaaagtgagcgagaacttattcctcaaatcatacacgctataattaaactctctctagtgtgtctgtctctctgagcatgaacacggagaagagagcgtctgattacactcgtcttctcggcctgttcctggtgcgtggaccgacaacggtgggttcctggttccttctcctccaccggtaccggcggcagctcttcgtcttcctctgcgtcctcctccgcttcgttaatgtcgtcgtcttcctcaccggcgccgtcgtcatcggacgcctcgttctcttccagtatcgcccggtttatctccatctcccttaggaatcggtcgtcgaggtcgtcggcgacgcgagcggcggtgacgagcgtgccgacgaagagggagagcgggagcacgaaggcgaggatgagagcgttggtgctgggcggcccgccggcgcgcaccaccaagaggcggccccggccccgaccccgccgccgcgcgccgcctggtggcaggcggcctggcgcagcagctgctggctcggacggcggcagggcggccgcagcacggcggcgtggcgccgaggcgaggtggcaggcagagcgcactgaggtggccgccccgcgccatggcctgctcctcgaagcctccggaatcgcaggctcccagcggtcggggcagccttatccggtggcggtggtgctgtt

SEQ ID NO: 2674 - DNA, 963 bp, Zea mays
  Clone ID: ZEAMA-23APR03-CLUSTER44979_1
aagaacaagaacaaaatacagcaacctgttcacaatggagtaatgtactgtttttttgttttcgttctttgttcttttttttggagaactgtactgtggcagagattcagagccacgccagcttgtagttgtagagaacagcaagccagatttccataaacgttttacatggtactcgcagcacacgccaacgtccagactccagagagataacaaagagagagagagagagaacaaaaaccatgtacgtacatttacagcgaaatcgatcgagtgctctctagctgcgcgctagtgccctccgccggcgattgccgcgagcgtgacgatggacgacgccaccggcagcgggctgcgaagcgggagcgcggggtcggcggctgctcgaggcggcggccctcggcgtcgtagtagatggccccggagaattccagcggctggcagcgctcccccatcattatctccttcctccacaccccgtcctcctctgcctcgaagctcggctcatcctgttcgcgtctcctcctcctcttggacccgatggctccgccgccgccgccgccgaggaacggcaagatggcgcgcgacgacaaggacgccgcgagcgcctgccgcgcgcgcgggcgccggtgcagccgccgagccgcacgcgacagctgccgcgcgcacgtgcccatcagcgccgtcaccgcctgcgcaaggctcgttcccattgtctcctcgctcgtcctctcccccgttttacctctatagcactgtgccttgctctttgatggcttctttttctgtgcggctgctctcgccatttcgcggctacttgtagcgccctgcgcccagcgagtggacgacgcagacgagccggtcggggcgcctggattaattagccaactaatcactcagttgcgccctatccgattaggtgtgtgcgtggtccgtgtaatctgattagtttctggccaccat

SEQ ID NO: 2675 - DNA, 1781 bp, Zea mays
  Clone ID: ZEAMA-23APR03-CLUSTER4503_2
atcctctccacctcttcagaatccggacctcggcagagtccagtactccagtccctcgtgcatctcggcctctccactctcctttccacgcccgtccagtcctctaatctgacccctcttctccagccggccggagatggtctcgctgcgatgcacaaccgcgcaccactccctcctcggctcgccgacctgcctcgcgcgcccgcggcggcgggcgtgccccgtcgtgcgcgctgccgtcgccgtggaggccggcgcgcaggccaaggtctcactcatccgaattgggacgcgtgggagtcctcttgctcttgcacaagcccacgaaactcgagaaaaactgaaagccacacactctgagttagctgaggagagggccattgagatcgtcatcataaagaccacaggagacatgatcttggacaaaccccttgcagacattggaggcaagggtttattcaccaaggagatagatgatgcgctcttgcagggaaggattgatatcgctgttcactctatgaaagatgttccaacatatctacctgaaggcacaatattgccctgtaacctaccacgagaagatgtcagagacgcattcatatgtttgactgcaaattcgcttgcagagcttcctgctggcagtgttattggaagtgcttctctgcggagacaatctcagattctctacagatatccatcactgaaagtagttaacttcagaggaaacgttcagacacggttaaggaaactcaaggagggagatgtctctgctacattgttggcactggctggattaaggcggctaaatatggcagaaaatgcaactgctgtactatcagtggaagaaatgcttccagcagttgcccaaggtgctattggaatagcttgccgaagcaatgatgacaaaatgatggagtatctatcagcgttgaaccatgaagataccagattagctgttgcatgtgaaagagaatttttggcagttcttgatggtaactgccgaactccaattgcagcctatgcttaccgtgacaatgatgggaattgctcattccgcggtctattggcttccccagatggatctaaagtatttgagacaacaagaagtggaccgtactcttttgacgacatggttgagatgggcaaagatgctggtcatgagctgaaggcaaaggctgggcctggcttctttgatagcttgcaatgaaaagaatgagcggccatgagcaatttcaattgtcactcttttggttagaaacagagggcccaagtagagtgttgagaggtttgtttttgtttcttctttctcctactagttctgctagagaagggtgtacctggtgtagtggtgagctgagtcatcaggtcgcgggttcgaagcatccagtctccgtatttgcgggagaaggtttgtctcggtttatctcttttccgctactcatatgggagaaatgtgggagcctcagtctgctctttttttttttccatactagttctgctagtgccttgtactatcactcgtattgagcagccccattcagctttgtagtgtctccctctgggttagagcctttataggtatctgcacagcacagctatatgttttgtcgaacaggtatctgcacagctacgttctcggaagactccagcagccagctgcgtcagcacgatcagatcagtcatgctcgtgcccatccagcagggaaatctggggtagaaatatattctgctgttatacccgttcagtcgagatttcagatttgttgcagcgcatatgattt

SEQ ID NO: 2676 - DNA, 1482 bp, Zea mays
  Clone ID: ZEAMA-23APR03-CLUSTER450869_1
attgaagcccattccaaaccgtcctcccccgagtccccccctcaccagtcctgaaaagcgggcccctttctcttcctcttccttccaggaatccagacgtcctctgtccatggcctcccatcctgagcacccggcggaaccgcgagcaccgcccgccccaacgaccataggcgatctctccgacgacctcctgcgcgagatcctcctccgcctcccttcccttccttcactcgtctgcgcctccctcagctgccgcgccttcctggccgccgtccgctcctcccgcgccttccgccgccgcttccgcgcgctgcacccgcctcctctcctcggcttcttcttcgaccccgacggcaacgaaaatcccaccttcatgcccattcgccgcggctccgaccggggccacgcggccgccgtccgcggcctggacgccttcctgacccgcgtcccgcacgaggacgacgtcttccccgggtggcagataatggagtgccgcggcggctgccttctcctcctcaactggagaaccaagcagctcgccgcctacaaccccctcacgggggccttggatctcgtccccaaactgcctgacgacatctgcaaagggcaccgcggcaagttcatctccggtgattttttcctggtagtccccgacgacgaggctcccgacaggcgttcgttccgcgtggtctcctcctgccacgacaagtaccgggtgcgcgtcgccgtcttctcgtctgccaccaggaagtggcagattctcccctggtcggagcctgtgccgacacagccggcgagcggtaagtactggcttctctcggggaggcaggtgagtgggttcctgtgctggtcacaccataagaatgcctacaaggtgttgctggacactgcgaccctgcaattctccgtcatcgatctgccgtatggcttgagtgggcaaggtcacctctacaggactggggataccaaggatgggaagctctgcatcgttgccgcaatcgatttctcgctgttcgtttggttccggacaccagacgccggtggcattgacaggtgggtgctccgacatgtattgcagctggaggatgaggttcttgaggccaccgagggctcacggaatgaacttgaacagcttaaagtgtttgcaattctggacggcatcgtgtacatgacgacatttgagacgtttagagatgctaccttgccttgttggtacctatccttctgcctggaaacaaggaagctggaaaaactcttctatgtaaaagctaatggccatgctcatccctacttcatgccatggcctactgctttagtaggtaacaatttgagcccctgactaggaggaggtgcttgttcaagtgaaactggttacagtaacatgtaagtttcttgttctgtctagactcaacagtttgttcacttatcctcttatatactagtaacgggtgcgcgctttgcgtggcaaaaaaaaaaaaaaaa

SEQ ID NO: 2677 - DNA, 1527 bp, Zea mays
  Clone ID: ZEAMA-23APR03-CLUSTER450_1
aaaaaccgaaatccaaattccaattcaatccctccgtcgctcgctccaatcatccccaccgcttcaccgcccgcgccacccaatgtcaggcgacggcgacgcgcgcggcctcgaggcagcggcggccaccgcggcagaggcggcgcgggagctgcgcgaggcggccgcggccctcgtcgccacccgcgccgctgaggaggacgcgctgcgccgccgcgccgtggcgctcgaagccgacgtccgccgcctccaggcctcgctccacgccctcgatccctccacgctcgacaaggtcgaggaggaattggagcgtgccagggtggcaatcacggatagtgatgtggcttcgtttcttcccagcaagcggaatggcaagtttcttaagacatttctaggccctgtgaatgtgcgggtggcgaggaaggaagataaactcaaaatcaaggatgagtacaacaattatagggataggacagcctataagtttctgttatttccatctatcctcctcctactgagatggtggatatgggatggatgccttccagcattggctgttcaaatttaccaggcttggttactatacctgtacacaagctttgctttgcgtgagaatgtattaattgcgaatggaagtgacattcgtccatggtggatatatcatcactatctagcaatgctgatggctcttattagccttacatgggagataaagggacagcctgattgttctagcaagcagaggggggtgcaacttttcttgcgctgggcaatcatgcaaggcattgcaatgcatctacagaatagataccagcggcaaagattgcgtactcgaatagctctaggaaaggctaaaagaatggatgtcgttgctggcgaaacagctggtgtggaggggcagctcttgctgctatatcctgtccttttcatattacagggtttcgaagcatatgttggagttttgcttcttcagacggctttgcatgggcttgcttccgaatggcaggtcttagtctgcgggatcttgctggtggttatggcagtcggcaactttgtccacactatggagacactggtactgaaactgaggtttaaagcaaagatgaagaaagcgaagagcagacaggatcgcccgcatcaaaattgacaggcatcatcgtccttggaaaacaaggatgctgacaccgcctcttttgtaaatcctttgacccacattaacattttttgcctgcttgtcattctctctctctttttttttggtaattggccctgtaacattgaagttgatattccacacaacacggtggatgaaaccatatttgttcgctcttggatgagaactgagtttggcatgtactatatatttttctgtatgaaacctctgggttctgaaataagatgatgtgtatctgaagctgtgaattgacagaggggctctatacaaataatggagcagaggcttttgtaaggtcagatgttgtcatgtagtgtacttgttatacagagatcggtatgaatggttagcag

SEQ ID NO: 2678 - DNA, 1542 bp, Zea mays
  Clone ID: ZEAMA-23APR03-CLUSTER4513_1
gcacgagaccattacctagaacatcctaatcgaaaaaaccactcagtcagatccagtgctccacctacctaccagctccagccgccggcgatggccgtgtccttacccgtcccgatcccgccggcgctcctccacctcccttccctcttcctctacgccctccacacctacatccacccggacgccgtcccctccaacaccccgcgcgcagtcctccgcccgccgggctccaacgccggtcccgccccgggttcctccaagcgcggcgccgccaaggacaaggacccgttcgacgccacttccgcgcagctctaccgcctccggctctcccacgccacgctcgcctcccgcccccatttcgccgcctaccacctcgcgctcctcctcccgctcgcgctccttctgcccgcgctcctgctcccggccgcccccggggcctccccgctcgcgccgctcgtccccgcggcctacctcttcgttgcactcctccgccacgtcgtcgtcccgtcgccgcgccccgcgctgctcgccgccgcgctcggcgcgctcctcgttaccactctgctctcatccagccccttcgccggcgcgctcgcgtcgctcgccgcgctcccagccgcgcggttcgcgcgcgcattctggcttggcactgaccagccccgcaccgggctcgccgtgctatcgtcctctgcgccggcgcgcctcatcttccaccttaccgtcctcgtctcctccacggccacgatcctacgatgctgcggattcatggatggcgcggaacaggaggcgaagctgctcgccgccgcggctgggctgcagctgctggcggcgcggcctgccgtgcaaatgtacctcaatgaggctgtgttctgctggtaccagcgtctgcacgcgagccgtgcgccggacactgagtacggccgggccaaggttttcttgcacaaccaccacctctgcgccgtggccacgcagctcgttgcgccgccactgctcgtgctgtcgctcttgcattgtggcgggttcaagggaaggacttctttgagggcttagaggggatgtactggcttgttggatggtctgttgccatgaaggaggccgcattgcttgcggcccggtggatcgtggctgtgtggtcggcggcgacggtgatcacactcatgtgctacaaacgtggatggttattcgtctcgtgatcctttcttctcttgcttcctgcctgcgtgattggttcatatggagaccggagttgtgtacctgtgtttgatagagtgagatcccaacctggatctctggagttctggtaccacggcacaagtttttgtgtgcactgtttattttgcaagagaaatgttggatcaaattcttttgatttccttgtgtctgttcttactggagaagcaatttgaggtcagattttttgtccgccctttggggtggagtaatgtaacagaaaactgactggccagtcaccctgttgtaccctttgattgatggatatcaatgaatcatattcttccttttatgatcaaaaaaaaaaaaaaa

SEQ ID NO: 2679 - DNA, 871 bp, Zea mays
  Clone ID: ZEAMA-23APR03-CLUSTER4515_3
gctgcttcttccatgttcctcttcctttgtcgccctcctccctggagctgaactccctcgctcccgtcgtgctctggtcggaggaggatttgctgtgtgctcaccggaccgccaccccctcgccggcgttcctccctgcgtgctccctcccttgctcctccagctccagcgcccagtgtttctccatggcgctcgcccaagtcgccgccatcgaagctccctgcgcgcgcccatcttcttccctcagctcgccttcctgcagctcgccgtcgggccgccctttcctctgctcggacctcgccatggagcttcctcgtcagcgcgcccatctctccctctcgcggttccctggtgcttgcccctccatggcaccggatcccctgcaagctgccgcgccgtcgccttgctgctcgcccctggcccctctgctcggatctccttctctggatgcgcgcgtgccgcttggcctccctggtactcgctctcccttagtgccctgccccttgtacggcgcgccttccacccggttccgtcccaaggccatggggaagcccaggccgaaggctgagcctcctagacccgtaccagtggtcgtacccaagccggagccagaaccagaggcggttccggtgctggagcctgatgccaaccccgcgccaccaccggaggacacgatggaggtcgacggggcggtggacgctcctggacacgggagggggcggtggaggaggacttcgtgttgcgcgagatcgatgtgtacttcaaccccaagccgttcgaaccaacacccagctgtacattatgcagtacccctgaggccatgttggcgcccatatgagttaaatgagatatgtgaagaggttcgtgtgaa

SEQ ID NO: 2680 - DNA, 2084 bp, Zea mays
  Clone ID: ZEAMA-23APR03-CLUSTER45203_1
ctaagctttcacagttctgtgacaacagcaggtaatcttacattacattacacctagcaactgatgaaccagttggtctagacctgcatgtcaatgaagtagtggtcactccctgagcccagctccaccttgacgctccgggagatggagctgttgagcgccgggtggctgacggtgaccttatactcgccgtggacgagctcggcctcgaagtagccctgcgcgtccgtggagccggcccgcggagtcgcccgccactcggcgatgaggcggtccacgacgtccccctgcggcaggttgttgaagctgttgtcggtgaggcacatgacgtagcacccctcgggccgccacgccgaccagatgacgatcccctgcaccgccgggtgcgcgtacgcctcgcgcagcacctcctcgaggtgctgcgcctgcgacgggcccggcgcgacgtcgacctcggtgagccagacggggatgccggcctgggcgagggtgtcgagggcggcgcgcatgtacgggatgttggggttggtggtgaagtggccctcgaggccgatggccatcccggcgccgttctccgggtaggcggcgatgatctgctgcaggcgctgcaggtacctcgccggcagcgcggccatgtcgcccggctgctccacggtgttgaactcgttcatgaacatgagcgcggagccggcgtccagcaggcgcgcggcggcgtagaaggcggtggacgcgtcccagccgaagcggccctcgtagaagttgaagtgcaggttctcgttgacgacgtcccagccgatgacctggccggcgtagcgcgacactacggagcggatgcggcgcgacgccgccgccagcagctgcgggtacggcagcgactgcacccaccggggctgctggctgggctggtcccagaacacgttgtggccgcgcacggcgatgccgttggacttggcgaacgccatcatggcgtccgggaccgtgtagtcctcttggcccggcgcaggctccgtgctgtaccacttcatctcgttctcgaaggtggccaccgcgaaccgggacgcgaaccacgtctggtacgccgagttggtgaggatgtaccggctcacggccgcgcccagcgggaagttggtccggaccgcgtccagggacaccgccgcgccctccagcggattccccgctgagtccgtcgcctggaggctctccgccttcttgcgcgccgcggacacggactcggcgcggtgagccgtccgccccgccttagagtagggcttaagcgttacgctgttcagccacagggtcaccgtagctttggtcggcaagtagtgctcggcaagacccgggcacgcggcggtggggccgcccttgagcagggaccagcacctggccctggcgccgccgccgccggggcgaacgaagtcaccgacggtcttgacgagggccagtaaatcgctgcctccgccgctgacctgcaatgatgcggagagggtgtagtgcgtgtcggcctgcaggtacaccttctggctgacgctctggtacggccgcgtccggttgagcgcgacggcgaacccgttgcccgccgccgacgtgctctcggcgatgctgccgtagccgaaggcggaccagccccgcaggcccgcgctgaagtcggcgttgcggaggacgcccccgccgtactgcggctccagcggctccggcaagcactcgatgcttgcagagtagtcgtactcgtacgggagagatgatttcaccatgcagccttgcaggagagcaatccatccgagccagaaggccagtttggctttggtcatcctgtctcggcacggcaggcactcagtctcgaccgatcgggcctagctacacgtactcccgagtccgaggttgttgtgtctgtggcgctgtgctcagggtcaggcgaagagaaagagaccagagagtgcacgagcgagggcgtcgttcgggaccacggaatggcatcagtgcgcgcacgcgtttcgcgtgcacgagagttcaggtcaacacaagtttcaccatccatacaacaacagcgcgcagtaaacattactactctgcgggtgggtgggtgg

SEQ ID NO: 2681 - DNA, 2158 bp, Zea mays
  Clone ID: ZEAMA-23APR03-CLUSTER45279_1
gggggggggggggtgtgctgttggggagggacggccgccgggcgcgcggaggtgggggccctgctccagcggggggggccctgagggggcactgatgtggagggcaggggaggggcgggcggaggggggaggcgcggtgtcagggagaggcagtaaaggggcccgagggaggagcaaggcaggagttttgcttctgctcgaggtcgacggtatcgatattttttttttttttttttacacttcaaagccatgaaaagttagtctagattaccaccacaaacattatgccatgagattggatggattgagaatgttatcctccaagctggcttaaaagataaccttgctacatattaggtgtcccaaataggtcactgaatatgaatgaaaagaataggctaatatataatggaaacactaaataaaatagatctaatacatctttctaagggggaaacaacatatttgtttggcatcagatgcatctttactcgtttgtgcatctttacccgtttggtgtgcttgattaatatcccttgatagatggccagacttcgaagaacttaggatttcttgagtagcctgatgacttgtatcctttggttgtttattgcttcgatagaaatttggcaacagcgtggctttgaagcaaaagctatgtcgtgattctttaaacccatgttcattgttgatctttctctctttttctttggttataccatatttctgatgcagtgttggaaatgttgaaccaaatagcttttctttgattttcattatatgtgatgatctttcttcatcgacttgagatgtccttggagcaatttctggtaaagcgctggaaaatttctttcttggtagcctcaaatcatgaggcttagtgtttttttctgcaggcttggttgcatttgcatgttccaactcgctaatcctagcagcgattgtggtaccaagatttcttgacgccatggaagtattgccagattcacatctcgggaaactcatagacatatgcaaggctgacagcgttgacctctttttgggggtcgaagttgttcttagcttgttactgcctgcactaggaggtgagttattctcctttgcagaatgccgcattgaccttcttttagctgaggaattctgccctttctttgctgtggggggagagctgagctttgccggctttggaagcaaggacgccatctggatcctccttctcttgacagaatctgtgatatcctgattcaaaatagagatttccttcaaagtggcatcaacagccgtcaaactatccatgcacaaatcctgcttctgcaagggcaaaactgctccaaccacttcgtcgccgccctccatgtgctgtgtctcatccgtgggcgcatccatcctgcaacagggcccaacggcatcggtgatgtccgcgagctcctccggcacgtgtactggcttgtcgctggcgctgccaccacaatccaccactctgtcctcctcccaaccgcagcacacttcctctgctggtgccggtggttcatccgtcatgcaggaagactcagtagcagacaacgaccacgacgcggcaccaccatcctctgccgcctcgagctcgccatcaccgcctgcaacatcatcactggcggcggcggcgtggtcctcgctcttgcgcttcttcctagcgtagtgcgcctcgaagaatgccttcttctgcgcgactgagcccgggcgcgcctgcaccgccgcctcctcgaggtagcggttgtgcgcgaaggcggacctcttcccccattcgagcggctccgagaggaagcggccgaaggaaaccgactccccgagagctgacatcatgtccgccttccagttccctcctctgtccttgccggagatctccggctccggcgaaagcgtcggctccggcggcggcggcggcgagaagtccaccggctcggctcccattggagaccgcggcgagattgtggtttgggtaggatctgtgggagagctgccacactcccttggggtggaaatctgcagcacgcgtatcagattggtttttcgaattcgggtgagtgagggaggccgggaaaaagcagcggtatcccggcccggccggtgaatttgtatatagatagagttatggaagagtggggtattagaaaaaagt

SEQ ID NO: 2682 - DNA, 916 bp, Zea mays
  Clone ID: ZEAMA-23APR03-CLUSTER453260_1
atctccactgctaatatatttattgagtttcatatttaggtttccctttaatagctctttgagattttggagaaaaacaaatcaatgattgatttcattgaatttacttgagataagtggacgatgcacgtatcggcacaacagttttattttagttgctagtttgtacaaagatcagttatggtggatatagtttagtgtattgagaccagagttttaaatagacggctataaccttcgctatagcccgtcatagttgttttctcaagggagagatgtgtgatatagcctcatttagcccgctatagcctgttatatcccgatatagtctgttatttgcacttttgagaagcacgccgccaaaccccttagctcgctatttaaaaccatgattgagaccaaaactcgacaaattcttttaatacactaaaattaattaaggtgatggttgcgactactccaatccaccatttttagttgtgctccaccaactccaccattgagttgctccaccatcgaagtttttagagttttcaaactgtttggcttatagggggacttggtgggtggggaatggtttattgtgggtcgaccacgcgtgcttcttgttcgacacgggtgacatgaggagacgatgctttctggaggcgacaacgttgttgattttgttgtctgctcgggattcgtgacccgacacttcttgatcatcgggaccacgatcattgcgacttatatgatattgaggcatctcgagctccatgctaagctgcatggcatccttaacaaccgaagtcaatgtatgcaaggaataaaatgagtttaaagataaaattgtgtgcataggaaagcaaaaaaaaagaaagagagatgtaatgttattttctctcaaaaaaaaaaactccaggtttacatatga

SEQ ID NO: 2683 - DNA, 1230 bp, Zea mays
  unsure (1)..(1230): unsure at all n locations
  Clone ID: ZEAMA-23APR03-CLUSTER453528_1
aggcatcacacacacactcagcagcagcagtcagctggtcagcagccagcagccagctcccacgcagagccagtctctccggcgagctccagcgccgtagccatcatcgccatggctagggaagaagagctcaagaggattgacctgaaggtgaacgtgagctgctgcgacggctgcaggaggaaggtgatgaaggcgatgagcctcaaaggcgtgctgcggacggagatccagccgtcgcacgaccgggtgaccgtcgttggcgacgtggacgtcaaggtcctcgtgaagaagctggccagggtcggcaagatcgccgagccgctgcctccggcgccggcggctttcgaacaatgcaagaagcgggacgacggcgacagggcggcgcaggcgcaggtggaggagaagcgcaagggcaagggcgacgcggttgacaaggcggcggcggcggcggcgccgagcgagcaggagggatgcaagaagtgcgccggcgaggcggcctcgcgcgccgagggcggtggcggtgtcgatggcgaccgcggcagcgggaagaaggcgccgtcgcccaaggacggcaccgccggctggacaggcgaggaaggcggcgacgccgacgagttcgacaccaagccgcccgtggcggtggccgccgatcaccgccacgcgcaggcgcaggtgcagcagcactaccaccgcgcggagccgccgacggtggtgccggtgcacgtgccggcgtactacgcgccgccggccgcggcggtgccgtactacggctactacggcatgccgccgccggtgcccgtggcgatggcgatgggggtgggggtggcccagcggcaccacccgcaggtccggccgcagccgtcccgcttcgacgaggacttcttcaacgacgacaacacggtcgggtgcagcgtcatgtgagccgtgaacggacggaccgacaccgccgccgccacgcctttcgcgcccgcccatgccatgtcgttttcccgggcagatcgcatcgacgacaatgtcatctgtcccgcccccccgcgcgcgcgtgcacagtgtgagcaatgcaacaaagaatcaaagaaagccatgatggagtcggtgctngtccngtcaangtaccacagtaccatacgttaacttaagaaccatgtgtgtttgggactataatctaacttattttaaattaacatttagttcaaaatgatttaaattataaaaaaaaaaaaaaaa

SEQ ID NO: 2684 - DNA, 1364 bp, Zea mays
  Clone ID: ZEAMA-23APR03-CLUSTER453591_1
gggcctcaggcctccttttgtgcaatccagacgtcgtggtccaaacgcggatcggcggtgccgacggccgggaacccccctcgcgattaacgcccgagcgagatcgctatccgtggaccgtggttgtcgccgtcctcgtcggttcgtccccatcgcacaccctactcccccggtcgtcagccctcagcactcatccggtcatccccaaaccccagaaacctccttggaaccaactgaagatgcccgaccagacgtcggctgcggccgcgggcggcgcggcgttcgaccgttgcctgctggcgctgtacctcatcagcccgctcactgttctggcgctccgcttcatctccgcgccgtacggcaagctatcccggccgggctggggccccgtcctaccggccccactcgcgtggttcctcatggagagccccaccctctggctcccaccgctcgtcctcctccgctggccgccgccgccgctctccggcccactcgccgcactccccgccgcgctctacgcgttccactacgtccaccgcacgctggtccacccgctccgcctcgcccgcctgcgccgcgccccggcccccgtgccgctcctcatcgccgcctgcgccttgggattcaatatcctcaacgcctacctacaggcccgctccttcgccctccacgccggccgccaggcgtcccccttccgctgcctcgctgggctggccctcttcgcgtggggaatgcggacgaacatcgcggcggacaaggagctgctgcggctcaaggaggccggaggcgggtacaagatcccgaggggcgggtggttcgacctcgtcaccagccccaattacttcggcgagacggtggagtggctgggcttcgccgtggtggcgtggacgcccgcggcctgggcgttcttcctctacacctgcgccaacctcgggccgagggccagggaccaccgccgctggtacgtgcagaagttccgcggcgagtacccggcgtcgcgcaaggcgttcatcccctacatctactaggtgatggccgtggtttcggttcgttcttcttggccgccttatcttccttcgcggcggagcagaagcaggagagcaggctgagtttgcccatgtttcgactcgacgagaaggcgagtagacgacagagaacctgcgatgcgattagctgcgcgagactgcaacctgttgaatctaatgttcttactattgctgctgtcgatgattttatagatgtacaggcagagttgaatataaagccggctgaggcataacctggttactctcgtgtttgtactatgttccgactcgaacaggattgactcaagtctaatgtattgggcatggacagaaaaaaaa

SEQ ID NO: 2685 - DNA, 1565 bp, Zea mays
  Clone ID: ZEAMA-23APR03-CLUSTER453633_1
aaacttttgcttggatgatgatttgtgtatgactgtatgtatgtccatcggcatcgacggcttgcttgcttgctccaacgccaactacaggggggacggggcgggggtgttgggtagctagctagccagatagtgatagagcgagctgctagtggaaagtagaaagagcgagcgcaccacaatggacagcatggaggacgccgtctccggcactgcagcccagggcgacctcgccgaggttgtggcccgcgcaggtgcaatggccgccgcggcgagtcaccaccaccaccggcggccaccctctcccgcagcagcagatcacggccacatcgtgtctgctgcaagggccaccgccagatcacagatcatgctcgtccctgccgcttgctacgacgaggagacacggcctgctgctgcttgcggcgacgcggtgatgttcgacgcgccgtcgtcggcgatggccgccgccgtcggtccataccaccacctgtcgtcttcgtctgcggcgctggcaccggcgcacggcgggtactggctgccgccgcaacagatctcccaggagcacgcctgcggcggcctcgacgagccgcccatggtgacgaggatctcgccagtgacgactccaccgccgccttctcatcatcatcaaatcatgaacagaaagaatgaggtgaagaaggtggtgtgcatcccggcgctaccacctccggcgagcagccgcccaggaggaggagaggtgattccgtctgatctttgggcgtggaggaaatacggccagaagcctatcaagggttcgccttacccaagaggttactacagatgcagcagctcaaagggatgtatggcaaggaagcaagtagagcgcagtcgcagcgaccccaacatgctcgtgatcacctacacggcagaacacaaccacccttggccaatgcaacgcaatgtgctcgctggctactcccggcctcacactgctactcacatgtcgtccaactgcaagaagaagaagaacagctgcagcgttgaaccgacgagttcatggccaacaacaacaacatcatcatcatcatcaaagaacggcaactacgagtgtcagcaaatgacaaacatgacgatggaagaaaatgcagcagcagggtatgttgcctacgccatcgatgacgaggagtgtgccgcgatgcatcagccgatcaattgcggtagcgtgcaaccttcagcagatgaggttttcgcagagctagaggaattggagcctacgactagtagtcctgtgaatgcaaacatctactctaggggggtgacttatgagtggcacaagttctaatctatcaagcccaaggtcgtataaggaaaggctagctacccctcatatatatacatgttctgatgaaaaataggttacaattaataatgcacagattttacttaattaaaagcaaaaaaaaaagatctttatataccttttgtgtgcttatgattaattcaaagataagatattcttaaaaattagaaaaaaaaaaaaaaaaaaaaaaggaagggaagaactcgagggggggccgcgggtaccc

SEQ ID NO: 2686 - DNA, 926 bp, Zea mays
  Clone ID: ZEAMA-23APR03-CLUSTER453655_1
gatagtcctgctccttctgcctccagcagtcctgctgcgttctgtactgcacatttttaaaggaaaccaggacaggtatctaacgcccgtcattgttgtgctcagacctggtacgttttgcagctactcgagtcattattgcttcacttcaacaagagcgcgaggaagcagagaagaggggatgatggagaagcgacacggcggcgacggcggagccggagctggaggcttcactgtgctccacctcctcggcgccggtgtcttggcgttcctgctgccgcgggccgccggagcgaccgacgatgccaagtggcacgcccatgcccattccgccgctggcagcaacggcgccgtcaccgtcggccacggtgcccccgcgccccacgtgcacgcggccggtctcccgccgctctcggcaccggcgcccacagcgggagctgacgacctgccgccaccgcccgcgcccgtgccgacgtccgtgtcctcaccgccgagccgcgagcccggcccgcacttcggcttcccgctgcagccgggcccgggcaccgcgtccgctgcggcacctgggctgggacccggcggcgaggggtatccgttcatcggaagcaacccaacggtgccgttgcccaccggcacgaccaacaccgccaccgtgctgccgctgacggacaccggggacgccgccgccgccgccaccaaggtggtggggttggcagcgtcccttggtgctcgcgtctccatgattgggcttgggatttccctcgccaccctgtccctgtccaagatctaattaatccaaaatgtgtactactgagatactgatgctgctgccgccgctttcatctaaaatgtgtactagccttgagtttttgtcatggacagatctagagatttactggcagtttcttccaaaaaaaaaaaaaaaa

SEQ ID NO: 2687 - DNA, 1766 bp, Zea mays
  Clone ID: ZEAMA-23APR03-CLUSTER453992_1
aaaaccaattccatctctctctttctctctctctccccgatccatcttgtccaactcctcgatcggccgttcatatgtttatacgttagcaaaccaattcccatcccattactccaactccggcggcggccgcaccaccgccaaaaaccaatgcagatgacggcggatcaggaatcggcgggccaaggcgacggaggacgacacgatgagcggccggcggcgggtggacgacgacgacgaccacgacgtcgtcttcgacgccgggaagccgccgccgttccgcatcggcgacgtgcgggcggcggtgccggagcactgctggcgcaagagcccctggcggtcgctgtggtacgtggcgcgggacgtggcggtggtggcggcgctgggcgcggcggcggcgggcatggacagttgggcggtgtggccgctgtactgggcggcgcaggggaccatgttctgggcgctcttcgtgctgggacacgactgtggccatggcagcttctcggacagcgcgacgctcaacagcgtcgtgggccatctccttcactccttcatcctcgtcccttaccatggatggaggatcagccacagaacacaccatcagaaccacggccacatccacagggacgagtcatggcacccgatcacggagaagctgtaccggcaactagagccacgcaccaagaagctgagattcacggtgcccttcccgctgctcgcattccccgtctacctcttgtacaggagccccggcaagtcgggctcccacttccttcccagcagcgacctgttcagccccaaggagaagagcgacgtcatggtgtcaaccacctgctggtgcatcatgctcgcctccctcctcgccatggcgtgcgcgttcggcccactccaggtgctcaagatgtacggcatcccatacctggtgttcgtgatgtggcttgacctggtgacgtacctgcaccaccatgggcaccatcagcttcctctcccctggtaccgcggccaggagtggagctacctgcgcggcggcctcaccacggtggacagggactacggctggatcaacaacgtccaccacgacatcggcacccacgtcattcatcacctcttcccgcagatcccgcactaccatctcgtcgaagctaccaaggcagccaagccggtgctggggcgatactaccgggagccgcacaagtcaggcccgctgccacttcacctcctcgtcgtgctcctcaggagcctcagagtcgaccacttcgtcagcgaccacggggatgtcgtctactaccaaaccgaccatgacttgaacactagcagtgctcatggctgggccaaccaaaaccaccataagcaaaaataatggtttctcaaacacagagacgggctgatggttgctgttgttgttgctccaaggactcacacagtacaagaacttaaatatatatgatggtaagtagcatcatatataggcatgcgtatgacaaagccaaataattaaagagaagggagggatcctctagctgaagcaattaattaattacagtatcccactagatcgagtttgctaagcattactcctactatatacaatatgtactgttgcttgtattaattagctagatgttgtgttggagccttggatgatgaaactaaaggatgagccactaaaatttgtaccaataaaaaaaaaaaaaatttatatggctactgatgatatatcccatcaacacagttttaggaaaaaaaaaaaaaaaacggacgcgtgg

SEQ ID NO: 2688 - DNA, 1669 bp, Zea mays
  Clone ID: ZEAMA-23APR03-CLUSTER454370_1
gcacgagaccattacctagaacatcctaatcgaaaaattgagccttggagccaaggctagtgctgttgcgcgaaggagccgaggcaccccgcgcccagcgcaagggcctcatctccttttgcgaggatccaaggcggccatggatcgcggcaagagcacagtagcccgaggacggaggcgaggcccacctccacctctacccgtccacgccccacacgggcgctggcgtgacacaccaccgccctcggcggcggcttgggtgcaggcaaggcgttcgacggaacgcccccctgctcccgagccggcaaggcccagcgcgggacgagaactggagctcctgtcgtgggcggacctcccggcggacatcctggggctcattgtcagtcgtctcccccgcgtcgacgaccgcgccaggctgcgctccgtctgccgggcgtggcgcgccgcggcgcgcgtctacgggcggccgccgccgccgctcccactactcgtgctctccgacttctccttctccgccttgtgcgccggcggggctatgacgggcacacgacgcatcccgctgccctcacaggagatggcggctggcgtccgctgcgtgggctcctccgacgggtggctcgtcggcgtgcagctcaacgaaggtcgctactttggtgacagccagtgtttcctgatgaacgctttctaccaggacgtcgtgcgcctcccgccgccttccgtaaacacccactcccttgatgcgttcagtaaatctctccccatcgccaatggctcaggtgcagtgcaatgcacggtcaatggcgcccggtatgtgatgtcgttctgcaaggtactcttgtcctcctcacctgaccatgatggcaactgcatcgtggctgccttctccgtgcacagaagcacagctagccttgccctctggcggcctgggatggcatcgtggtgcgtgtgccaaggtggctgcatcagtaagttcagtgacattgccttgtacaggggaaggtgtacatgtttagcaaggtcaccacgaacctctttgtctttgacatctctgaagacgagagaggcctaatggtttctcgtgttgagcgctgtgtgactgaactgcctgatgtcaaggatagctatggacagaggtggaacttagttgagtggcgtgggaaactattgctggttgtgatatacttgggacctgaaggctggtacaatatttgtaaggttggggtatttgaggtggacttgagcacaaaccctttcagattcactgagaccaacagcttggatggcgactgcattttcatcagcccctgcagcagcaattcattctgtgcatgtccgtatgacggagtcgaagatgatcttatctacttcattggtagcctcaaccactcaagaaatgcgtcccctttggataagtttgtgtacaacatgagggatggtacattggcgccatttgctttggaaataacagacgacgaccttcgggcaccagatggcagccggatgaatccaacatggctacttccttctgaatgaacagctgctatagatcaattctggtaattgcgctgctaccttgatgtgatgtgccatgctatttcatttggaagaactggattcaagtctatagatcaatttccattgtgcttatctggcaaaaaaaaaaaaaaaa

SEQ ID NO: 2689 - DNA, 894 bp, Zea mays
  Clone ID: ZEAMA-23APR03-CLUSTER454487_1
acggaccttccattccagaaacgagcgccgagaacaaaagatggaaatggaaatggagtccacttggaagaccctgttccagcggagggtgttgttggcggccaagcactgctacaacgtccacgagcgactcctcagggtgctcgtgcccttgaacgccgacttgcaggacaggcgccgctacccggggcccttcgcggaggcggcgcggcgcgagctcgagggcgcctcgatggagctcggcctcgccgtcgccagcatgggcgcggcccgccacctggcgctccggggcggcgcgccgtgcccgagcgcgccgttcgactccgtggacgacctcgccggggaccccggcgtgtggtgcgcgctggagaagctcgcgaacgccgcggcgctcgccacccgcgtacacgacgccctggagcttgcctgcggccacctgcgcgctggcgaggtcctgctggctctggacgaggccggcgacggcgacgagcagagccccagcagcgagcagcttatcggcgttatggtgctctcggaagcgatgttgaaggcggcggacctcgccacggagaccgccgaagcgcgcgaggcggcgttcggcttcatcggccgccgcgtcaagtgaggtcctccggtgtcaggaatccgcaggactcggtggttcgattcgtcacccgatcgcctgtttgagtttagtaattcttggaatggtggaagaacgaacgtgcctgtttagtaattcttggaataacgaatcgaacgtgactttttttttttgttgtgatttggtaaaatcttggaatgatgaatggtccatccaccatgtgccttgcggctaatgtgggtatttttcccaaaaaaaaaaaaaaaaaaaaaagaaaaaaaaaaaaaaaa

SEQ ID NO: 2690 - DNA, 747 bp, Zea mays
  Clone ID: ZEAMA-23APR03-CLUSTER454616_4
tcagtacctatctgaagagagacgatgcctcggttattcctcttctgcctggtgtccagccagctggccgcgaccgccgtcacggcgcggcctttcgccaccgtcctcctgcacggcggcgcgatgagcagggtagctgcggacgctccttattccgctgccgccgtcgccctacacgcgcactccctgctggaggagtccaggttcgccggatcgccgctgagctcgcaccgcggcgggcacagacctttcgaccgggcgttcgccggcggcaagatcatcgtggcggggctcgccgcggccatcgtcgtcgccgtcttctgctacatccgcatcacgaggaagaagagcgtggagccaaaagtctgatgatgactatatagaccacctgactctttctctctgcacactctctgaaagactgaaaccctttctgctctacaaactgcagagtgaggatatacggccatacgggaagaaacaagtggaacccccccccccccctagatttgctgtactatactacatttgtgatgatggatagatgattcagctccttcacagttcagacccaatgttacctctatttatccatcatcgctgagatcaattatgcccgggcgcaaaagaatgtgctttctgacgaaatacgtggatgtcagcgccccagccaccagatcttaaaacaattcggttcttgagctgaattggccttggtttttgaaaaaaaaaaaaaaaaaagcggcc

SEQ ID NO: 2691 - DNA, 951 bp, Zea mays
  Clone ID: ZEAMA-23APR03-CLUSTER454694_1
acattgcaaagcctagctactactacaacccacacagcgcggcggcggccaatctagcaaccgccctggtcagtccttccagagagtttcatcaggcatgcaacagagctgcgcggcggccaatctagcaaggctcccactcccagtcgtccctgggctggaggacctggccagcctcttcctgccgcggaacggtcctgttcttcccgcccacgattattccagctcgttcgacttcgacgtggtcgccggcctcgaccccgcgtactactactacccacacagctgcgatggcggcgctgctattgccacccccgtcagctcggtgtctgccgagaggaagaggagaaggctggcgtccaaccgatcgtccgcgcggaggtcgcgcgcccggaggcagcggcgcctgcacgagctgtcgttgcgggccgccgagctccttggcgccaaccagaggctccttgtcgacctcaaccgcgtggtcgccaggcacggtgccgtggctcgtgagaacgccaggctcagagaggaagccgctggcctgcggacaaggctcggcgaggtggaggtgggagaggccgcagcggcagcggcagcagggcagggacccctgcgtggccccagctgagatggctttggtagcctttttagtacagtagactgtatagtactgttgagtatagtacagactatagccactgtttgacacagcttattttccgttttttcacaaatttaagccaaagttctgccaaataaacagcttctgcagcagcttatcagttcagctgcttctcaaaatgaactaaaagcagtcaacaagcagaagctgctttttaccggcttatcagataagctgtttttttaaccaaaaaaaaaaaaaaaagtgatgaattggagacagaggattaatatcggtgttttaaatagcgggaaaatgaatttatcctc

SEQ ID NO: 2692 - DNA, 1183 bp, Zea mays
  Clone ID: ZEAMA-23APR03-CLUSTER455337_1
ctcgtaatctctcctgcgtccatcctctcctcgcggcgggggaagaatggccgacccgagcttcctcgtcgggatcgtagggaacgtaatctccatcctcgtcttcgcgtcgccgatagcgacgttccggcgcatcgtgaggagcaggagcacggaggacttcaggtggctgccgtacgtcaccaccctgctcagcaccagcctctggaccttctacggcctcctcaagcccggctgcctcctcgtcgtcaccgtcaacggcgccggcgccgcgctcgaggccgcctacgtcgcgctctacctcgtctacgcgccaagggagaccaaggcgaagatggccaaggtggtggtggccgtgaacgtcgccttccttgccgcggtcgtcgcggtggcgcctgctggcgctgcacggcggcgcccgcctgttcgcggtgggcctgctgtgcgccgcgctcacggtcgggatgtacgcggcaccgctcggcgcgatgcggacggtggtgaagacccggagcgtggagtacatgcccttctccctctccttcttcctcttcctcaacggcggcgtctggagcatctactccctgctcgtcaaggactacttcatcggggtccccaacgccatcggcctcgtcctgggcacggcgcagctgctgctgtacctggcgtaccggaaggcgccggcgagcaaggacgacgacgaggaggcggccgctgctgcgtcgggggacgacggcgacgacgaggaggaggaggaagggctgacgcacctgatggggcagcaggtggagatggcgcagcgcggccgcctgcgcctgcacaaggggcagagcctgcccaagccgccgccgggcgggccgctgtcgtcgccgcgccacgggttcgggagcatcatcaagtccctgtccgccacccccgtcgagctgcactccgtcctgtaccagcacgcccggttccagcccgtcaagaaggacgacgacgacgtggaggccaacgactgactgatatgatgcattaattgatgctgctattgttcgaccgacgtggtagcggtacagaggcgcccttttagtattcaggccagggtagcgttccaatggacagggtttgagtgtgttcttcacatatttgcaggttcgaaacccagatgaattaatatgtttgagtaaaaaaaaaaaaaaaa

SEQ ID NO: 2693 - DNA, 942 bp, Zea mays
  Clone ID: ZEAMA-23APR03-CLUSTER455395_1
aatcccctccctgttctgttccactctccctcttcctctctcccttccccgcctcctcttgccgtacgccacgtctcgagtcccctcgccctctcctcgcctgcgcgctgatccaccgaccgaccgctcgcgacgagtcaaaggggcgaggacccctcgacctcttcctcccagcaacccagcgagcatgacgtgtaccggcggcggcggcggcggcggcgagcactactcgcggcaggtccgcgagctctgcgcgctgctgctcgccatcgtgtccccctccccggcgccgccgcggcagccggtgtcgacgatgtcccctgccgcggccgcggccatgctcctcggcgcgtcggtggcgctcatgctctgcggctccgtcaccttcgccatcggcttcctcctcatgccctgggtcgccggcctcgcgctcctcttcggcttcgccggcgccgtcaacaccctctcctcctcggggctgttcctctgcagcggcagcggcaccaagcagccccccgccgcgggcccctgcaagcacacgcggtgacggatcgtcatcgggctcgggccgccggggccccaaccccagtggtcggatccgatgcgctcctcgcctagcttgctcccctcctccggccagccggaaccgtgcctagatttatttttcttcttcgtggatggatggatgatggaaggattattataattccctgtaaaaacgcgcccatttgctgtagtactaatatgctggttaatgggaggaatgtcacaggatatttaagtgatcgtttagaatcaaaaaaaaaaaaaaaaagtccaaatgttggcaattctattctgatccgtccaaattaagaatgagcagaatccttattggggaaaaaaaaaaaaaaaagggcggccggttgggatttagaaccggacgcgttggcggatgcgttg

SEQ ID NO: 2694 - DNA, 1193 bp, Zea mays
  Clone ID: ZEAMA-23APR03-CLUSTER455405_1
atagcgtatcacaaatagaatacaaccaatggctagtcgtccgagcacattccgatttgccgtcgtggccgtgctgtcgaccctgccacttgttgccagctctgcctccggccacgagaaccccgagcccgtggtcagggactcgccgcagaacggcaccaacaggaggtacctgtgggcgtcgtcgtcggcgcgaggctacggcggctggtcctccggcggcgcgacgtggtacgggagccctaacggcgccggcaccgacggtggcgcttgtggttatcacggtgacgtcagccagcgcccattcaagtcgatgatcgcggccggcggcccttccctcttcaagaacggcaaaggatgcggcgcatgctaccaaattaggtgcacgggcaacagagcctgctccggccggccagtgaccgtcaccgtcaccgactcgtgccccggcggtgcctgcctcgccgagtcggcgcacttcgacatgagcggcacggccttcggcgccatggccaacaaccgaggcatggccgaccgcctccgctccgccggaatcctcaagatccaatacaggagggtggcctgcaactacaacggcaggaccgtcagcttcaaggtggacgcggggtctaacccgtactacctcgccgttctcatcgagtacgtggccggcgacggcgacatctccgcggcggacatcatgcaagccggctgcgactcgtgggcgccgatgcagcagtcatggggcgccgtgtggcgcgtcaactccaacaacggccagccactccgtgcgcccttctcggtccgcgtcacctcgggctccggcaaggtcctcgtcgtcaggaacgccatccccgccgggtggaccgccgggaggacctaccggtccaccgtgaactacggctactgaggcagtgcgtgcgtgcgtatctcttcttcggtcttgggttttataagtgcgtccggaaaacgcgagaggccgatctggaagaggaggtttaggtatattcgtacgcgttcgatgtaacgacgtcttggtgcctccctccacacagaccgcagtgtgttttccttgtgatgtactaatgtttttatattagtatcggttgctctaacccgacagtaatatcaaacatcacttcatgttattcttctaaaccgataatgatatctttatttgaaaaaaaaaaaaaaaa

SEQ ID NO: 2695 - DNA, 1514 bp, Zea mays
  Clone ID: ZEAMA-23APR03-CLUSTER455486_1
gcacgagaccattacctagaacatcctaatcgaaaaaaaaaccaaagcaaagcaaacccagggcggccagcggacggaacccaaggcgaaaaggaagccagcggaagcagcgaaaagcccacgccaccttccaatcccccccaaattcccttgcattccattcccttcttcccttcccacacacctcctcctcctcctcctccgcgtctcttccccggcccccacatccgtccccccctctctctctcttcgccggccgccattgcgctcccgcattgcgccgggtcctaccagtccagcgcgggtccgtgccggcggcgggcatgatgccgcggcgcgtggcgtcggtgccggtgcccgactggctggaggcgctgctggccacgcgcttcttcctcgcctgcgccgcgcacccggcgtccccgcgcaacgagtgcaacatgttctgcctcgactgcacgggcgcgccgccgccgccgccgccggccttctgctactactgccgcgcgcaccgacactcgtcgcaccgcgtcatccagataaggcggtcctcctaccacgacgtcgtccgcgtgtcggaggtggaggacgtgctcgacatctccggcgtgcagacctacgtcatcaacagcgcccgggtgctcttcctcaacgagaggccccagccgcgcggcgccggcgcggccgcgggcaaggccgccgcgtccccctacaactgcgagatctgcggccgcgcgctgctcgaccccttccgcttctgctcgctcggatgcaagctggtggacaccaagaggagcaacggccacgcggctagttccgcggacggaggcggcggcggcggcggcgcagccagtggcaatgacgagacgacggaggccggcgggagcaagaacggcccgggggcgcggccgcacggacggcggcggaaggggaccccacaccgcgcgcccttctggtcctgacccaccaccggcaatggcgatcggtcgagttactccactagcgagcatcgaggcaatcaagagatcgataggggaataatggagggaggggacgatcgccgtctctcctccgcgccgccccgcgcttcttcggttcggttcggtttggttgtccttatatatacgtaattagaaacagaaaagcaaaggagagagaaaaagatactgcccgcccaactagagaaaggaaggaaggttatagataaacagatagaaaagcgagctgaggtcggcaccctcgcgcgcatcccccctcaaccaccggagggagggagagagggagccggcccggggccgcgcgctcgctggactgcagtaagcaacttgtctgtccccatccctctctcaccataccatggcgccatttggtacggtaggtgtgcatgatggcatgcctgatcatctcctcctcctcctcctcctagtcatcatattcatagatgatgctggtgaacttgagctagcaggaaatggatttaattctttctttttttttgaaaaaaaaaaaaaaaa

SEQ ID NO: 2696 - DNA, 3559 bp, Zea mays
  Clone ID: ZEAMA-23APR03-CLUSTER455625_1
ttttttttttttttttgaagaaaatacatcagggattaacattagaactgtaggatcgtcacatgtttaccaactaataactagttaactactctcggtaccacgggtccacggcgggccgaactcgagcccctacgccgatcttatggagcttctctaatctaaaatatatacgatgtaaccttttctaatctaaaatatatacaatgtaacgtagaagtagattacatactgcagagtttagttcaattcctcgtaaactttttttatgcctccatccctgtttgcaaaaggtgcatcacttcgatcggcttcaagctccatgtctaagattcatggacatggatgaacatgaacgtgagatgacagatgaggtagaggcgtagggctcatgtgcgcacgcacgacaaccaccagctcatggatgaagcagctgatgaacgcttcccggcaaggccgccacggccgcgtcctccaccttctcttcacccacctacgacgcggcgacaggggcgtggtagagctgcaccgcgcggccgtccccacggcactccgcgcctgcgcgcgcctcggaaacgcctcttccggccgcctaatccacgcgctcgtcctcacccggttcccgtccctcgcctccgacgccgtcgccgccaccgcgcttctcgacatgtacgccaaatgtggccttgtcgcgagtgcccagagggtgttcgacgaaatgccgagtagggatgacctcgtcgcctggaacgcgctggtcgcatgctacgcgcgccacgccctcccggagcgcgcactggtgctggctatcaaaatgcggggccagtgcctgtgccccgacctggtgacatggaacgccgtcgtctccggttttgcactggccggcgacgaccaaatggccacaaaattggtcggcgccatggaggtggacgggttccagccggacgtggtcacttggacatcgcttgtatccggctcggtgctgaacttccagtatgccagggcgcgcgtgctgttccggagaatgatgaccactgccaaccctgtcctgccgagctcggccacgattgccagcatcctgcctgcgttcgccaatgttgctgacgtgaagcgtggcaaggaagtccacgcctacgccgtggtgaccggcgtcgaacaggagctcaatgtgagcagtgctctagtagatatgtacacgaagagcgggtttgtggtcgaagcccgcaggctgtttgacaagatgtcggaaagaagcacggtgacatggaattccatgatcttcgggctggcgaattccggtcactgccaagaagccatcggtctcttcaaccggatgctgtgcgacggagcaaggccggatcacctgacgttcaccgccgctctgacggtttgcagctacgccggcatggtggagctcgggaagggcctgtaccgcgccatgcaggaagaacacggcatcgagccgaggctggagcattgtgcatgcatggtgcatttgcttggccgagccggctggctcgccgaggcttatgatttcatcaaagccatgcccctggggcctgactgcttcgtttggggggcgttgctgggggcatgccggagccatggcgacatcaagcttgccgagctggctgcgtcccacctgctaaccgtcgagccggccaatgcagcaagttgcctcctactctcggactcgctggcaagtgtaggcagacaagatgatgttatgaagatgaagaggctggcaaagagacggcgcatgaagaagctgcatggctgcagctggttagagtgagtctacataatcgagagcgatatatggtctgagatcaaaggaacagaattgattgatcacagattcatagttgcccagatttgcagaagcaaacatccaagagtttcctacaaatgcatgtgttggtctatttgatgctaccatgaaagtagaaatgttgtgctacttagatttaatggatgtaatgtttagcattcacactgtttactcaacgtcgaacaaacacatgtacaagtatataacatgattgggagccactaatactatacaagcataaacacaacgtagtatttacttatttgagactggatgccaggtccctaaatcctaattacacattacataatgttgttcgaagcaacttatataattattacaaggcagcagtacggtttgcttcatttctccattcctaacgcacggcctcaccgcccagaaagatcagtgattgggggagtttgatctaccatcttgtgctggaccacctaaaagcaaaaccattcctcccccagtttcatcccttgggtctgatctctcagcagggggtgccctcctagcagaagctcggcgcattggctcgaacaatctaccagccacatcaggaggttgctcaaaggattcctccccaggcagaacaaggagcccttcattgcggagcatggagggttcatggtagcatgtgatccaaagtgagtcaacaagctgccgctcttctcgtgcagcatccaaatcttcaggagtcatcgtccttatgctttccatacgtccacggagaagccttcgtaacctgtcatgttctgctagtagattcctatttccaagtgtcgtgtcccttgcaagctcaagcaagccccctaatgctgcctctcgaacaccggagtcatcgctggatgccaaacgcatcataagttgggggaaacctaactgtgcaaatactgaacaatctgaatggctttcgctgagcagatagtgagtcagactcaatgctttcctgatagacacacacactcacacaaaaagaccatctcttagtccactatatccgttggctaaacgaaatgcagaaactcctggtttgttgtttcgaatcagagaagatagtgcaccaagagcttttatccgagcagtaaggtcaggatctgatctgaaattggataagagaggttcaaacccactagcttccatgaccaactgctggctggtcggattgttctgaaccactgttgttaccacatcagctgccttcgctcggatacgagcattagaatttctgaggtacttgataactggaaccaacccaccaacagaatgcaaatcatttgccatgtcgatagactcaacatgcacctgcagctcactcagcaaatcttcgatgtcgtcgtgggtgatgccctgcgcctccaggacggcgggcggggtgctcatgagcagcgcaatctccctcatccggctcaccacgtccatcatcatgtgctgctccaccgcgtccgccagccaccgccgctcctcctctctgacggcgcgagagggtcccgccccgtcgacgtaggagaggctccatttgagcagccccgcccagctcagccgatcccccgccatctgtcctcctccctttatgcttcttaatccgacggcgcttccggcgaaagcaaaccaccgcgcgtccggtttctctcagcggctcccaaagctggtgatgtgtgtgttcgatcgcggcgacgcgagatacttccacttctggatattcccggccggcctcgaggg

SEQ ID NO: 2697 - DNA, 991 bp, Zea mays
  Clone ID: ZEAMA-23APR03-CLUSTER455657_1
acgtccaaaaaccaaccaaagcacacacactctgccggccaccatgccctcctctgcctccgctgacgccgagggcgcccgcagcaaacgcaaaagaggctcgtcggccgcatgcgcatccgacggcagcgaccagcagggcccgtcgtcccactggctgacgccgcgcgcgcagcaggcatactcctccaagctcctccaggcgctgcgcctcgtgcgcggcggcactggcacacccacctgccccgcctccgccccggcggtgcgcgacgcggcctaccgcgcgctggccgtggcggcgcggggccggtcgcgctggagccgcgccatcctggcacgcagccgccggcgccgggcgctcctccgcgcgcgccgacctccgcccccgacgccaaggcaccgtcagcggcggcatcagcagcagcaggacgagcggccggcgggagggctggctggcagggccaaggtgctggcgcggttggtgccagggtgccggagcctgtcgctgcccgcgctcctggccgaggtgtccgactacgtcgccgcactggagatgcaggtgcgcgccatgggccagctcacgcacgacctcgcgtcctcgtcttccgcgccgacgacggcgtcaacgatgattgctccgccatagctcggctcaggcgctcagctccttctcttggaatggatttggatggcaatggaaatgggatatgcctgtacatttcaactagctgttagagttgatcgatcgattttgcttggctttttttggattggttttggacaatatttgatttgatctgtctcttgctttgcttaaactgtaaggtctcctttggtcttgttatcatttgctaagactggcgctaaagaagtcgtgtaagctgaatgtgaagtcgtgtaagctgaatgtgaaatgatgcttcacaagtgtaaacgtgtgcgatgtttgaatgcaaaagcaagcaagtaaccaaaaaaaaaaaaaaaagat

SEQ ID NO: 2698 - DNA, 806 bp, Zea mays
  Clone ID: ZEAMA-23APR03-CLUSTER455782_1
gaaaaaaaaatcaggtgtcaatccaaacaatcgccatgggtataagcactaaaaccttgctggtatgcctggtcccatggctcgtttaccagctccagcctcatcgattctctcctgtgtcggccgcgacaacaatggccggcaagatcgagatcttcaccgtgtaccagcacgacaggctgaacgagaccgggtacgtcgtcgtcaccggcgacgaaggcgccccctcgagcgacaccaccaggcccttcggcagcatctacgtcttccgcgacgacctgaccctgcacaacgacagcgactcccccgtggccggcgtgatggaggggacctccatcacgacgagcttcgacgggctccacaacctgctggcggccaagatctcgctccgccaccgcggctacaggggctccgtgtccgtccttgggggctcccacaacaccaagccctcggtgtacccggtggtgggcggcaccggcgattttctgtacacggaggggtacgtccggtcgtcgccggtggactcggaccggccaagggtgatatacaagctggaaattcacttgtactggccaccgtacactaaatttgctccatttccatagtactagtctactaggagtgtaggacttctgcgtcgagccgccagatcatcttttgcagcttccaatttcaggtcttattgtatttttggattacaggaaagttgcaggagtacaatttgacagcggatgtgtgacactacacagcggcacattttttaagtgaaatacatttgcgattttcgaaaaaaaaaaaaaaaaaaa

SEQ ID NO: 2699 - DNA, 1441 bp, Zea mays
  Clone ID: ZEAMA-23APR03-CLUSTER455882_1
gtgtatcaacgagcaggcgtgcacatggagcccacgccagcggcgccgcgcatccacctccagtccccgcagactgccgtgccgacgcgggcggtcgagcctgggcggacgcgccgcatcaccgtggccgcgcccccgctcccaccggccgcgctgcagcggcgcactcgcgtggtgctctactaccgcgcggacgccgctggcgcggacggccgggcctcggtgcggctgtgggaggaggcgatgtgggcgaaggagtcgctgagcgaggccgtggccgaccacccggagatgggcggccggctccggcgccacgcggacgggtcgtgggaggtaaagctgaacgacgccggcgtgagattcacagaggccacggcagaggcgaccctcgacgagttcctggcggccgcccaggacaaggaccgggcgcctagctgggaggccgccctggcgccgtgggccgacgtgaacgcggaggaccccgacgtgagcgcgctcgtctacgtgcagctgacacggttccagggagacggaggcttcgccgtgggcgtaagctgcagcctgatgctgtccgacccgctgtcactggcgaggttcctggcgtcgtgggcgcgcacgcacgccaggatgaaggctcagaacgacgccgccgcccacccgctgatgcagtacgcgagctacttccggcgcccggacgccagggccgcgcgcgcgctcgtcaagtccgtccccctcgacgccttcgcctccgccgacgccgccgagaccgtcctcttcagagccagaccctccatgctgcccgccggcgcgggcgcaccaccagcggccgaccaccgcgcgctcgccgtcgcctgtgtcgcccaggcgcgggaacggctcggtgatggcaaggtggtgccgccgcagttcccgctcgtcgtcttcgactgcgaaggcggtgtgagcgtcgagacgtgcgcggcggcggcttacgggcagccgccgtcgccgagcggcggcgggcggtacaagattgacgttgccctgtgggaggagctcgggctggaggagctggtgctcagggacagcaagccactgcacgtgtcgtacagcatcctcggcgctggctgcgatgggctcgccgtcgcgatgcctgccggcgctgccggtgagctcctggtcgcggcgacggtccccaaaccaaagtgaagatacatcggcaggcaggctctggcagctagccggggcgcgaaagttcccttgccgtccgatatctatggtactggtttctacggtgtttataaattaaaattacagcaaaacaaaaaaaagttatagtatttgtgtgtgaaaatacagagaataagacaatactgtaaaacaatcacagttgtggattttcaacaatattgcccatcaaataaatgcgacgtttgtgaaccaaaaaaaaaaaaaaaaaaaa

SEQ ID NO: 2700 - DNA, 3067 bp, Zea mays
  Clone ID: ZEAMA-23APR03-CLUSTER4559_2
gcacgagaccattacctagaacatcctaatcgaaaagtcatcaatcaaatactcagacaaccatggggcaccagcaggcgcagcacggcaaggacgacaccgaggagctgcttgcagcccaccggcagctgtggtgccatgccctgggctacgtcaagtccatggcgctcaagtgcgccctggacctgcgcatccccgacaccatcgaccgctgcggcgggagcgccaccctgggcgagctgctcgccgccagcgagatcccggcgtccaaccacgactacctccggcgggtcatgcgcacgctgacagccatgcgcatcttcgcggccagccacgaccccgccaaggccgacgacgcggccgccatctcctaccagctgaccccggcgtcccggctgctcgtcagcagcagcagcagcgtcgacgacgccgccggcgcctcgaaggagaacactactaccccgagcatcctccccaacatcgcccacctggtccgccccaacaccatctccctgctgttcagcatgggcgagtggatgaaggacgagagcgcggcgtccgtgtcgctgtacgagacggtgcaccggcaggggatgtgggcgtgcgtggaggacgacgcggccaacagggccagcttctacgagagcatggacgccgacacccggctcgtgatgcaggccgtggtccgccggtgcccgcacgtgttcgacggcgtcaagtcgctcgtcgacgtcggcggcggccgcggcaccgccgccgccgccgtcgtcgccgccttcccgcacatccagaggtgcaccgtcatggacctcccccacgtcgtcgccgaggctcccgccggcaccgccggcctgtccttccacggcggcgacatgttcgagcacatcccgtcggctgacgcactcatgctcaagtggatcctgcacgactgggatgaggacaagtgcatcaagataatggagcgctgcaaggaagcgatcggtggcaaggaagcaggggggaaggtgattataatagacacggtgctcggatctcgggcagacgacgacgacgacgacaagacgtgcagggagacgtatgtgttggatctccacatactgagcttcgtgaacggggcggagcgggaggagcaggagtggaggaggatcttcctggcggctgggttccgtgactacaagatcacgcacacccgaggcatcccgtccatcatcgaggtcttcccgtgatgatgatggatcgagagtcgatcatatatgcatgtttgtacgtgtttgtgtcataataaatcgatcgatcatgttgtttaccctttttatttcggtatgtagttgcatctgcgggcgggctaaaataaatcacggcaggctgggcttcatcaagcccatgtatccaactgtgtgtaataatgcaatggaaaacgaaccaaaaagaatgcttccattccagaaaaaaaaaaaagaaaaggataaatcagctataacatcgaagaagaacgaaacaaaatgcgatacctggtgtgaattgcagaatcccgcgaaccatcgagtttttgaacgcaagttgcgcccgaagccttctggcggagggcaccgcggccggccggggtgtcatcaatcaaatactcagacaaccatggggcaccaggcgcagcacggcacggacgacaccgaggagctgcttgcagcccaccggcagctgtggtgccatgccctgggctacgtcaagtccatggcgctcaagtgcgccctggacctgcgcatccccgacaccatcgaccgctgcggcgggagcgccaccctgggcgagctgctcgccgcaagcgagatcccggcgtccaaccacgactacctccgacgggtcatgcgcacgctgacagccatgcgcatcttcgcggtcagccacgacgaccccgccaaggccgacgacgcggccgccatctcttaccagctcaccccggcgtcccggctgctcgtcagcagcagcagcagcagcgtcgacgccgccgccgccggcgccggcgcctcgaaggagaacactactaccccgagcatcctccccaacatcgcccacctggtccgccccaacaccatctccctgctgttcagcatgggcgagtggatgaaggacgagagcgcggcgtccgtgtcgctgtacgagacggtgcaccggcagggggatgtgggcgtgcgtggaggacgacgcggccaacagggccagcttctacgagagcatggacgccgacacccggctcgtgatgcaggccgtggtccgccggtgcccgcacgtgttcgacggcatcaagtcgctcgtcgacgtcggcggcggccgcggcaccgccgccgccgccgtcgtcgccgccttcccgcacatccagaggtgcaccgtcatggacctcccccacgtcgtcgccgaggctcccgccggcaccgccggcctgtccttccacggcggcgacatgttcgagcacatcccgtcggctgacgcactcatgctcaagtggatcctgcacgactgggatgaggacaagtgcatcaagataatggagcgctgcaaggaagcgatcggtggcaaggaagcaggggggaaggtgataataatagacacggtgctcggatctcgggcagacgacgacgacgacgacaagacgtgcagggagacgtatgtgttggatctccacatactgagcttcgtgaacggggcggagcgggaggagcacgagtggaggaggatcttcctggcggctgggttccgtgactacaagatcacgcacacccgaggcatcccgtccatcatcgaggtcttcccgtgatgatcatggatcgagagtcgatcatatatgcatgtttgtacgtgtttgtgtcataataaatcgatcgatcatgttgtttaccctttttatttcggtatctagttgcatctgtgggcgggctaaaataaatcacggccggccgggcttcatcaagcccatgtatccagctgtgtgtaataatgcaatggaaaacgaaccaaaaagaatgcttccattccaaaaaaaaaaaaaacggaaaaaaaaaaaaaaaaaaaaaaa

SEQ ID NO: 2701 - DNA, 1922 bp, Zea mays
  Clone ID: ZEAMA-23APR03-CLUSTER455_1
atagattttcttattcgccccttctctctccttctattttcagagagtcccctcgcctctgcctgcctgtcccatccccagtccaccaagcagcgcccgtcaccatctctccccatcccctttgccactctcggtcttctccctcctcagggcaggcaggggaagcagaagaaggaagcgagagcacggagcctgatttggtttgctttttgttgcccagactcggagggagttggtgtctctgtgtgtgtggagatggaccccaagttccccccacccccaccgctaaacaaaacggagcccaccaccgcgacgaccaccaccacctcgaccgcgcagcagcagcagcagctggatcctaaggactaccaccagcagcagccggcgcagcaccaggagcaccaccaccacctgcaaatccaaactcaccagccgccgcagcaggacgggggcggcggaggtgaaggagcagcagcagctgcaggtggtggcgcagcccggggagaggaggcagcaggcgctcgcgcccaagcggagctccaacaaggaccgacacaccaaggtcgacggcaggggccggcggatccggatgcccgcgctctgcgccgcgcggatcttcccgctcacgcgggaactcggccacaagtccgacggcgagaccgtccagtggctgctgcagcaggccgagccggccatcgtcgccgccaccggcacgggcaccataccggcgtccgcgctcgcctccgtcgcgccctcgctcccgtcgcccacctccgggctcgccaggccgcaccaccacatgtgggcgccgtccgccggcttctcctcgccctccttcctgaactctgccgccgcgggcacgggcgatgccgccggtatcatgcagcggatggggatccccgcgggcttcgagctgccgggagcctccgccgccggagccaccctcggcgccggcggccacatcggctttgcgcccatgttcgctggacacgccgccgccatgccggggctcgagctcgggctatcgcaggacggccacatcggcgtgctcgccgcgcagtcgatcagccagttctaccaccaggtgggtgctgccgccggcggcggcggccagatgcagcacgcgcacgggcaccatcatcaccatcaccagcagcaggaggacggggaggacgaccgcgaggacggcgagtccgatgacgagtctgggcagtagtagtgtaaccgttcaaccttttgcgttgctgaatcttccctcaagttggaaggagagaaaagtgtatgcgtgcagccacgggatgcttctgctactcttggactgttgttggtcgagttctgatggatttttgtgttcatttttttctcgtgtggtatccaaactcaacggaggcctctcttgctgtgaagacttgcggattcgagatcatcctcagttcttcccacaatctcatggagtggatgatcgccacagccttctctccgacttccaggtgtatactagctgagaaaatgatggattggatcgatcacccttgagtgagtgccttatttgttattgcagtgtgtagatattcaggtaattttgcagttagagaggtgttctttttattgtagtagtgatccacgttttaaaacaatcaaggtattctcctccacaggctgtctatgcaatgcaagtatagtacaattctagttcatgaccacgcataccactttcctttgtgtctgatctgtatttgttctgttgcaaagtgtgtagatattcaggtaattttgcagttagagaggtgttctttttattggagtaaacatccacgttttaaaacaatcaaggtattcgccggcaattcgaccatcctccacaggctgtctatgcatcataaacaaaatacaaaaaaaaatcgaaaaaaggcccggtaaaa

SEQ ID NO: 2702 - DNA, 1662 bp, Zea mays
  Clone ID: ZEAMA-23APR03-CLUSTER456064_1
ctggcctgggtgctgcctgcagtggtgatccgattccgaccgacgcaacgtcgctgcttccttcctcccttcccttccctttcctatccttcccttatcatcggtgctacgttaccgcacgagaccattacctagaacatcctaatcgaaaagtggatgttcggaagcaagctttgtcgacagacagatggggaaggcggggcggttgctcaagagcatcttggcggggaggaagagcggcgtcagagacaaggcgctgcggcatcagcagcagcaaggcgacgccactccgctgccggccgcgagcagcccccgggagaagaggcgctggagcttcaggcggcccgcgacggcgcccacgaagcaggaggggaaggccaataacgcggcgccgtccccgttgtcgtcgctggagccgtcggcgcgggagctcgaccagagcgagcacgccgtggcagcggcggcggctgccaccgaggtggctcgtctgacggctgctgacgagagccatctgtcagtcagctgctgccccgtcgaggaggcggccgccgtcaggatccaggccaccttcagaggctatctggctcggaaggcgctgtgcgcgctgcgcggactagtgaagctgcaggcgctggtcaggggccagctggtgaggaggcaggccaacgccacagctccgccgcatgcaggccctcgtcgacgcgcagtcccgcctgcgcgcccagcgcgcgcgcatgctggacgcggaccacgccacgccgccagcggcctaccagcgccgctcaccgcaccatcccattccgatgcgccgcagctcctacgaggcgatggaccggtcgggggaggagcacgtgaaggtcgtggagatggacgccggcgacccggcgcgacgcgggcggagcagctgctcggcggcggccaccgagtccagggagcgccgcctcgccgagtactaccaccacggcggcggcgggcagtgctcgcccgcgccgttcctcttcgcccccgacctcagcccgcagcgcggcgacagcggccacctggaggacgtgttcgcgttcgaccccgcggcgacggcgcgcagcagcccgtacgtggccccctacgacgacgccgccgacgcctacggcgtcgtcccgagctacatggccaacaccgagtcgtcccgcgccaaggtccggtcccagagcgcgccgcgccagcgcaccgacgcggcgctggagcgccagcccagcaggcgccgcgcccagcagggcgcgcccaggaagatgcagcgctcgtcgtcgcacgtcggcgtgccggcggcggccgcgtacgggtacccggcgcagccgtgggcgggcgtcaggctggaccggtccagcgcgtcgctggtgggcagcgagtgcggctcgaccagctccgtgctcaccgcggccaccgtcggctactgccgctcgctcgtcggattcgaggtccaccggggccactactgaacagcaagttgatcaccattgcaatgttgtacttgtaccgatccatctattgcctgatgatggttcttgtgaaatattagctgtgtgctgttgttgttgttgttctcgtcaatatgtaaattccaaatgtcaactgcatgtgtcgtccttaatccaaatgcataatgattcaaaaaaaaaaaaaaaa

SEQ ID NO: 2703 - DNA, 3468 bp, Zea mays
  Clone ID: ZEAMA-23APR03-CLUSTER4560_1
ttaagtggggcaacttcacggttttccctgtcgcggcgtaataaattggcaggcagtgaagtgtaatcctcctcactataaggccaattggggaaagggggaaccctcgacacaggtatataggcggcccccccaggttttgccaatttggtatcagcaaaacaacggcccatgatattgtcaggcaattacaattccgtggataaagggaccgcacccccctcaaagcagaattgtagggccctctcgcatgcgtccgcatgaatcttaatgagatgaaggaaggtagatcacaggtggaaaggatcacagctgacacttttgagaagctcaagcttgaaaactccgttttgcacaactcgtttgaggtgagtagatagtgatcaacggaacctacaacaccatcttttaccgataacgaagagttgaatcgggattttgtttctctacgaggtatttccattctcaccggctggcctcaggcagcacaaaattgtggtggggacgtcagcaatccagctgctgaggatctcatagttgcgatattgactgcattggactgtcttccgatcagcaatgagcaatcagtctcctgtggggttatgcctactgttggtcacctgctggctcacagaattgccgtgatcaaccaaaaggcaagagcactctgtcacaagtggggcggtgtaccaaaacatggtacaaatggagagcattttcatacagaggagtcaagccacactgaccagcttaagtctccagatgccggccacaagacagaaactaagagaaagtgtgtagtggacgaaggagagcctgatgaagaatcaaaacctgaggtgacaactcactcagatgcacctttgtccgacccttctctgactaatgataatgcagatgcaacagagcaaccagcagggctaacttcaccaaatccatcaaacggaaatgcaacattaggggatgtgaacaacttggtcaggtctcctacatctgcaggtcatgtgggtttagaagatgggcagtccacccccaatgaaatttcttccaatgatgctgaactgcccattaatggcatactccggtcaaactctactaatgcaaaaagtggtactggacaagatgctccagtggaatcaactccagtggccatgtctgtagaccataataaacctggaaagttgtttcctggtagtaaaatgggtctggaggatagtattatttcagttagctcaagtatcaaggagtctcagccatttgcagctggtagatcacatttggagaaggatacaactgaaactttgaaccatcttgcagttgtaacccgtgatttgcaagatttgtccgaggaaagtacaagcaaagaagatgaacctacatcatcatctagtacagatgatatggacatgagcggtgattatatattgcaaagatgcatgtcgagctttgggggctcctccaaggcagcagacacaaaatccactgcattggaaggggagaaatcaacacgaatggcagactttgatgatacagatgcactagaagttgcacgtctggtagctattgaggtggagcgggaagtcattgactacagagaacccttttgtagttctcctgatactaattccaggaatgctgacagtcctgacctggaaggaccacggcagcctgtagccattgccagtgaactgaatgataataaatcttccagtacagaggctaagtcaggaagctcctcatctcataaggaggatggatcaggcatcacagatggcagcggtccgttgagtagaaaacatacacacagtgtcgatctggggaacttagaccttaatgaaaatcagtgtgccgaggaaactgactttaatccgaagtcgatccttagtaattctgtcaatttgtcaatgcctatagctgtggctgcatcaagaggctcatctgtgtttccagctcggctccactttgaaggtggacttgggtggaaaggctctgctgcaaccagcgcctttcgaccagctccacctcggaggactcctgatgcagagaagtcactttcagcttcttcacataaaacaagcaacatattatttgatttaaatgtagctgacaacggcagtgctacttctggtgaaccactttcgacagcaatcctgccagcttcttctgaactaccttccgaggttgcttccaaagcagttgatgtgagcggaggactgaaacttgaccttaatttctcatgtggtgatgaggaagatgctatcactgcaagcaatgtgccgtcattgtggaatcaccaacaatttaatggcaactggagtcagccttctttctcatcttcaaagcaacctgcagccagaaactttgacttgaatgacaacatgtcgatcgctgatgtttctgtgcgaggaatggacgggtcttctgtcaagactccttcaaggccaagggatatgtcggaccattctgccgtcacaattatgggtaagaggatagttgtaggacagagagatgatggacagcaataccagcataactttctgggaccaagtgctgaatcaagagtttttgcaagacccactcaatcttttgcacatactcctgattatagtgttctcagttatccatctcaacctgccatgccttttaccccagcgttctttgccccagggggcagtccatacttggtcgatgcaaagggtgcaccagtcataccaccgctgtcaggtctaagcctcggcatttctcatccatctttcaacaccagagcaacacagccctcatctaatgaactgagttacttccatcctagcatggatttcagttatggagtgtcatctgaaggcgcacgtagggaagcagggagctactggcccatgtcctaccagggtcagacaatgtttgtggatgaacgcatgaggaatgtatcacaggatggtacttctgggttggtgctgaagcgaaaagagccagagtcaggttgggatttgtacccacgtcgttgagcgtgagcctgaaggtttgttgcagtcgcaatcgattttgtcccactctcttaaaaaggatatgttcaatgctccgtttatggcggcaccttggacattgtattttagggtatttctttggcacgggcccagttctactaggtctgaagacatacacggagaactgaataagagatcagctacaggtagatttgacagatgttgacatggcaaggacattgttagctgctggaaaccacctcgtgtagatctggttctttgtgaatgtattagctttgttttagttgacataatatagccaaattgctctctagggagctaaattatgtaaatcatcatcgtataactcatagatgaaatgcatccctttttatctatctttaaaagaaaaaaaaaaaaaaaaaatgtactgtgatcaactatattgtatatatgtcattgtttgaaaaaatttttaaaaggaaaa

SEQ ID NO: 2704 - DNA, 1155 bp, Zea mays
  Clone ID: ZEAMA-23APR03-CLUSTER457023_1
gtccgtctctttctaccctcggcccctccttgctttcctccaccgccgcctcgacgtcccccggcgagccgaccgccgcagccacccctgcgccagcccgctgcatctgcttctcccgttccgtcgcgtcgcctcccctcagtgcgcggacgccgcgaggagaccatggcggcgaccgcggatccgagggcgaagccgccgcccgcggcgtcgcaccacctcaagccgtgggcgccacagccgcgccctcgcgcacgccgcgtgcctcccctcccaggcccggtagtgaccgggggaggcggcgcgcgcgatcggcgccgctcctcctcctcatcctcctcctcgtcgtcgcaccgacgtctcagcgccgacgcgggcaccgtgcagatggagctgccttgcgacggtcagataaaagatccccgtgccaagctcatgggccacctccgccctctgccgcccccgcccccgcccccgccgccgcctaagccgcaaccccggccgccgggacccgagccggcagcgccgcttccgcagccgacgccgtctcagccggaggaggctgcggcggccaggccctggaacctgcgtgaccggaagtgccgccgaccaacggcacgcggggcggcagcggctgcggcagcggcactcgacgcgtcgcacgcgcgggacgccgccggggcgggggcggagaaggcgcggctgcccgtgcccctggagcgcgcgccgttcgccgtggcgctgacggcggaggaggtggaggacgacgtgtacgctctgaccggcgcccggccgcggccggcgtccccggaagcgtcctcgcgtcgtgcagcggcagctcgatgcgctgttccctgggctgtggctgaccgagatcaccgccgacgcctacaaggtgccggacgagtagcaagccgccgaagccccgccgctgtctgctccagcgtccggccggccagctagtcgttcgccgttctaccattgatgggtcgccagaaacattaagcataatcttgtcgtctgtaagtaggcttagtcgtctcgatttgatggtaggtgcttgtgcccgctcgccatgtcccatcgcttgtaacacttttcgctcccccttaaagatcttaagctttgtcgtcctcgtcaaaaaaaaaaaaaaaa

SEQ ID NO: 2705 - DNA, 859 bp, Zea mays
  unsure (1)..(859): unsure at all n locations
  Clone ID: ZEAMA-23APR03-CLUSTER457254_1
agccccaccaggaggcacgagccggccccacctctcagccccaacttcacctccgattcgaaatgtcttcctcatcatccgatctcgtcctctacaacctcgtccccgctccccaaaccctaaaccctcccccaccacacgtcaccgccgcccctgatctctccatctccaccgccgtcgcggcggcgccagaacccgtcatccgcggccgggttcgccgcccggtgggctcctccgccgaccgccacgccaaggtcgccggccgcggccgccgggtccgcatcccggccatggtggcggcgcgcgtcttccagctcacgcgtgaactcggacaccgcaccgacggagagaccatcgagtggttgctgcgccaggccgagccttccataatcgccgccaccggcaccggtgtcacgaccgaggaggcgcccccgtctctcgtccccgtcgcccccatcgcgtcctcagtgtcccttacgccggtcccgtactacaccgcgctcctcatgcaaccaccgcccaccgccaatgagtcccctgtcgcctctgcatccgtatctggcactgttgcggataacaactaggctaggtggaagaggattatcaaatggcagttaggctaaaagttagttagtggttagggtttattatgtgtgctatgtggtcatggcttattaccttgggagaggattacggtgatttagctagcaaaactgattgagaatgtaacaacagaaggaatgacatcttttaaagtgttttttgagacaaaaaaaaaaaaaaaaagaagtcttatctcttgtgatatgtctagtgcttctgatttctattaaaaaaaaaaaaaaaaanaggggcggcc

SEQ ID NO: 2706 - DNA, 1753 bp, Zea mays
  Clone ID: ZEAMA-23APR03-CLUSTER457328_1
attactctcagcctgctctctctctctctctcatggcgacgactgggtggccgtcgctaccaacggcacacccatgtattcttgggaccctgcgccggcgacgagcaccgcaagagcttgtgagggggcagggaagatgacatttcttgcttgaggatgggaaacttgcaacagctctattattaggattggatcctgagagatgaccgaggcggcgaggtttcatggtatgataggtggtggtggtggcaaggggatgcaagacaatgtgatcaatggcttcgacaacattccgtattaccaaaagtttggggagggctctcacatgtccgtagacagtgtcgatggcttcaacctgaccaattgtgctggtggttctgttgccatgtcagttgacagcagcagtgtgggctccaacgagtcccgcacggtcatactgaagcacccaggcctccgtgatgctccgactgcaagctattcagtcaacaatagtgtcttccgccccaaccgtgtagccgcacacactctaaatgaggatgcattggcccaggttttgatggacccaaatcatcctacagaggtactgagcagctatgagcagtggaccattgatctgggaaggttggacatggggggtccttttgctcaaggagcctttggaagctgtaccggggaatatataatggagaagatgttgccattaagctgctggagaagtctgagaatgatccagaaagagcccattcgatggagcagcaatttgtgcaagaggttatgatgctgtctaggctgagtcacccaaatattgtaaggttcataggggcatgcaggaaatcagtcgtgtggtgtattattactgagtatgcaaaaggtggctcagtttggcaattcctggcaagaaggcagaacaagtgcctttgcggttggctgtgaaacaggcgttggatgtagctcggggaatgacatatattcatgcattgggatttattcacagagatctgaagtcagataaccttctgatttcagcagacaagtccattaagattgctgactttggagttgctcgtatcgaagtgaaaactgaagggatgacaccagagacaggaacctaccggtggatggcaccggaaatgatctagcacaagccctatgatcataaagttgatgtctatagctttggggctttggcatcgtcttgtgggagctaggagctataaccggcatgcttcccttcaccaacatgacggccgttcaggcagcttttgctgttgtaaataagggtgcccgtccggtgatccctcaagactgcctaccttctctaagacacattatgactcgctgctgggatgcgaaccctgaagttcacccgccatttactgagattgtctgcatgcttgagagtgctgagatggagctcctgagcaacgtgcgcaaagcacgcttccgctgttgtatttctgagcccatgaccaccgactgaagtggaaggtgccaaggtggtggctagatgaccacaaaatgggtaagagaattgcgggggaaaaggataaagagcctatctcgatgtactcgcgtcaagtgtcagggtccctctgaagaccctgggatttgagcttgtgtgttgttgcattctatcttgtgtaagttgcacagctgagtaatctcttctgaaagtataggtgatgcttccttgtatgttgacaagatctaactctaatagagttttcctatgttaacaaaaaaaaaaaaaaaa

SEQ ID NO: 2707 - DNA, 1031 bp, Zea mays
  unsure (1)..(1031): unsure at all n locations
  Clone ID: ZEAMA-23APR03-CLUSTER457456_1
aatttctacgcccatcgcccgtggttcggcctaatcctcctctctttactttgttcgtgagtgccgccgacgacgacggaggaaaagctaggggagctagcgagtgagcccagacatcctcctctaagattagcttttagctagcactagctagctcgatcatctgtcggtcggtccggcgcgcgcgagaccatggcgtccatcatcgtcatcgccgtcgtgctcgtcctggacgtcctcgccttcgtgctcgccatcggcgccgagcggcgccggagctacgtacgtgagcagctcggctctgttaattcgatcgcttgattggcaacttgttgcacgtactcagaccctctctctctctctctctctctctcttgatccattcgattccatgggctggcgactcgatcgtgtcgtgcgtgctgcacgcgcaggccaacgtgaccgccgccgactcgtccgggcgtgcctactgggtgtacagctccgacgcgtccacggcgtacggcgtgagcgcgctgctgctgctgctcgccgcgcaggccgtggccatggccgccacccgctgcttctgctgcggccgcggtctctcgccgggccgctggcgggcatggtccggcacctgcttcatcatctgctgcgcagcgcagggtgacgttcgtgatcgcggagctgtgcctgctggcggggtcggtccggaacgcctaccacaccaagtacgtctcgctgttcagcaacgccccgccccggtgcgccgtgctgcggaggggagtcttcgccgccggcgccgccttcgccttgctcaccgcgctcctggccgagctgcactacctcttctacgccagggcgcgcgccgccgccgccgtgcccccgcccatcgtcggcggcatcggcatgacccgcatgtgatgtgactctgtattttgtggcagctgccccgccggcgcttggctgcgtgctttgtaccgtgtgttcatgccttccacggggcctttttggcctgaaaaaaaaaaaaaaaagggcnncccggg

SEQ ID NO: 2708 - DNA, 1138 bp, Zea mays
  Clone ID: ZEAMA-23APR03-CLUSTER457666_1
atcccccgcaccgcacgtctcagcccacctcctcctaccaccctcgccgcggccgcgccacacaaaagcgtcacgccgtctgacagcggggaaaaaaaaggaggccatggaggagaacattcctcacccgagggaggcacaagggcccaccgtcgcccaaccggccccggcggtcgtcacgccccgcgacgacgctctagctcccgtagcccagctgctgtcgtcctcgggcgacgatgagtcgtccgacgacgagggggagctcgagctggaggtcgagttcgagttcccgttcgtctgcagggactcccccgcgggcacggccgccccggccgacgagctcttcgcggacggccggatcagggccttctacccggtgttcggccgcggcacggccgggtgcgtcccccgtggcggcggcggcggcggcagcggcagctgctgcacggcgctgccggccgctccgccgcgggtgaggggccagctgggacgcctgttccaggaggagacacgggagcgcagcacctccgccagctttacggcgtcgttcgggcccgccacggacgaggacggcggcctggatggcgcggcgccggggagctactgcgtgtggcgcccgggtccgtccgcgtccgcgtcgccctccccgccgccgcccaggaagagtgggtccacggggtccatggcgcggtggcgccgcatcagcgacctcgtcgtgggccgcagccacagcgacggcagggacaagttcctcttcctcgccgccgcgcccaggagggggcccaaggacaaggagcctgccgccactgccccgcccgcggtcgccgcccaccagatggcggcgtacctcgccaggggcgtcccaccgcggcgcacgttcctgccgtaccgcgaggagctcgtgggcttcttcgccaacgtgaacggcatcagtcggagccaccaccgtccgccgttctgacgtcttgtcagtggcctatgccatcggttaattaccctgattaattattcggtaatgtgattagcacttttcttagcagtagtggataagtaggcggtttgtataggtaatgattttgggtggatcacgcgacgcgatgaatggagaggcgttttctgtcgacaaaaaaaaaaaaaa

SEQ ID NO: 2709 - DNA, 1855 bp, Zea mays
  Clone ID: ZEAMA-23APR03-CLUSTER457767_1
tttccttcgacagatcgaatcgtgcttaccgagctttataccatcgtcatctcccgccagctgccgtgccgtctgctcgtccgattgttcgtgttcctcgcgtgcgcggatcggatcggttcctctggattggcgcgcacgctcagcaagtagtagcaggtctttcgccgtcgcatgttactgcagcaggccaccggaagagcgcgccgtcatcagctagctgcctcctcctcctcgtcgtctcgaccaccggcggtggatgggcggcgtgctcggcgcgctgctgcaccggcggtccgggggcaggccgccaccggcgcgggccacgaggcgccgggcgctcacccgccagccgtcggcctatgacgccggcggcgggcaccggagggcgatgctgtccaagaagtactcgtacataccggacacctacacgtcgcttgacgaggtggcggcggcgctgcgcgagcaggggctggagtcgtcgaacctcatcctgggcatagacttcaccaagagcaacgagtggacagggaggcagtcgttcggcgggcagagcctgcacagggtcggcgacacgcccaacccctacgagcaggccatcagcatcatcggcaagacgctggctcccttcgacgaggacaacctcatcccctgcttcggcttcggagacggtgactgacgactgacgacggccttcctccgatcctgctgttgatgcatccatccatcttctcgcgtgtcgatcgcttgtccttctccttaatctatctaacctctcttcttgcattatattggttgcgtcgggactcgcgcctgcactgcgcagccaccacccatgactacaacgtgtttcagcttccacccggacaactcgccgtgccacggcttcgaggaggtcctcgcctgctaccgcaagatcgtgccgcacctcaagctttccgggccgacgtcgttcgcgcccatcgtggaggcggccgtcgacatcgtggaccggagcggggggcagtaccacgtgctcgtcgtggtcgcggacgggcaggtgaccaggagcgtcgacaccggtgacggcgacctcagcccgcaggagaagagaacggtagagtccattgtcacggcaagctcctacccgctgtccatcgttctggttggggtcggggacggcccctgggacgacatgcgcagattcgacgacaagctccccgcgcgcgacttcgacaacttccagttcgtcaacttcaccgccatcatggcccgcgccgcgacggcacagcagaaggagtcggcgttcgcgctcgccgcgctcatggaggtccccatccagtacaaggccaccatggagctcggcatcctgggacggtccacggggaacgccaagcgagtcgcccccgcgccgccgccactgccgcacgcgcagcggcaggcgtcgtcgctgaggaggggcgccagcaacgtcggcggcgccgccgcggcgccgagagatgaccaggtgtgcccgatctgcctgaccaatgccaaggatctggcgttcggctgtgggcatatgtgctgcagggagtgcggggaaagcctcaccagatgcccgatatgccggcagccgatacggtcgaagctgaggctatattcaggatgaagtggctatgctacaacagaggccacgaagaggaaaaaggatatatagcttactcgccgttaaaatgtacatgtgaatctgtcaaaacgtgtaagaaggaaccaccggtcgaggtcagtcctgttcgtctccaaatttggatgaaccgatgttccattttgtcactaaaaaaagaaaacaaactttacagtacgacggtgcgatgacgtacgtgcatcagctcct

SEQ ID NO: 2710 - DNA, 2085 bp, Zea mays
  unsure (1)..(2085): unsure at all n locations
  Clone ID: ZEAMA-23APR03-CLUSTER4577_3
tacaaataacaccgatcagtacttggttctcttctcctgtgctccacattataatactgtttgatcagtcctaattggtttcagaaaagctatctcgtactagctagtgagttagggacgacgatgggcatggcggcgctgctgcttgtgtgggctctgctgcactgcgcaggcacggcggtgacgatggtgcgggcgtcccacgccgtgtatccggagctccagtcactggaggcggagaaggttgatgagacgtcgcgcaccgggtaccatttccagcctcctaagcactggatcaacgatccaaatggaccaatgtactacaaggggctgtaccacctgttctaccagtacaaccccaagggcgcggtgtggggcaacatcgtgtgggcgcactcggtgtcgaccgacctgatcgactggacggcgctggccccggggatctacccgtcgaggcagttcgacgtgaagggctgctggtcgggctccgcgacggtgctgccgagcggcgtgccggtggtgatgtacacgggcatcgacccggacgagcaccaggtgcagaacgtggcgtaccccaagaacctgtcggacccgttcctccgcgagtgggtgaagcccgactacaaccccatcatcgnnnnngacagcggcgtgaacgccagcgccttccgcgacccgaccaccgcctggtacgggcccgaccgccactggcgcctgctggtgggcagcaaggtgggcggcaagggcctggccgtgctgtaccggagccgggacttcaggcgctgggtcaaggcgcaccacccgctccactccggcctcacggggatgtgggagtgcccggacttcttccccgtcgcggtgcacggcggcggccgccactaccgccgcggcgtcgacaccgccgagctgcacgacagggccctggccgaggaggtcaagtacgtgctcaaggtcagcctggacctcacgcgctacgagtactacacggtgggcacctacgaccacgccacggaccgctacannnnngacgccggcttccgcgacaacgactacggcctgcgctacgactacggagacttctacgcgtccaagtccttctacgatccggccaagcgccgccgcgtgctgtggggctgggccaacgagtcggacaccgttcctgatgaccgcaggaagggctgggccgggattcaggcgataccgaggaagctgtggctgtccccacgcgtccggcagctgatccagtggccggtggaggaggtcaaggctctgcgcgccaagcacgtgaacgtcagtgacaaggtcgtcaagagcgggcagtacttcgaggtcaccggcttcaagtccgtgcagtccgacgtggaggtggagttcgcgatcggcgacctaagcaaggcggagcggttcaaccccaggtggctgaccgacccgcaggcgctgtgcaagaagcggggcgcccgggagacgggcgaggtggggccgttcgggctgtgggtgctggccgctggcgacctcacggagaggacggccgtcttcttcagggtgttccgggccaacagcagcagcagcagcaggctcgtcgtcctcatgtgcaacgaccctactaactccaccttcgaggcgcaggtctacaggcccaccttcgccagcttcgtcaacgtcgacatcgccagaaccaagacgatcgcgctgaggacactgatcgaaccctccgtggtggagagcttcggcgcgggcggcaggacgtgcatcctgacgagggtgtaccccaagaaggccctgggcgacaacgcgcacctcttcgtcttcaaccacggcgaggtggacgtcaaggtcaccaggctggacgcctgggagatgaggaccccgaagatgaacgtgccggcgcagtagctagtggtggtagtggtagctcgatctagggaaatggtctagttttgttagagaagcggttctggctcgttttcgctcacgtcgcctctcagattgttctcgatctcatccatcactacattgcaacgaattctaccactctctcggcgcctcccactggtttagcaatgaataaaaattacaggtacaggg

SEQ ID NO: 2711 - DNA, 1538 bp, Zea mays
  Clone ID: ZEAMA-23APR03-CLUSTER457883_1
taaaaaacagtatccaccctaatccacatcccaaaccccatcccaattcccaggccccgccgcctgcttctggccgccgccgccgccgccgcgtgcgggtgctgccccgccgccggtcctggcgttcccccccctgccccccccctctgccccctcccctcgtccgggccctccaactgtgttcactttaccaccgcaacatccatctgaacttctgaacccaacaaattacaatatttcacagatataaactctatgcagatcaaactaagcaagatttctttccacatattaaccaaatatcagaaagtgaaacccatattaaaatgatgtaccaaaacaccgaaacatgaggccccagtgtgcgagctctgtcgacaccctcctccactttgctaatcgacagaagaacagcccagatttcatctccgtcacttggaacctggttcgtgcagtgggatctcgtcatgggactccccgccatttgccactggagctgctgtagaggtgatcacttcctcttccttctcctcatccgaatccagtgtgaactgtgacatcatcggcatcccctccatctggacctccttgtccagagcactgtacccgctcggaggtcggtttgacctggataggactgctgcgtaagcggccgcgccggcgatcacaagcagtgcgaggtgtccgttgaactgcagcgtggcgacggaccgcgcgcggtggtaatcctcgtgggtgcggcacttaatggtgtagtcagcgcggctggcggcgtggagcgcacagccctgcgcgatggcgctggtgaagaaggagaagcccatctgcagcatccacgtaccctgcagcgccaggcccgccgcgcgggcgatccgcggcgcgggctcccctggccggtgcgcggcgagcagcgtggcgccgaggcagagcgcaatggggacgaggagcaggtcgaagtaccggttctcgatcccagccgcggtggaggggcggcggtgcgcgaagagaagcagctcctgcgcgaaggcggcggcgaggaggagatcgaggaggggggagggcagcggcgccgcgagcggcgcgaagggtgcgagggaatagaggaggaagagggccgaggcggcgagcgtggggagcgagaggtggtgcgcggagacgagagcggagatgaggcagagcgcggagacggccgcggcgaggagatggcggaggtgcagcggcgtggtgaggcggcgtgggagggaccggagcggcgggacgcggaggggcagtgactcgagcgcggcgagggccaggaggcctagaccgaggcccgagtaggcgaccagacccggcatggtgcgaagggtgtgagctagccgcgcgccgggctgcttgtctgtcgtggttgctgccggcgcgggagggtgctgcggggcggcggatctgagcgccggcaggggaggtaggcgaagggggtggcccggctggcgacttgtgcaagtcgcttctgggtgggcccacccgttagttgctcttgctcgtggttgtccaaatgt

SEQ ID NO: 2712 - DNA, 1202 bp, Zea mays
  Clone ID: ZEAMA-23APR03-CLUSTER457883_2
gcacgagaccattacctagaacatccgtatccacactaatccacatcacaaaccccatcccaattcccaggccccgccgcgtgcttgtggccgccgccgccgccgccgcgagagagagatgtcgctctgctgctgctgcagcaccgccaccggccgcggcgttctcctccctagcctcctcctcggccgacgccactggacgggtcaccacctcctcaacctccgggccaccacgaccgtcgtatcctcctcctccgcggccgccacctcctccctctcgccgccgcagcagcgccagatcaccgtctacgtggacactctccttgaatggaaccagagaatgaacctcaccgccgtcaccgacgaggccgaggtcatggcgcgccacgtggccgactctctcgccatgctgcccccgctggagcgtgtgtaccgcggccgttccacctccgctggtggcgctatcgacggagtcaggcttattgacgtcggctctggcgctgggctcccgggtctgatccttgccgttgcgcggccgagctggaagtttacgctgttggagtcgatgcggaagcggtgcacgttcttggagcatgctgttgaagccatgaacttgtcaaatgtggatgtggtgtgtgaccgagctgagaaagttggccaaagtcttgatttcagagaaagttatgatatagtagctgcaagagccgttgctgaactgaaagttctagcggagtactgcatcccattggttcgcattggtggtttgtttatagctgcaaaaggacatgatccccatgaagaagtcagaaatgcagaaggtgcaataaagaaattgggtgcttcaatgcttgagttatgtaatgttgaatcaatgtgacctcatggtcaacgaacagctgttctatacgtcaaagaacgtgccactccaaaaaagtacccgcgccttccaggtactccttccaaggcgccattatgaggagcatgtagactttttctatcaattaaagaccgataattgtgattgacctagttagtaggccgtcttgctttacaaggatggcagggtatcttggaatcgaatatctgctaagggtttcaggtatatctatgtatggctcatcgtgcttcgtgccaaacaagtttgtacaggaaagcctaaaaaacttttggttcgtgctaaaaaaaaaaaaaaaaaagcggcc

SEQ ID NO: 2713 - DNA, 2015 bp, Zea mays
  Clone ID: ZEAMA-23APR03-CLUSTER457979_1
ttttttttttttttttgtcactggctcgatctctgattccatttgactttttttacaataataataatagaactgcaagaatcccaatttccaaatgtgtttcaaccaggaaaaaatagctacggtataaacaaaaaacacgggttgttcgactaataagcaaggcatgcgagcagcattgaatttttttttgtgcaaagaattgatcggaagttgcttcgcgcatttaccttaaaatgccctaatcaaggattcaaacagcgggccctgcgcagcgcgccggccggcggcgggtcgagccagagggcgcaggtcggcctgaccgtgtacctgaacgggagccagcggccgaagttgagctggacgtggaacttgccctggaggtgcatctccacgaggccgccgccggtggtgacgttcttccacacctcggcgtcctcctgcgtcatgaccacctcgctgaccaccaggtgcacgctgcggagcgccgagtcgccgggcttctcgtacagcggcggccacaccgcctgcgtcccgatcagcctcccctggaagtagaggtccagctgcatgtagcgcaggacgacgtcgaccttggtgttcgggttgtagatggccgccagcacgtagaggtctgagttgagcgccttgcccaggtgcggtggcgggagctcgtcgatgtacccggcgttgagggtggccgtgctcacgtggatccgcggcgccctggggtggtacaggaggtacaccaccaggatgccgaggccgacgcagaccaccaggagccagaacaggatgcagcagcaggtcaagcaaaccgtcagcggcttcgtcgccttctccttcctcctgatcagcgtcggcgacgctccagctggcctcttcgtccccgacccccacgacgacggctgcttcggcggctggtcgacatacggcccctcctccggctgctgaggaagagaaaaacgtggctccggcttcggttgcgttggcggcggcggcggctccgaactcccactcccacccagtcctaccggctcgtcccccagcgtgctgacgcgctcgatggtcttattggtcttcaggccaccacgccggggttgcaccggtggtgctcctcccgacgagccggggatcccaccagttgtcgaaacagctgtttcggggctggggaggctgctgctccccggtggcagcgcccctcccgcagctcctcccagcccggcacggctaccccggggccgcgttggcgttcgcgccggcggttccgccgggctgccccggcgcgggtaatctccgtacaaccgtggctgctcatcaatcgccggctctcgtctcctctgcgacacaggcgtgtaggtcggcctggggcgttgcgtgcgcgtctggggcggggcagtgtccccggcaccgtaaccgtcatcggttggcggctgctccgccgcttcaaaacggccttccatataggtcacatgacgtctgggccggtcgccgtcggcggcactggtcccggtgccggcgctctgcagtcttgcgtagcggccggtaccgaccggctgagacggcggcggcgcaccggctccgcgagcgccgctggatggctcaccgtcttctccgcccgccggcgttgtcatcatcggccgtttgctcatgctgggcaagagcagtagcaagcaaatggataagttctagcactatgcaagatgagactggtggaatgggaaggaatcaaggagtggtgttccaagtaagccagaatgcagttggcacttggcactttacagaagaagaagaggaggaagacgagggccgcagcgagaattttggagggaaaggggggcaagcaaggaatcatttgatttgtaaccagggcaagcaacttagccatgccttagttacactagtaacaccaggaattttgcgttggcttggcaagggagcttccttgccagttgccaccgccgaaaacattgctccatgcctccatctccatctgagcaaaaaaaaaaaaaaaa

SEQ ID NO: 2714 - DNA, 1005 bp, Zea mays
  Clone ID: ZEAMA-23APR03-CLUSTER457999_1
atccgatacaagttcgatgggcagcaagacgggcgccgtgtcgtcgttgctgtgctgcccttgccggtgcctcttctgcggcgtgctcagctgcctcttcagcgtgctcgcctgcattttctgcgtcgccgccctcgtcgccctcgtcctcttcctcctgttccggccccacatcatccgcgccaccgctatctccgccgacctctccgacttcaccctcaccccgcggacgtggatcctccactacaacctctccctcggcctgcaggtccgcaaccccaacaagcgcatcgccctccactaccgcggcgtcgtggcgcaggcgcacttccagggccagcagttcggccacaccgccccgccggacttcttccaggacaccagcgagacgagcaccctcgacctcgccttcgccggtgagagccccatcgtcggtggcattgccgcggccgccttccggagggaggccgccgagggggccatcttctctgtggacgtcaagatcagctcgcacatgaagctcaaggtttgggtgctcaaggtaccggggcccaagaccaagatcgattgccccctcaggctccagcgacgggatgtcgcccatggccaacgcccgccggagttccaccagacggaatgcagggtcaccttcttctgaatctgaccgctcgctccggattccaccttagagttcgttgcatgcatgcattcttgctgcatctgatattttccagcatctctacctacatgctggtggcaataatcctctcgtcatcattaattaattagatagatagatagatatgtttcgctacattgtttatgagaatagaagaacacagatttattgctagaagttacaacaacatatatatatttttcgtatcaaaaaaaaaaaaaaaactagatccaaacaagtatacaatcaaccaatctcatcgcccatgctcctctagaaccaaccacgccataggacgctaggccccacatcgcccccccggccgg

SEQ ID NO: 2715 - DNA, 1488 bp, Zea mays
  Clone ID: ZEAMA-23APR03-CLUSTER458469_1
gcttggtacgtgcccacacacgtaccaaataaacgtacactgaccgacgtcgtcgtttcacgttgcaagattgcatcttgccgatcatcgcaacgtcggctagctctgtgacaatggcgaagagcagacgggagatctcgtttggtttggccgtcgtcctgtccctaacggccgccgcactcgtgcgaaccggacacggcgccgacgccgccttcgcgagggcgagcgggacacgtttcacgatcggtgggcggccgttctactcgaacggcttcaacgcgtactggctcatgtacatggcgtcggacccggccgaccggagcaaggcgacggccgcgctggacgaggcggcccgcctcggcggccacgctcgtgcggacgtgggcgttcagcgacggcggctaccgcgcgctgcaggtgtcgcccggggtgtacgacgaggaggtgttcaggggtctagactatgtgatatccgaagcaaagaagcgcgggatccatttaatcctgagcctggtgaacaactgggacgggtacggcgggaagaagcagtacgtgcagtgggcaagaacccaggggcacagcctgaattctgatgacgacttcttcacggacagcgtgaccaaagggttctacaagaaccatgtcaaggcagtcctcacgagagtgaacaagatgacgggagtggcgtacaaggacgagcctgccatcttcgcgtgggagctcatgaacgagcctcgctgccagaggcgacctctccgggaagacgctgcaggcctggattacggagatggccggctacgtcaagtccgtggatcccaaccacatggtagagatcgggctcgagggcttctacggcgagtccacgcccgaccgcaagcgccagttcaacccgggagggtacaccgtcggcaccgacttcatctccaacaacctgatccccggcgtcgacttcgccacgatccactcctaccccgaccaatgggtgcccggcgcgagcgacggcgcgcaggtggcgttcatgcggcggtggatggcgtcgcacgccggcgacgccgcggcggtgctgcggaagccgctgctggtggcggagttcggctggtccgcgcgctccaacagctacacggtgtccatgcgggacgcctacttccgcatggtgtacgaggcgatctacgcgtcggcgagagcgggagggccgctcgcggggggcctcttctggcaggtcatggtgcccgggatggagagctggaccgacggctacgacgtcgtgctcgaccgtagcccatccacggctgccgtcgtcggccaggagtgctcccggatgaccggactcaactaggtgtcctagctagtagccagtagcggtggactgattcgtgctggttcaaatgttcaaggcagccacggagagccggagacatgaccaatggatgtgctctaataatttaaagtaataacaaaaaaaatatctttatattaaaaaaaaaaaaa

SEQ ID NO: 2716 - DNA, 1656 bp, Zea mays
  Clone ID: ZEAMA-23APR03-CLUSTER458476_1
ctgctctgctgcaactgcaagcgcggaatctgttcgatgatggcgcgggtcgccgtgctgctcctgctcgcggccgccttcgccgcggctctcgtgccggacgccgccgagtcccgcatcctcctcacgctctacgacttcggcgccgtcggcgacggcgtcgcggacgacaccaaggccttggccggcgcgtggacggccgcgtgcaccgccgcggacaacgtcatcctcaacgtgcccgccggcgggacattccggatctggcgcgctcacgctcgccggaccctgcaggagcgagatcaagctgctcatttccggggacatcctcgcgccggagagcccccaggactgggggcaaggccagagcgaccagtggctccacttccacaaggttcgggacctcacggtcaccggcgggggcatcatcgacggcagagggcagcagtggtgggcgcagtcgcttgcgcgcacgcagcccgctcccaaggctgttcacttcgaggactgccaggggatcagcgtgaagggcatcaccttgcagaacagccagtcgtaccacctgacgttcacccggagctccgacgtcgaggcgaattacctcagggtgacctcgccggagcacagcgtcgacaccaagggcattcacctcgttgactcgtacaatgttcacgtcatggataacctcatctccacaggtgatgactgcgtctccatagtgggcaactgcacggatgtccgtctaagagccatctcatgcggacctggccatggtatcagcattggaaccttaggagtaaacagctccgtcgattacgtggagaagatcaaagtcgacaccttgttcatctcaaacgccgagaacggcgtgcgcgtgaggacgaccgaggacggcggcggcggcggcggcttcgctcgcaaggtgaagttcgagagcatcgtcatgaggaacgtcaccaaccccatcatcgtcgaccaggggatctcctccgacgatccgccaccttcatcgcctgaagcagtagcactggccgcgaccgcgacggcggcagtgcaggtggagaagatcaactacatcgacatcacgggcacgtcggcgtcggagcgcgcggtcacgttctcgtgcagcgacgcccggccgtgcaggcgcctgtcgctcgtcaacgtgaacctgacccaggtggacgggagcgaggcgtcgtcctactgccgccaggcgttcgggaggagcgtcggcaccgttgtcccggagtcctgcctctccaaggaggacttcgtccaccacgtcccgccgcagcgttctgaggaagacggagaagactcagaatcgtgaatctgtggcggttcctgcttggctctggccagattagttttgtcaagggatctctgatactggttgcttcggatttttgttggaactataggtgttgttggggcttttcccctaggcctagtcctctagctagtgcagtgcagatctgtctgtgtgaactgaagaaccatgttgctgcccaactttggtttccagtattcctaaacatttccagcctttctgtgactaatgacactaaacaacatttctatgtaaaaaaaaggacggccggtcgagccgctctcaaaggataccgtaggtgaggcaacgcgtgcaagaggtgtcat

SEQ ID NO: 2717 - DNA, 1489 bp, Zea mays
  Clone ID: ZEAMA-23APR03-CLUSTER458493_1
tctctcgtgcagttcttgaaggatgagggggccgttttgtcgccggaggatgaaaataagagggagaaggtgatccgagagctcaagaagatagtgatgcattgggccaacgcggtggcttatgagcagagtgtgccccaggggctggccacagctaccgtcctgacatacggttcttacacattaggggctcatggacctgaatctgacattgatttactttgtcttggaccttgtattgcaacactgcagtaccatttctttgttgttttgagacaaattcttcagggcagaccagaagtatcagaagtacacactgttgagaaggctaaggttcccttgatgcgatttagattcactggaattgcagttgatttgacatatgcccaactccctgttattgatgcattaaaggctataaatacgtttagccctcaactactacagaaaatagacacacggagctggaggagtttatctggagttcgtgtcaatgaacaaattgttcagctagtacctaatgcggagaagtttcaaactctgttgcgatgcatcaaactatgggctaggaaaagaggacttcattgccattatcttggcttctttgctgggattcatttagcaatccttgcggcatatgtctgtcggaaatttccagatgccagtgtcagtggtttgttcgcagtgttctttcagacgtttgctcactggccttggcaagttccagatccattgaggcatgatttccagtggagctggctttttgaacccttcccatatgatcagaaatatcagcagtttctccgcattgctttacgtgcgccaactattgctgaactaggagactgggctggatgggtgaaatctcgattccgtttcctgattctgaagctggaaagggctgggattgagtgtgatccatgcccctcggaggaagttgatcatacagacaatgaccccaacgtggtcttctactggggccttatccctaaaagaatcattcaggtcgacactagctccctgaaaggagatttcatggaagacctcaccaatgatgtgtacggcacggtgaagtgcacgcattcagatgtgacaatatctgtggttgggctgccacagctgcctaagagcatgtgcagccgggtctatccaccggcagtacatgcagcactgtatgatgggctacgagggcacagatgaaggccagatcgagcgcagggattcaaggtactggaccgggtattcttttgagctgggaggagtgcttgtgtgcgcaagaatatgggaggactactgaccggtagaagagcaaagaaaatgtgtatagcagaggcatgtaaaaacttaggccctgtcggcataggcagtgtacacttcttttgtgttctaagtgctgctggatcctgattcattcaaattttgcaatgaacaagatggcaagatgtgtatatagttggttctattggctgggtgaaaaaaaaaaaaaaaa

SEQ ID NO: 2718 - DNA, 1579 bp, Zea mays
  unsure (1)..(1579): unsure at all n locations
  Clone ID: ZEAMA-23APR03-CLUSTER458557_1
caccacagctcttaaacgagcggcagccaccaccagacacttctcccaagtccgaagagccaatcagaggcccaccgaaatggagctgaagaagtctcccgcgtcgtcgtcgtcgccgccgcctccgacgggcttntcggtcagacagcgcggccgccagcccgtacgtcacggcgccgtccagcccgcgcggacgcctggtcccctccgagggagcggcggcggccctattcctgacggcgccgccgtcgcctagtccgttcggcctcctgccgccggccaccccgacgcgcctcaccggcgccgacccgttcgacctcttccagcacttcaccagtgcgccagccagcccccggcgcgccgcggccatatacgcgcacgtcgccgaggggagcggcagcgacgaccaggagtttcagccgcgccgccggctgtacgccgccacaggcggatcgtccgtgccgttcgactgggaggagaggcctgggacgcccaagagggggctcggcgggggcgtgcccgccgcggnacgtggcggcatgggacacggaattcgagttcggcacgcgagtcggcaacgccgcgccggcggtgacgcttacggcggccgacgagctctttgagaagggcaagatcaggcctttgaagccgaggcccaagaagacggccgacgacgagcccaagattcgtccgttgaagccgccgccggggctgctcgacggcgggagcgtcacgccgtccccgcggtcgccggtcgtggccagaggcgcaggcgccatgtggtcgccgcggcggaggagcagggtcggctccggcgtcgatttcgacccgttcaccgctgcgctcctagaggcaaccaaggcgccatcgccgctcggcggcaaggacgacgagggcggtgttgctgttgccccccatggctcgccgcccacgagaccggccacgcgtcccgcgtcgaggagcgccgggtggagacggtggcggctcagcgatctcctcctgttccggagctcgtccgacggcggccgcgtcaacagctcgacgtgcccgtcaagagggcgagcgcagcagccggcggcggtgacgatcaaagccagcgccgcaaagcgcgaggacatgggcaagggctggaagcacggcgacggggacgcggccgcggcggcggcggcagacagcgtcgccgggtgcgcccggttgagcccgctgcagcggctggccaaagggctcggcctactcgtggcatagtcaccgcggcatggcggcgccggcgaccaaagggtgaagaatcatagcgttattttgccgtatttctttgcccggttattgttcatatatactacaagacgtgtcttctttttgcacagtgtgaaaacatgttcgagtgcaatttgcaaccaatagtgctcttggtgttggtttctcacgttgtggaccttgactacattatcgtcgtgtactatttgcacaagtagcaaacgtggatgtgaggttgtgtgcgtgcatcgaactcagtatattgaaactctgtattattttcgacacgagttattataacttatagcgaaaaaaaaaaaaaaaa

SEQ ID NO: 2719 - DNA, 1589 bp, Zea mays
  Clone ID: ZEAMA-23APR03-CLUSTER4585_2
gcacgagaccattacctagaacatcctaatcgaaaaaccactagtccacgacggccgccagccatttcgccgcggcttccacttcgtgttcgttcccccaattgcgtctcctccttccaactccacgcgcttcaatcccacaaccgcgtcgccgtcccgatcccctcccctcccctccctttctcttccatataaaaaaccctcaccaggtgcatcaattgaaacccaatccagccccatccgtcgattggaacccagatccgcaggccgcagcacaagagggtgggatcggatcggatcggagcagagtgggaccgaccagaatccgccggcgaccaccatgggctccgcgagccgtgccgtctcgtgcctgtgctgcccctgcaagtgcctggcgtgcgggctcctgagctgcctgtgcagcatcctcgtctcgctcgccgtcgtcctcggcgtcgtcgccctcatcctctacttcatcttcaagccgcacatgatcgccgccaccgtggactcggcctcgctctcccagttcgcgctgtcggcgtcctccacgctctcctacgacctcaacgtcaccatgacggtgcgcaaccccaacacgcgggtggggctctactacgacgacgtccaggcgctggccctgttcagcgaccagcgcttcggctacgccccgctcgacgccttctaccagggcacccaggcgtccacccagctcagccccgggttccgcggcacgcagctcctccagggcgacgtcaccgccgccgagttcaggcaggagcagtccgcgggcaacttcgccgtcgacgtcgacctcaacgccaagctcagggtgaaggtctgggcgttcaaggtccgcgggcccaaggctaaggtcacctgcaagctctccgtccccgcacccggcgccgccaacgcctcgcccttccagcccaccgtttgcaaagtctggttctgattttccatgttgtgggatttagatttacctggtaggcattctactagtagtagtagataatgttaccagctgatgctgatgtcgattattgttttctttcgttcattcgttggtcgtcagtcccgctctggattttgctttatgtatatatatactgctctccttcattcgtaccagcactctgctctgctgtatacacttttgtttgctctcagtttttattactactgtagacaaatttagggcctgtttggcatggctccagagcaaaactccaaggaggagctggtcagagcatgccaaaccccctaactccagagttgtaaactctatggagtttttggagctccagtacattttttggagtactcttttgctgctccgaaaactccaaaaaaaccaacttagtcatggagtttggagttatttacccccccctgcccccggttatgagaaccaatttaaactctggagcagagctgccccccccagagtttaggagtagagctgctctggggtggagcagacccatgccaaacacgcccttactagttgtcccggctaatctcgtgttttttggacttgagatgattgctttgctgaaatattaatcgaattgttcggttgc

SEQ ID NO: 2720 - DNA, 1608 bp, Zea mays
  Clone ID: ZEAMA-23APR03-CLUSTER458886_1
gccgcctcacacagcaggctagtagccagtaccccaagaaaacccctagtcactcagatcccaatgcaggaggtagcgttccactcgcttcgcggtggccatggtctcgtctccttcccctcccttgcccaccggtgtaagtgtgcctccctccctccttcctcctctcccccccccccggctaccgcggttctgcagtggatgagtatacaactcgtcgactccacaatggtgcggcgtcaggcctccgagccgaaggcgcaggtcgcggcccccaacccgcccccgcacaacggcgccaacaagtaggcgcacctccggggcccgctccacgacggtcccgacggtgccggcaacaagacagcgaccccccgggcgcaaggccgccgccggcacggcggcgtccgtcgcgggtcgccccgcctcggactcccgcttcaagccgccccccctcccgccggcgccgcccggcgctgttatccgctcgctgttcgtctccctcacccgccgctccaccccgcgctcgtcgccgtcggccacgccggcctcggcaggcgccgacgcgggggacggcgagcagtggcgcctcgccgcggccgacctctcccgcaggctcgccgcggccacgcgcacgcgggacgaggcgctggaggagaccacgcgcctgaagcactccctcgccgagctggagcacaagctcgcgcgcctcgaggcgcgcgtgctcccgacccccgcggccgccttccccgtcgactccttcctccgcgccgtctcgaccgcccgcgccgccgtgcggaacctcgcgcgcgcgctgtctgcccacctccgcagcccctccagccccggcccgagcctcgagagcttcctcaaccgcgcgttccacgccgacttcgagctggacaccgacgccgatgctcacaccacggaccccgcgggccggtgccaggccaacctcgcggcgtaccacgccgtcgcggtgctcacgtgggaggaggtcctcctccacggcaccaagcactacagcgaggggctcagccgcttctgcgacgccaagatgagcgaggtggtgtcctcgctcggctgggcgcgcgcgcggccgtggcctgagccgctgctgcaggccttcttcctcgccgccaagggcgtgtggggcgtccgcctcctggcgcgctccgtccacccgccgctccccgttgtgcgcgccgagcgaggcgcgcgcttcgacccgcggttcatggaggacgccgcggccagccgggcggggacgctggaaccggccagcgtgaagatgatgatggcgccagggttccacgtctacctggccggcgcgggcgtggtgaaatgcagggtcgtctgcttctacaccagcagtaacgcccgcacagacggccacagagatggcgggagcagcgccaacggcagcgtggggttggggagtagctgtagtgacattaatgggagtgctacagatgtggttgatagctgtagagcagtgaagtagggtaaaatgttgcccttgcacaggtagaaagaacacggggattttacttgttcgctaaaaaaacatgatgatctgcgtttaggcgaaaaaaaaaaaaaaaaaatatt

SEQ ID NO: 2721 - DNA, 1063 bp, Zea mays
  Clone ID: ZEAMA-23APR03-CLUSTER459023_1
gacgcccgcagccacgcagcactggccagttctaacgctcgatcgcattcgcacgtacgctatagctagctagcctttttggccgcgcgcgcgcacacgggtttttgtcggggacacaggcaggcaggtaccccggcgggcggcaagctcgatggcgcaggggcggatgagctgcgtgttcctggcgtgcctggtggcggtggcgtcggtgtcggcgtccaccgcgtccgcgttcgtgttcaaggccggcggcacgggcgagtggcgcgtgcccgccgcggccggtagcggcaacggcagcgcgtacaacgcgtgggcgcagcgcaaccgcttccgcgtgggcgacgccatcgctttcacgtatcagcccggcaacgactcggtgctcctggtcgacaagaggtcctacgacgcctgcgacacgggctcgccgaccgacaccttcgccgacggcagcaccgtgttcaccttcacccgctccggccccttctacttcatcagcggcaacaaggacaactgcgaccgcggcgagaagctgatcgtcgtcgtcatggccgagcgcgcggccgtcggcaacgccaccgagccgggcgcggggctggcgccgtcccccagcggcccgttctcgtccttctctccgccgccacccttcggcatcgacatctcgccgacggcggcgtatccgccgccaaacgccgcgccgcccaaggtggcagcaggagttgccggcgccgccacgtttgccatcggagccttgttctacgcgcttgtttgagatacgtctgttttgtttattcgaaatgttctcgtgcatgcgcgcaaagtggagggagatgatcacgcggctgtgctttactagcttgctcaaattatatacatgtatatccgactgagtcgagtgaatgtgtttttaatgtataataatgtatcaaatatggtttatgtaatattgtatgcattgtttcgttaattcagtgcggaactgcggatgaaaaaagtgattttagtcccaaaaaaaaaaaaataaaaaaaaaaaaaaaatagaagaaaaaaaaaaaaaaaa

SEQ ID NO: 2722 - DNA, 1326 bp, Zea mays
  Clone ID: ZEAMA-23APR03-CLUSTER459516_1
gtgctggatgatacatgcatcagggggcggccggccaaccagtagtcgtcgatcgatcacattatgtcccacatcgcggtggagcgcaaccggcggcgtcagatgaacgagcatctcaaggtgctccggtccctgacgcccggtctctacatcaagcgcggcgaccaagcatccatcatcggcggcgccatcgagttcatcaaggagctgcagcaggtgctggagtcgctggaggccaggaagaaacggcgcagcagcggcggcggccacagcttccttacgggtagccccagccccacgcccagcccgcgctcccacctcctctcctccgtttccaccccgtcgccgcctgtcatgatcaaggagctcgccgcctgctgcaactccgccgtggccgacgtcgaggccaagatctccggctccaacgtcctgctgcgcacgctctcccgccgcagcagcatccccggaggacaggccgtcaggctcatcgccgtgctggagggcctccacctggaggtgctccacctcaacatcagcaccatggaagacaccgtcctccactccttggtgctcaagatcggcctcgagtgccagctcagtgtcgaggatcttgcctacgaagtgcagcagatcttcggtcaggacacggccgagcagaagccgcaggccgaggagaatcatcatcatctcatatactcgtcagccatggccgccgccatataattaacataataacaaatgcatggctagctccatccatttgcttacttatatgaagtatgtatctgtgtccttccttctcttgctatatatcttcaagcgcatgcatgcatggtataacacatagtgatgtagagctatctagctttaccttttttacgtcgtcgtcgtgattatgctgatactaatctgggaggtataaacttaaaccataccttcttgtccgacgttgagggcgcagttgctatatatggccgtggcgtccagcatgggaacaccaccctcctccatatgatccacctccctgtcttcctcctccgttgtctcgtgggggctccacggtccttggtgccttggtggccaaggggattaggagcggtggaagccacagctacggtgattccagtcattgataggggcggtgaggtgatcaggaccttaggaaggccgcctgctttatatacagccggaatcagcttcttccgagtgtttgaagcactcggcaaagccattaaatcactcggcgaagactcgccaaagaaagatcggcgaactatatatcaataacaaacactagtacaaaaaggctcgaaaaaaaaaaaaaaa

SEQ ID NO: 2723 - DNA, 1358 bp, Zea mays
  Clone ID: ZEAMA-23APR03-CLUSTER459649_1
gcacgagaccattacctagaacatcctaatcgcaaagacatttctttcgatcgccaatggaggagatcattcctcacccccatctccacgcgttagcgtcgacgacgcttgcaatcgtcgccgtcatggtgatggtgctgccatcgacgacagccggcggccggctctgccgtgagagctgcggcgacatcccggtgcgctacccgctgggcatcgacgacgggtgcggcagcccgtactaccgcaacatgctgacctgcgcggacaacgcgacgctccgcctgcgcacgccgtcgggcacgtacccggtgggcggcgcggactactcggacccgcacctggtggtgacggacccgtccatgtggacgtgcgcgcggcccttcacctcggtgcacgcggcgcccttcagcctggacacgagcacgcgcttctcgctgtccccgaggaacgagtacctcttcttcgactgcgacgaggcgcgcgtgatcgtggcgccccggccggccagctgcgaccggtacccgggccgctgcgactcggcgtgcgacagcgcggggtacctgtgccggaacctgccgggctgcgcgctggaggagggcagtaaccagagctgctgcgcgtaccggccgcgcgccgccgagtcgctgcgcgccatgctgcggcactgcggggcgtacaccagcgtgtactggcgcgccgccggggacaggtcgttcccgccctacgaccaggtgccggcgtacggggtgcgcgtggacttcgaggtccccgtcaccacgcggtgcctgcagtgccaggacaagcgccgtggcgacggcgggacgtgcggcttcgacccggccaccagggacttcgtctgcatctgcggcgacgggcgcaactccaccacggactgcgcagatggccacagctcaggacatcatggatcagcaggaatcgtcgctgcaagcgctgtcgcctcggtctctgcagccataggcatttgggggctcgtgtggtacatacgcaagatcaaaccgagcaaagtggtgacatgtggggttcagagtaacgagaacaggttcttctgacctcaattttcagtaaaaacaaaaacaaaaacaaaaactcccacgaaggagaggcggtgaaagaaggcatccttgtcataaaccaaacaggggagggaaaatttttcttctgctagattttgctggtgctgctagccaaactatgttatatgcacccaatgctgcgctgtgatgatactctgttatgtatttcttttgaaagaacgtgttttgccttctgttagaatgaggagtaaattacacgagtgttcttcgaactgttttgacgttccaaaaaaaaaaaaaaaa

SEQ ID NO: 2724 - DNA, 1679 bp, Zea mays
  Clone ID: ZEAMA-23APR03-CLUSTER459654_1
catcactccgcaggtttttgtattctacagttcgtagcacgcagaagatgagagaccacagacaagcagtagttgtttgttcaatcgtctgccggggttgcgggttgtcaaatctcacttgttttctcctaccaagcagagccaagcctactcttccaatccctgtcagggtggttagtctttgagctggtgggatcatggttgccaagacgaggacgaggcgacagctcgccaagctcgcgctgcttctactcgccctgctgctcctgctcgccgccatcctgctgtgcgtcttcttgatcccgcgccaccacaggaggccgctgccccccgcctcgccgccgggggcggggaacgcctcgaatcccgacgacagcatcgtggcgttcgacttctccccgtacctcatcatgtacaagagcggccgcgtgcaccggctggacggcaccgcccggtgctcggccggcgtggacgaggccacgggggtgacctccaaggacgtcgtgatcgacagcgggaccaggctcgcggcacggatgtacctgccgccggcgccccgcgggacgcaaagcaagggcctcggcaggcggcacccggtgctggtgttctaccacggcggcgcgttcgtcatcgagtcggcgttcacgccgctgtaccacgcctacctgaacggcgtggcggcgaaggcgcgcgtggtggcggtgtccgtggagtaccgcctggcgccggagcaccggctgccgacggcgtacgacgactcgtggcaggcgctcaactgggtggccaggaacgccggatccgggccggagccgtggctgcgggaccggggcaacctgtcccggctgttcgtcgccggggacagcgccggcgccaacatcgcgcacgacatggccatgcgcgcgggcacggggggcgggctggacggcggcgcggccatcgcgggcctcctgctcctggacccctacttctgggggaagaagccggtggccggggagacgacggacccggccaggcggcgccagtacgaggcgacgtggtcgttcatctgcggcgggcggtacggcatcgacgacccgctggtggacccgctgtcgatgccggcgtccgagtggcggaagctggcgtgctcgcgcgtggcggtgacgtcgtcgggcctcgacgacttccggccgcgcgggctggcgtacgtggcggcgctccgcgacagcgggtgggacggggagacggagcagtacgagacgcccggcgagcggcacgtctacttcttggataggcccaaggaccccaattccgtcaaggagctggccttcgtcaccggattcctgagccgggagtaggtaggtagccatcacggcgagggcgtacagtttaggtgcaatcgtgaggattgcttgctgatcgaggcacgtgaatacgtgattgattaatagagactattatttctagcaccgtagcatgttgtttttgtttttttgtgtttggatcttgatagggttctcgagaggtggtgaggatttggttgatgacgagctcggtgaatgaatctggctggggatgtagttgaccacacatctgacatcgtgaggaaagctgcctgcagcagtgcagcctgaaactgtggctgagaataaaagcactacacaaatataggacttgttttcaaaaaaaaacccaccaac

SEQ ID NO: 2725 - DNA, 1731 bp, Zea mays
  unsure (1)..(1731): unsure at all n locations
  Clone ID: ZEAMA-23APR03-CLUSTER459656_1
gggtctcgagctccctccccccgcgtgtcgccctcgacggcgtcgccgcgccgtgcccagccccatggatcccgccgctgcggaccggccgtgtgtcatccagtcgctcccggcgaactgcaacaccctaccgccgcccctggtccaggcactcccggcgaactgcaacaccctaccgccgcccctggtccaggcgctcccggccaagaccaaccccagccagccttcctcccccaccgccaaacgccgccacgcgcctcctgcgccgggctcgggcccggcgcccccgagcccgcgccgcacccgctcgggtggcgcgccggagtggacgcccgccgagacgcttgcgctcgtcgccgaggtggcggccgtggacgacggctggtcccgctccgtatccgcgttccagaagtgggccatggtcgccgaaaacctcgccgcctccgaggccctcttgtcggggcccgggagccgccggagagggcgcgggagcaagaggactgccggggagtgccggcgccgctgggaggcgctggcggccgagtacggggccgtgcgccgctgggaggtgcgcaccggggcgacgtactgggagatgggcgcggcggcgcggaggaaggctggccttcctgccgagttcgacgacgaggtgtatggggctatggacgcgctcatacgggtcgaggaggcgctgcttgcggatgctgctggcggtggtgcgggtggggaggatgtagagggcttggttggcggcggcgccggctgcgttggcgtcgaggtgggtaagcaggatggcggcgactccgttgaggctgaggttggcgaagagcaggtgcagcaggatgcatctgctggagaggaggaggaacaagacgtcgatgaggatgtggaagaaatgcaggaggatgggggcaatgctggtgcttcaaatgaccttgggcatgagacggggacgagtgtggaacccgagagaagctaagacatcgcatcggagctggcgaacaagttacacgataacgcgcagcacatacatgccatactgaaggaagaggctgcccaggatggtggccagaaccatgatctcggtagttcgatgctgcctgacgcaatggaggccgcccgccgaaaagcagatgagctgatccaatcgctcggtgggctcgtcagctacctgaaccaattcaccgagctggtcaaggaaactgggtttgagaacatcgcgacctgattgatgcgtgagacgcagggcttcctttggagggttagatcttagcgctgtagtttcgtttctgtgtgtccgtcatctttgtaaatatgacggcgctgtatgacgaccaccacccaacccgactggtgtagggtttgtagcagacactgtctaggtgtctcgacaccgctgctgttctgagggcttctggccccctgattagtgagatgagatgctcacttctgctcgtttcagttctgtccctgaaagaaaattccctgatgctgagagattagttaatttggtagcagtagcagttgttntcagatgcatcacatattcacatgtgagacataatatgggagggtgacgcaggtgtagcatcgtccncagtgaggatttgtgaaggaggtaggtgtcctgggatatggcatttgtttttgttgggacctgctctatttcagatgtntgaaatatagtatgtttatagataccgatntttatcgttaaaaaaaaaaaaaaaa

SEQ ID NO: 2726 - DNA, 1588 bp, Zea mays
  Clone ID: ZEAMA-23APR03-CLUSTER459684_1
ctctccctcgttgtccatggccctcgagtcatggctcaccaaggtccgctcggccatgtcctctgcctctggaggttcgggggcgccatcgaggccccggaagcagagcaccgtcggcatcctcgccttcgaggtcgccagcctcatgtccaagcttctccagctgtggcgagccgtgggtgacgctgccgtcgcacgcctccgccacgagaccatgaacctccacggcgtccgcaagatggtctccgacgacgacgacttccttgtcggcctcgcccgcgccgagctcgtggacacgctcagggccgcatccgactccgtggccgcgctcgccgcgcggtgcgcggaccccagcctccgcgacttcagggacgccttcctggagctggccgacaccggccgcgaccggcaccgctggacggcgcccagctggaaggagatggacgcgagggcgagcaggatggggaagcaggtggccaccaccgccgcgctccggagggccatggaggagctggccgaggccgagcacggcctccggaagcttgtcgtcctccagtgcgccgccagcagcctttcggcgagcaagatctcggcggcgtcggagcagcagcaggtggtcttctccaagaggcaggaggtgaagcacctgaagcagacgtccctctggggctccaccttcgacgctgccgtcgcgtcgctggcacgggcggcgttcaccaccctcgcgcgcatcaaggccgtcttcggcgccggccgggagcagcgccacccgccgctgtaccgcagcctgacactctcctcggcggtgcacccgtcaggcgacgcgcggtccccgccatcgcgcaagtccatgtcaatggaggaggtgctgctgttcgacgtggacgaccagccgtcgttcgctccgaaacggcaggtgcggggcggcgggttcctggaggacagctcggcggcactgacgcccccggcggggacgctgggcgcggcggcgctggcgccgcgctacgccgggctggtgatctcgatcgagcggatggcgcggtcgccgctgctggtgggccccgaggagcgggacgagctgtacgggatgctgacggcgagcgtgcgcgcgcagctccgggcgcggctgcgcggcgcggtgcccgcggcggacccggggctcgcagggcagtggtgcgcggcgctcgctgggatcctggagtggctggcgccgatggcgcacgcgacggtgcggtggcaggcggagcgcagcctggagcagcggggcgggagcggcaacggcagcgtgctgctgctgcagacactgcagttcgcggagcgcgacaaggtggacgcggcggtggtggagctcctggtggggctcaactacgtgtggcggttcgagaaggagatgagctgccgcgctatgctcgcctcgcccgcccgcccgcccgtccgatgacgatgcatccatggattatggatggtggtggtgatacgaatgatgcaagcacatctgcatctgcatctgtttgttgctcattctggatggatctgttgacgacgaataaatctctactacttattggtacacatggttagttgactc

SEQ ID NO: 2727 - DNA, 2218 bp, Zea mays
  Clone ID: ZEAMA-23APR03-CLUSTER459814_1
ccccgcgtccgtttttttttttttttttttttttttttttttttttttttggagaacagtgtcgcgtctatccaaaaaaaaaggaaaaatggcacagttctctttgaaaaacaaaggaagaaatggcacagtcgtctcttgcgcccaatggcgtccagtctgctaatcaccatctaattaacgaacagaagcacaggtacgggcatcatatgcatgagccacgggcccacccccatgttcttctcgcttcctcccttaattgcgcacgagaccattacctagaacatcctaatcgaaaatgcctcgcctcagtcctcctctccggccgcttgctgttgctgctcccacccatctcctcaaccacctgagctcctcgccctctctgccctctctggtcttcaattcgttcgagctgaactcgagggcaacaattcgctccgatccattccatccaccccgtcgatccatccagcggtcctcctccccgtcccagtcccagaaatgggcaagaacggcctggtctccatcttctcccggctcgtggactccgccgcccccacctccacgtccgccgccgccgccgccacgccgtggcagtggtcggcctgcggtaccaaccctcagacgacctccttccgcgcaggcgcaggcggcggcgacgacgagccctgctgcacggcgacgccgcccacggcagcagcagcagcagcagcagccagtcgatccgtccaccggaagccggctgcgatgggccgcggcgcgccgcccggcgaaatgtacaagacggtcaactcggtcttcctggacgaccccgccgcggacgacttcttcttctccctcgccggcgacggcgacgacgaggaggaggtggcggggctctacctcgacgacgacgacgacgacgacgggttctcgaccaccacggcgtccgaggagtggtcggaggaggccgtgatccgcagcctgggccgcacgtccaccgaccgcttcttcttcgacccgcagcctggcccgctgccggcgtccaactccatcctcgccaccacggccgcggccgccgccgagacgccggcgaggaagaagacggtcccggtcccagtcccagggccgacagaggaggaagacgcaacggcaacgcacgcggacgagggcgacggcgtcaagaagcagcggcaaccgacgacgacgacgacggcagcggcggcgtcgtcgtcgtctctggcggagcgcagcgtggcggtggcggtggactcgggcgacccgtacggcgacttccgggcgtccatggaggagatggtgtcggcgcacgggctccgcgactgggcgcagctggaggagctcctggcgtggtacctccggatcaacgggaagcagcaccaccacctgatcgtgggcgccttcgtggacctgctcctcggcctgtccacgtcctcgccctcctcctcctcctcctcctcctcctcctccgcgccctgcagcaccgccgccgagaccagcaccaccaccaccaccaccacgagcagcaccagcaccggctgcagctgcagctgcggcgtgcgcctgctgcacggccgccgccgctacgaccatcagtgggcagcgtcgccggcgacgccgtcacagcctccgccgccaccgccgccggccgacgttcaggtggacgtggtggaggatgaggatgaggaggaggcatgcaaagcgctggtcctgtagacctgtgctgctggcagcgacgacggtgatcggtcgtgcccgcagtccgcgccaccaccagtagcgctggtcctgtagacctgtgctgctggcagcgacgacggtgatcggtcgtgcccgcagtccgcgccaccaccagtagtgctccacccactgcgcgcggcctgagtggatgacctgctaatctccatacctttacctcctggctcctgcttgctgctgatggttagtgttctaacgacatgatgattaaattaactggacgctgtcactaacactctctcgccatgtagtactggtgcgcgtagcaatagtagactagtagtaggagcagttggttggtgcggatcgaatcgaaggatccaatgcaatgtaaagtaactgtacctgtacgtgtagtgtaggtagagggtttcgagagagagaaaaatcaacggtttttatttccagtacgggtataaatgtataaagaccttcatttctactcccaaaaaaaaaaaaaaaa

SEQ ID NO: 2728 - DNA, 958 bp, Zea mays
  Clone ID: ZEAMA-23APR03-CLUSTER459937_1
acaagcacaaagagaggccccgaccgcgatggatcgtcagcgacagaccgaccgtgacacagccaacaactaacacgcacgcgcgcgagagagaaagagagctgcccgggagagagagagagaggaaatcaaacgaaggcgacgacgtacggagacggcatggccgatcaccaccaccaccaccaccacgggcatccgccggacgggcccggcggcgcgggggaccagctggaggtaatcaaggagcaggaccggctgctgcccatcgccaacgtcggccgcatcatgaagcagatcctgccgcccaacgccaagatctccaaggaggccaaggagacgatgcaggagtgcgtgtccgagttcatcagcttcgtcacgggcgaggcctccgacaagtgccacaaggagaagcgcaagaccgtcaacggcgacgacgtctgctgcgccttcggcgcgctcggcttcgacgactacgtcgaccccatgcgcaggtacctgcacaagtaccgcgagctcgagggcgaccgcgccgcgtcctcccgcggcggaggcggaggcggaccggccggcgccggagaccccgcgtccgcctcggccgccgccggtcccagccccagcgccgcatcagccggtcatttcatgttcggcgccgccatggaccggcccgacaacaactcatccgccggcgccaggcccttttaatccatccttcctcatcttgcttgttattattcatcagattcagatcaacaacaaaagctacctgcgacgagctagcttaattagcttattgatttctactactgctactcattcttttgggacaggtgagtccccggtctcgtatcgcatatacaatccaaattcttgcaagctatatctatctctttattagcgctagctagtcacaacagtccgcatatatgtatcggggaaaaaagaatcgggggttgggatg

SEQ ID NO: 2729 - DNA, 723 bp, Zea mays
  Clone ID: ZEAMA-23APR03-CLUSTER459941_1
accctgccctctccgaagcctgggccgctggaccaaggacgacgacgatgcgtccatgcgcgcacctcgccgcgctcctcctcctcctcgccgagaccgtctcctcgcgccatgcgcatgccccggcgggcgctgcgcaagacgtagccccctcagcgcacctgccgctgccgtgcctggaggagctgctgccgtgcacggcgtacctcaagaccaccaagcacccctctcccacgtgctgcacagccatgcacaacgccgcggcggccgagatgccgtgcatgtgccgcctcttcgccgacccggagctgctcgccaccttcaacgtcaccagggagcagatgttcaagctcccggcccgctgcggcctgcccgtcggctgccgcaccggggcctcccacgagcctgtcgtggaagcgccgccgccgcccgccccggcgcagcagcaccatcatggtgcctcgtcgaggggtgtccagttcagcagcatctggagcctggtggcgtcgttcgttttgggccagatgatccccatggctgcaccattttaatttagtctgttctgcatcgttctgttttatcgcctcagttagctataatggacagcgacagaatacatttcagatgtagtagtgataggcactgcatgacagcatgagtgctgcttgttaatactaataatacagtattaactgaacaaaaaaaaaaaaaaaaggggcggcc

SEQ ID NO: 2730 - DNA, 1664 bp, Zea mays
  Clone ID: ZEAMA-23APR03-CLUSTER460065_1
gtgcatcgtccactaccagtctaccactctacccacaagagttcatggcgttcggggcagcctcaccacttcaccagcggtagggcacgactcggcgccggcggcgaacggcggcggatcgagggagggagcggggcctgcagaggaaggggtgttgggaatgcgggtagtggagggggcaccggaagctgacgaggaggaagagaagtggctagggcaatactcttctacgcagagcatactgctcgtcggcgacggggatttttcgttctcactggcgctggccacagggtttggctccggggccaacctcgtcgccacgtcgctcgacacctacgaggcactgggcaacaaattctgcagagcgaagtctaatataacagccctgaaaagtttgggagctactgttttgcatggcattgacgtgaagacaatgaagttgcagattgacctgaaaaacagacggtttgatcggattatctataactttcctcattctggcttcaaaggaaaagaacatgaggtgcacatgatcaactcgcacaagaagctggtgagggaatttttctgtaatgcacgccgcctacttcggccttatggtgaaatccatgttagtcacaagagaggaaagtggtacgaaaagtggggtcttaagcatctagcagctgagttttctcttgtgttggtcgagaaagttagtttccaaaaggcagactatcccggttatcaccagaagaaaggagctggtccaaattgtgacaaacctttcccgctaggtacctgttccacattcaagttcagaattggaagctcgaagaaacagaatgggagaagggctggaccaatctcatccattggaggcgacacaaggccatgtcgtcctctttcacttgttcagccatggtccgggctacagtttgttccacgagattacatagttcctgtgcccatgactgcgccatctcatgtagttgatcaaaggcagccaggccgcattccttcaccaatgggcagaatctcgagcaactgtttgttcgctcgtctggggcaaactctgtatgaaaacagaatcattgctgaatcgctaggaaacactgactacttcgcatgcgaataccaaaggagtctgctgagggagtacaggatgcagagtcaactagtccctgaggcaaccagcttgagctattctgccttcttggaagctcgccaatgggagtctgttcagagacaggagcggctccgcaggaggatcgcatacggtcgttcccagtgaaggatcgtctccctgaggccgaacttggtcttcccagatacgaccacaatgtgttttgtgtatatacaggtacggcccttttgtgtggcaaacactgccacagcagcgaaaggaacgctgatccaagttgctgcgtggagatgtattcctagacagctaacctgcttttgctgtatggagctgccttgaggagacaggagtacattagctgtagcatgtagtaacctcaccttttgggaacagtactttgtgtggggttactgtcaaataccgtaaactggaggtgccagtatactagctactccattgttgaggaacgagtaccaggtactactagcaattgctgagaaaagtggttacagttaacaatggctgaaaaaaaaaaaaaaaa

SEQ ID NO: 2731 - DNA, 1810 bp, Zea mays
  Clone ID: ZEAMA-23APR03-CLUSTER4601_3
attcttccactccacctcgcccgtggcccgtacccgtcgtcgtcgtccacacagccacaagctgctgctgctgctgcgcgtgcttcctcttcagttcagctgaggtagcggcgcctcacccatcccccccgctacatacacatatctccttcttcgaagaactcggtcctttgggagcgagcaggagcaggagcaggacaggaccaggaagatcattatcaggagaagctaggcggggatatggcgaacgctggcggcggggcggccggggaaggggagtggctcaaggtcgcccagctcagggccctcgtccaggaggaccaccgcgccaaggaggtggacaacctgacgctgcgtcggttcctgcgcgcgcgcggccacaacgtggacaaggcggccgccatgctgctcaagttcctcaggtggcgggcggaggcggcgcccggcggcggcaccgtgcgggaggagcaggtgcgcggggagctggagcaggacaagatctacatgggcggcgtcgacaggaccggccgccccatcatcgtcggcttgctcgccaagcactactccgccaaccgcgacatggcggagttcaagagttttgtggtctacttcttcgacaagatctgtgccaggatccccagagggcaggagaagttcctcgccatcatggatctcaagggctggggctacgcaaactgcgacgtccgggcctacatcgcggccattgagatcatgcagaactactacccggagcggctgggcaaggcgctgatgatcaacgtgccctacatcttcctcaaggtgtggaagacgatgatctaccccttcatcgacgccaacaccagggacaagttcgtgttcgtggatgacaagagcctgcgggagacgctgcggcgggagatcgacgagagccagctcccggagttccttggcgggaagatgcctctcgtctccctcaaggactacgcccagcagcctcagcccgtttgcgagtgagtctgtcgtagcgatggtggccggccggtgacgtgagcgacccaaagccgaaagctgattcgatctagactaagctaatacagcctacaagagggaggaagagaggccctacccgtggaattaagtcattagtttgtggtccaattcaataagaaagtaaatgtggtgtgtgaagatggtatggcattatcagtctttaatcccatattatacatttagatagaagaaaatcaacttatatgtggtagtgttccctactttttatatgagataaataaagggatacggagaatgctgcacgcaaaaaaaaaaaaaaaaaaaaaaaaaaaaaaaaaaaaaaaaaaaaaaaaaaaaaaaaaaaaaaaaaaaaaaaagaaaactgccttgttaccactgctatcaaaaaggggccccccttaaaggagccacccaaatttacggtccccgggccctcattttaaaagagcctcgtctaaaaaaaacccctggggggaaaaaaaaaaaccgtgaccaaaaaaaaaccccttgtggcaaacacgcccgtatccccccagaagagcccccctcatagccctccccccaataaccactagccccaacaaggaaagaccccccccccaatggggctccccaaaaagcgggaaatgtaacgcctacagggacggcgaaatggacacgggcaacagggccattgcccaatgcattaaccctcaaccctaacccttcctcccccccactcttgactccccccacctgttttaactcgcgctttttaatttgggcccccggtctgtttttcagggacgcctttatt

SEQ ID NO: 2732 - DNA, 929 bp, Zea mays
  Clone ID: ZEAMA-23APR03-CLUSTER460258_1
ttttttttttttttttcaatcaatcatgtgatgcgttgcatagatgcagagcagaggcagccgggatcgaatggaggagcctcagcctcggaattcgtccttttcccttccaaccaccgcgcgatctgccgcaaatcctctccatgctttcccagcggaaaaggagagagacactagacacattatcctgctgctatactataccgccaccgcaacagcccacccgccgccgccgccggtgcaagttcgtatttggaacttgcatgcccgcgtcgtcgtcgtcgtcgtcgcccaacatcctgagctgctccgccctggaggaggatccgtggtcgcctacagcaacgatgatgaccgccggcgacgacgacgacgacttgttggtgcagctggtgccgagggacgtctcggacgggctcctcggcaagttcgcggacaccagcgccttcgacttcgactacggccgcagcgggctctggtcgcccctgctgctgcgccccgaggccatgctgcttgcgcagtccccggccgccggccggcgcccacgacggcggcggcgccggaagcggaggaaggtgctctgctgctgctggcgatggtggtgacgcgaccgcgacgtgcagtgcagtgttccctacggacgaaacatctgctctgctctgctctgctcttaataataatgctgctgaatcttggatttcttcattcttcagtacatgcaaaagagtcattctctgtatggaccatgagaagctgagtatttatgtatgcgtgcagtgcagcgacgtatataaggaccagattgcaagacgacatgattgttttttggtattgctttttggagccatccccaacatggatgaatcctgtaattaccttgttttgttggaaagtacgtactactttttgatccaaaaaaaaaaaaaaaa

SEQ ID NO: 2733 - DNA, 1650 bp, Zea mays
  Clone ID: ZEAMA-23APR03-CLUSTER460307_1
gcacgagaccattacctagaacatcctaatcgaaaaatgcctcgtttctcttgcgaccaccgcgcccttccgtctttcgggcctccagatgtggtgtgccggtggtggtgtcgtcgatcttgtcttcttcctgccgccattggaggagtgcaaccccatgggggttggcatcctttcgccactattcgacttcaaggtttttcatcatgcagcccggctgtagtcccccgccggcggccacccatgaggatgaccaccagctttgtggtggggagaagcaagtcgggctgcggcttccctcctgccctcagcttcaaggatgttcatcatcctcgctggggcgggaggcgcgtcgagccagggttctgcctcccacgtgggccagtggcccacttctttctccagcattcgagggaggagaggggttcaccagccacgcgaaggaggcgaacttcggctacgcggggccggccaggtgcaggcgctgacagctgccgcgtgcctggcacttggcctgggtggccctgccgtcgcctccgacgttgccttctgccgtttggccagggcatggctatccgtccaccacacgggcgacggtcacgccgtacgtgggtccgccacatccacggcttctcccgcgccgtcggccgtacggggggaccgtccaagatgtcgtacgctgcgggagtggcggcgacgttcttggatggtcttgtcctcgctccgtgggaggacgggagcgaggacctcttgtgcggaggtggccgtggtcgtcggtgctgaggtggtggctgccgctggtgaggctgccccttgcagaggtggttgcctccgctgccgggaccatcaaggccacctgccgctgagtccctgactctttggctttaatggcctcactgctccccctccgtaggaggatgggggcgaggccctattcgtagcagcgcttgccatgaggcgatcgctgctgctgtctagctgcccggggcggaggtcgttgtcgctgctaatgcagaggtggtcgccgccgctgttgaggcagcccggagcagcttctagcgcgactcttgttggtgcagcgtagtccattcctgcagagatggagctgggtcccatttgtaagggaatgtaataacatctgcttaaaagtgaaatgtaataacgtatgtatgcaggattttagcctgggaagccaagttgtgcatccgaaccccctggatggcggcttcaagtactaagacacctgccgcggggcggtggagtatgcaggctcacggcacgggaccaggctgagcggctacatggcctccagaccccccaggagacaagtgcctgttcttcaaagccggacctccagttcgttggacgcacatgacttatagttttaaatactaggacacccgtttgggagtggtggagtgtgcagggttttgggtgcggaaccaggctaaccgaccacacaggctccggaccaccctatggaacgggcatccgttccttagaaccggcccttaggccttcccctattttttgtaatagatattatctattaagcagtaaaaaaaaaaaaaaaacctggttacttaatgagcgtatttcttgtcgataaaattgttttctccttaaaatagtttttttatttatattttt

SEQ ID NO: 2734 - DNA, 1840 bp, Zea mays
  Clone ID: ZEAMA-23APR03-CLUSTER460367_1
cgccaagcccgcaattaaccctcactaaagggaacaaaagctggagctccaccgcggtggcggccgctctagaactagtggatcccccgggctgcaggaattcgcacgagaccattacctagaacatcctaatcgaaaaattattaccatgggagaagagaagcaacgtcgggatggccatggcggaaagaacaagtacgccgtggcgtgctccattattggctccatcatctccattctcatgggctatgacacgggcgtcatgaccggcgcgatgctgttcatcaaggaggacctcaagaccaacgacacgcaggtccaggtcctcgccggcatcctcaacgtctgcgcccttgtcggctccctcacggccggccgcgtctccgactgggtcggccgccgccgcaccatctccctcgcggcctgcatcttcctcgcggggtcagtcctcatgggcctctcgcccaacttcggtacgctcctggcaggacgctgcgtggccggcgtcggcgtcggatacgcgctcatgatcgcgcccgtctacgcggccgagatttcgtccgcccacatccgcggctccgtcacctcgctgcccgagatctgcatcagcttcggcatcctgattgggtacgtggccaactacctgctagctaagctcccgctggtctacggctggcgcgccatgctggggctcggcgcgctgccgagcgccgtgctcgcagtcgccgtgctcgcgatgccggagtcgccccggtggctcgtcatgcagggccgcgtcgagcaggcccacgccgtgctcaggcgcgtgtccgacactgcaggcgaggccgatgtgcgcctcgcggaaatcaagaccgcggcggggctggcagacgacgatgacggctcaccgagaggtgtcggcaagggcgtgtggaaggagatgttcctgcacccgacgccccccgtccggcgtatcctcgtcgctgccttcggagtccacttcttccagcatctcacgggaatcgaagccgtggtcctctacagcccacgcatctttaaggcagccggcatcgccacccgcagcgagatccttgcagcgaccatcggcgtgggcgtcaccaagacggtgttcatcatgacagccatcctgctggtggaccgcatcggccggaggccgctctacctctcgagcctggcgggcatcatcgcctcgcttgcctgcctcggtcttggcctcaccgtcgtggagcgctcggtgccgcgccactcgccgacgtgggctatggcattgtccatcgcaacggtcttcaccttcatagcgtccttctccatcggtgtggggcccatcacgtgggcgtacagcaccgaggtgtacccgctccggctgcgcgcgcagggcgccagcgtcggcgtggccatcaaccgtgtcatgaacgccggggtctctatgacgttcgtgtcgctgtacaatgcggtgaccatcggcggtgcctttttcctgttcgcagggctggccgtgttggcggccatgttcttctacttcctctgcccggagacgcaaggacggccactggaggagatcgaagaggtgttcggccgtgggtggcgcgcgcgcctcctgtcatgggacgaagctgttgtggagcttccaatgtccaacaccaccgacggcaacaccaaggcgcgcccgtgatgcaaatgcgattgcaaaaattatggatagacattcatatatggtcacgtaaaaaaaaaaaaaaggttatattgtagaaaacagtttttttaaggcaagagtcaagttttaaatagaggataccataaataatagaataaacccctgctatacccagtttacccc

SEQ ID NO: 2735 - DNA, 1620 bp, Zea mays
  unsure (1)..(1620): unsure at all n locations
  Clone ID: ZEAMA-23APR03-CLUSTER460399_1
gtcacagtcactgtcactgcccgtccttttgttcactacggctgccagctgcggcggccaggttgcagcgctgagctgcntgcgaggagacgacgactgggaagagcatgaagagctgggcgccgatcaacctcaacgtcggcctcgtcgtcggcgtcctcttcgtgctgcttacttatctcgtcctctcgcagcaagctgcaagcagtggcctcagcgttgccgccacggtcgcgcaatggatcatggacaaacatctcacgacgactaacggtccggctgaaaccttcatcgcttcagatgtgcagcggaccgcggaagaacaactggttcaaggttcaggtgagaagggcaaggtggtgtacaacacgaagggatcctactccgaaacctgcgaagtcgatggcgacgtccgcatcaacagcacagccctgtcggtgaccctggtgccggcgagctcttcggagcgccgcgagtggaggatctggccatactctcgcaagaacatgcccgacatcaagatggtcaccgtgacgcagctggaggacaagtcctcggccccgccgtgcacggtgacgtacaatataccagcggtcctgttcgcgctcggcgggctgacgggcaacttctggcacgacttcggcgacgtgctggtgcctctgttcatcgcgtcgcggcggtacgacggcgaggtccagttcctgatcagcaacatgaagccgtggtggccggcagcgtacaagaccatcctgcagcggctgtccaagtacgacgccgtggacctggacggcgacggcgacggcgacgcgcacgtcgtgcggtgcttcccgcacgtcaccgtggggatccacatgcacaacggcctgagcatcgtcccggagtgggcgccgggaccgccgggcggccgcggcctcaccatggccgacttcaccaggttcatgcgcgaggtctacgcgctcccgcgcgacgcgccggccagcctggtccgggaggagccgggcaagcagagcccgccgccgcggctgctgctgatccaccgagagcacagccgccggttcatgaacgagcgggagatactgcaggcggcggaggcggcggggttcgaggctgtggcgctggacctgcggcgcgacgtgaccgtggacgcgcaggcgcgggtggtgaactcgttcgacgtgctgctgggcgtgcacggcgcggggctgaccaactcggtgttcctgccgccgggcgcggtgctcgtccaggtggtgccgtacgggaagatggatgtcatcgcgacgctggagttcggcctgccggcgaaggagatggggctcaagtacctcgactacgtggtgagcgcagaggagagcacgctgctggagatgctggggccggagcacccggcgatcaaggacccggactccatccaccgcagcgggtgggacaagatgaccgagttctacctcaatatgcaggacgtgcgcatcgacgtcgcccgcttcgcgcccgtcctcacccaagcgttcgaccacctacgccagcaataataacgcatcgatcggtcggaggactaacagccatgcattatattggcacaaccatttcaatggcatatatatgtggtcgaccacactt

SEQ ID NO: 2736 - DNA, 699 bp, Zea mays
  Clone ID: ZEAMA-23APR03-CLUSTER4603_15
aaagyttcggcagcggtgtaggcagcggcggcgtgctcgtgtaatcccatcccgaagtctccggtcacctgtcactctacgcaaccatgtcgaggaggaagaccagggagcctaaggaggagaatgtgacccttggccccactgtccgtgaaggagagtatgtctttggtgttgctcacatctttgcatccttcaatgacactttcattgagggaaacactggttcggatcactggtactatcgtgcgatgaaggtcaaggctgatcgtgatgagtcgttaccttatgctgctatgcttgctgctcaagatgctgcacagcgttgcaaggagcttggtattactgcactgaacattaagcttcgtgccattggaggcaacaagatcaagacccctggacctggtgctcagtctgctctcagggctcttgctcgttctgggataaaaattggacgcattgaggatgttaccccggttcccactgacagcactcgcagaaagggtggtaggaggggaagtaggctgtaggcgtgtatccctgctatttgccatcgctttgcgctggcctctgggtagcgttgctgtttattagcttgccaaaagaagttttaattttgctcattttgctctatgtcgaggatcatttactgttagcagaatctatgatgtgcattgataatgttttggttgagcaattgac

SEQ ID NO: 2737 - DNA, 2322 bp, Zea mays
  Clone ID: ZEAMA-23APR03-CLUSTER4603_36
aaaagtttcggcagcggtgtaggcagcggcggcgtgctcgtgtaatcccatcccgaagtctccggtcacctgtcactctacgcaaccatgtcgaggaggaagaccagggagcctaaggaggagaatgtgacccttggccccactgtccgtgaaggagagtatgtctttggtgttgctcacatctttgcatccttcaatgacactttcattgtaagtagtgtatgctccaactatggatagacctttttattcctttccctagttaactgtatgatgttgtaatatgcaacatatcactgatttgtctaggagggaaacactggttcggatcactggtactatcgtaaacccttggtccatgcttgacctatatggcagttgcatttggttttaactgtgatgtgctaaatataaatcatgtaggtgcgatgaaggtcaaggctgatcgtgatgagtcgttaccttatgctgctatgcttgctgctcaagatgctgcacagcgttgcaaggagcttggtattactgcactgaacattaagcttcgtgccattggaggcaacaagatcaagacccctggacctggtgctcagtctgctctcagggctcttgctcgttctgggatgaaaattggacgcattgagaacgttacccctgttcccactgacagcatccgcagaaagggtggtaggaaggggaaggaggctgtaggcgtatttgacatctcttggaggtggccatcaagcagctagtcctctctggatagtgttgctgtttctatgcttgtcaagaggagctttgattttgctatatgttgatgaccatttaccgtggttgaggaattgagttgtcatatttatcttctagatatgcattttcacttataaacgtgggttcccgttagcttaattgcgctgttttgcttatatcttgctgaccccagaacattcgttctgagtgttaaattttagcatcgggtgatgatcgtgtggtaattgcgtcgtcgaggattactttctagtttctgaagatgtggccgtttgcctgtattgagcatctcaataaagattgcggcaagggagaagcgatatacaaccaaaagcaatcgtgcatgtatttgtttattatattccacaaatatttgaacaaatgcgaatgctagtacaattgtacaaatgattcctcttcactggcaaaagaaaagagcacgacacgtgggtctcatgcggcaagcatggcgaaaccgatgaaggcgccgagcgagccgacgaagcccgcgacaactggggcagccgtggaaggctgtggcggcgttgtggagctgccgccctcagcggccggcgcgctggcggaagcggctggcggtggggagcctcctcctgctggtgttgtcggagtcggcgccggtggcgaggtaggagttgtcgtgggaacgggcgccggtggcgagctaggggttgtcgtgggggcaggcgccggagctaaagctggggacgtcggcgaggtgggggtggctgcgggagcagcggacgagggtggcgacgaggacgggctcgtcgcaggtgcgggtgcagcagcaggaggcgagggcgggctcggcagcggcgcggatgatggcgtcggggtgcggctgccggagcggtcggcgaggacgacgacgatgagcttctcgttggcacggcagctggcctcgttgccgctgacgaagaagaaggcccccgagcggtcgaacgtgaacaccgtgctgccgtcgtcgaacctggagacgtaggacgaggtgttgcaggcgttgtaggcggcggcgtccaccaggagcacggagtccgtctccttggggtacacgaacagcagctggtcgccgatctggaaccggagtcgccccgcccaggtgttgtagggctcggagccggcgcccggcacgctccacccactctgcccgcccacgacaacccctagctcgccaccggcgcccgttcccacgacaactcctagctcgccaccggcgccgactccgacaacaccagcaggaggaggctccccaccgccaaccgcttccgccagcgcgccggccgctgagggcggcagctccacaacgccgccacagccttccacggctgcccccgttgtcgcgggcttcgtcggctcgctcggcgccttcatcggtttcccccgccccccccatgagacccacgtgtagtgctcttttcttttgccagtgaagagggatcatttgtacaattgtactagcattcgcatttgttcaaatatttgtggaatataataaacaaatacatgcacgattgcttttggttgtccacacaaaaa

SEQ ID NO: 2738 - DNA, 1794 bp, Zea mays
  unsure (1)..(1794): unsure at all n locations
  Clone ID: ZEAMA-23APR03-CLUSTER460408_1
gcacgagaccattacntagaacatcctaatcgaaaaaagcccaagaccaagtgaaacatcaacacttccacgttccacccatggctaattctcatcaccggtgcaccagcgtcgcctccgagctggaaggcacgctgctcatctccggcagcctcttcccatacttcttcctcgtcgccctcgaggccggcggccctctcagggccctgctcttgctcgccgtgtaccctcttcgcgctgctcggcgccgccttctcgtgggacgacctacccctgctcgccatgaccttcctgtccaccgccggcctcgacgtcggcgacgtgaccgcggcggcgcgggccacgctgcccaggttcttcctggccgacctgcggggcagcgcgttccgggccttgtcgcgccacgccggcggcggcgagaggtacgtcgtcacgcacctgcccaggctcgtcgcggagccgttcgtgagggagtacctcggcgccgacgtccgcgtcgtcggcacggagctgcgggtggtcgcgggtaagaggttctcaggcacggtggtggtggcctctcccggcgtcgcggcggcagcggctggcgccgaccgcagcctgggtgctctggtggccgtccttgggagcgaccgggtcgtcggcgtggggctctactgccccggcgccggcggggaccagcagccggcgtttctgcaggcttgccaggagcgccgcatggtgtccgcgccggagaaggcggcggcggtgcccctgccgaggagcgagtacccgcggccgctggtgttccacgacggccgcctcgtgcgccggcccgacccgcttgtgtgcctggccatcttgctgtggctcccgctcggcgtgctcctgtccgtgacgcgcctcctcttcggcttcctcccgcacggcgccgggctcctgctgtccgcggccacgggcttccggatgcgcggcagcctcgggggagcggcggcggcgggcccgcggcgaggcacattgttcgcgtgcaaccaccagacgctgatggacccggtgatcctcgcgacggtgctgcgccggaaggtgaccgccgtgacgtacagcctgtccagcttctcggagctgatcgcgccgatcccgaccgtccggctgacgcgcgaccgcggcagggacagccggatcatgcagcgcgagctcgcgcgcggcgacctggtggtctgcccggagggcaccacctgccgcgagccctacctgctgcgcttcagcccgctgttcgcggagatcgccgacgaggtcacgccgacggccgtgcgggccggcggcgccatgttccacggctccaccgtgcggggccacaagtggctcgactccgtcttcttcctcatgaacccggcgccgtggtacgagatccggatcctggccacctgcagtggcagtggcggcgcgtccagcctcgacgtggcgaacggcgtccagcgcatgatcggcgatgagcttgggttcgagtgcaccggggctcacgcgcagggacaagtaccggatgatcgccggccacgacggcgtcgacgcgaggtcgtcgccgtcgtcatagctgaagagcaaatgtgccagcgtacgcttgtggggactcatgcacagaaatgcaaaacgttcaactggttctccttctccatcaccgccctgctcttaaacacagacattcagtgttgcagcgactaggctccattcttcaggaaatgaccggtttagacggttttggaacaagcccaaccaaattttagtgattttttatgttccttaaaaaaaaaaaaaaaa

SEQ ID NO: 2739 - DNA, 1704 bp, Zea mays
  Clone ID: ZEAMA-23APR03-CLUSTER460516_1
gcacggagaccattacctagaacatcctaatcgaaaaactcattctactcgacgtctcgagctgtgtgccacgcacaaccagaccacagggagtcagggacagagtggtagcccgtcacggtccaaatgaagcttcttccgcgcctctgcatggccaccggcaccggcaccggcgacggagacggggaggggagcgcaagcagcagcaccaagcgggccacagcggtgtcgtcctcctcgtcgaccgtctccacgtcgtccgcggcggcggcggccgtgtcggagtcgtcgtcctcgacgtccctcccttcgctctcctcagcgacgagcgctagcctcgccgcgtcgttcgtccacgtcgccacgctcctccctctgtccgcgcgcccctcgccgtgcgccgccgtcgtcgcggcgacggggggctccctgcccggcctcgtcgtcgcgcggccgtcgtgcgtggcgctccacgacctgtcgacgctggaggcgacctccacctccgacgccgccgcgggcgcgggcgcgggttcggtcaagtgcgtggcgcgcctccccggcggcggcggcggcggcgcggccgtgacggggcaccaggacgggcgcctgcgcctgtggcgggtgtcctcgcgatcgcctggcaggatccgcctcgccgcggcgctccccacggtctccgaccgcctccgccggttccccgtcccgtccaaccacgtcgccgtccgccggcaccaccggcggctctggatcgagcacgccgacgccgtgtcgggcgtggcggcgtccgccgacgggcgcctcctcttctccgtgtcctgggacaagacgctcaaggtgtgggcggcgccgtcgctgcggtgcctgcagtcgctggcggcgcacgacgacgccgtgaacgccgtggctgtggcgcccgacggcaccgtgtacacgggctccgccgacaggcgcgtccgcgtgtgggcgccccgtccccgcccccgccccgccgcgcgcggcaagaagcagcccgtctaccacctggtcgccacgctgtcccgccacacggcggcggtgaacgccctggccgtcgggcgcgggggccaggcgctgtactcgggcggcaacgaccgctgcgtcctggtgtgggagcgcgaggacagcgccagccacatggccgcggtcggggccctcaggggccaccgcaaggccgtgctctccgtcgcgtgcgcgcccggcgggctggtcgtcagcgggtccgcggaccagacggtgcgggcctggcgccgcgccgcggacggcaggggttacgcctgcgtcgccgtgatcgacggccacggcaccgccgtccggtcggtcgcggcggcgcccctgccggtcctccagaagcggtcccgggcaggcggtgtaaacggcggcggcggcgacgaggagtggagggtgtgcgagcttcgacggccaggtgcgggtctggtcgctgcgcgtgtcgtgtttgtagccggtacgagttggcgcgcagaagagagctagtacatttttttatgtttttccagatttgttgagaaaattatacattttgtttttcgtttttagtttttttgaccgacaaaagtgggcaaggcagcaaggaaacatctcggtccggttgcttgtttaagtcgatgttctctgctgcggatcgttcctttttccaaagcagaaggaaagaactattcgacggcc

SEQ ID NO: 2740 - DNA, 3106 bp, Zea mays
  Clone ID: ZEAMA-23APR03-CLUSTER460892_1
gcacgagaccattacctagaacatcctaatcgaaaaagcgaagtttttcgaagttcaaaagttcgaatcatggaagcatgagagcggtccgcacgaggcggccacggccgccacgcccatcgccggagctggccaaggcgccgatttcgccgacgacaaggagtaaaccggaggaagacccctctcccttaaccctcccgataaaggcgttcaagctccgcctggctaacggtccaccgctggcgtccacggcgaaggacttcaagacgtactctgagacctgtgcctctctcctccgcctctgccgcgctatgagcgccacctccaccaccatgccctcttacgcgccctcctccggttgcctgccgcttgtcctctccctacacgcgcatgccttccgctctggcctcaccgccgaccgctccgtcgcatcgaacctgctcacagcctacgccgccttcacgcgcgccgcggaccgtgaccaggccttccgagactgcgttgccgccgatgcggcatcgtccttcacttacgacttcatggtgtcagaacacgtgaaggccggggacattgcctccgcccgcaggctgttctacggaatgcccgagaagagtgtcgtgtcgtacacaaccatggtcgacgcgctcatgaagcgtgggtctgtaagggatgcggttgagctgtatgaacgatgcccactccactcggttgccttcttcacagccatgatttctgggtttgtccgcaatgaactccataaggatgccttccctgtttttcgaaagatgctaacctgcagtgtgagacctaatgtggttactctgatttgtgtcatcaaggcctgtgttggtgctggtgaatttgatcttgccatgggtgttgtgggattggcagtcaaatgcaacttgtttgaaaagagtatcgaggtacacaattctttgatcactctgtatctaagaatgggagatgcagctgcggcacacagggtgtttgatgacatggaggtgagagatgttgtttcatggactgcattacttgatgtgtatgctgacttgggtgacctttatggagcacgacgggttcttgatgcaatgcctgcgaggaacgaggtctcctggggtacattgattgcaaggcatgagcagaaaggtgatactgcagaagcattgaagctttacagccagatgcttgctgatggttgcaggccaaacatttcatgcttctctagtgtgctcagtgcttgtgctacccttcaagacttaaggggaggaacaagaatacatgccaatgcactgaagatgggctctagtaccaatttgtttgtatccagctctttgattgacatgtactgcaaatgcaagcaatgcacgtatgctcaaagagtttttaattccctcccagaaaagaacacagtatgctggaactctcttatttcaggttatagctggaatggaaaaatggtggaagcagaggggctcttcaataagatgcctgcaaggaattcagtttcatggaatacaatgatttctggctatgcagaaaatcgacgatttggtgatgcactaaattatttttatgcaatgttggcttcaggacatattccaggggaaatcaccttgtcaagtgtcctgcttgcatgtgcaaacttgtgctctttagagatgggcaggatggttcatgctgagattgtcaagcttggaatcgaagataacatctttatggggactgctctcagtgacatgtatgccaagtcaggggatttggacagctccaggagggtgttctatcaaatgcctgagaaaaataatatcacatggactgccatggttcagggacttgcagaaaatggctttgctgaagagtctatttcgttgtttgaggatatgatagaaaatggaatagcaccaaacgaacatacatttctagctattctatttgcttgttcccactgtggtttggtggagcaagccatacattattttgaaacaatgcaggcacatggcatcccacctaaaagtaaacactacacttgcatggttgatgtcctagctagagctggctgtttgccagaagctgaagagcttctcatgaaggtttcaagtgaattagacacaagttcatggtcatctcttctgagtgcttgcagcacttacaggaacaaggagattggtgagagggcagcaaagaaacttcatgagttggaaaaggataatacagcaggctatgtgctactctcaaacatgtatgcatcttgtggtaaatggaaagatgctgctgagacgaggatactgatgcaaggggctagccttaagaaagatgctgggtgcagctggttgcaattaaggggacaataccatgccttcttttcttggaaagagaagcatcctttatcattggaaatttatgagatcttggatttgctgatgttggaacttactacttgaatttattgtgatggttagtcagcagtgggacagttctgacttctgagcatatgaggactattgcatcttctcagttttcaggaaggtaaagtagcagaacagagttgatggacaattaatttcttgaatgtgggttctcctgatgcagtggcttgcacagcattcaaggatatctcctccaaacaaaagcaatcagcagattatgttggcaggtcatgaatgctttcatgctggagcattctgctctgaagttctgcaattagagtacacttattttgaacattattgtcatgatgctttattttacccagtccctgaaacttttggcaacacaggacttgatgtaaaccagctttagaagaacatttgagatactacagcttctatttccaaaagtttgaatctgtctacacacaaagtgaagattacagtggtgatgattcagaggatgtaaatatacaaaatgggctggtttcactgacacacgatcatatggccctggtttggtgctatgggttctcttttgagttgagtccctatgaagggatccgtcattccgttggacaagaagataatctttaatgaagtcttgggagatctccctaatgtgttgcctcattttccatgaaaaacaggtgtatatatgagaggatcgcggtcaa

SEQ ID NO: 2741 - DNA, 1182 bp, Zea mays
  unsure (1)..(1182): unsure at all n locations
  Clone ID: ZEAMA-23APR03-CLUSTER461343_1
acaggctcccagcagctcgattcgctcgcctagtcgccttctcgaattctcccgcaaacttgacgctgaagcctgcacgagaggacatggccatggccacgcgtgtcacggcagcagcggtcgtcctccgggttctctcgttgctgatcctgctgcgcacgggcacgtgcgccgacgactactcggcgttcgtgtacgcggggtgctcgcagggccgctacagcgccgattcgcagtacgcgtcgggggtggactccgtgctcacctcggtcgccagcagcgcgccgtacgccccctacgacaacttcacctcgccgaccgactcgtccgtggtcggcctctaccagtgccgctccgacctccccgcctccgtctgcagcggctgcgtccgctccgccatctccaggctctcctctctctgcgcctgggcggtcggcggcgcggtgcagctgcgggcctgcttcgtgcgatacgggaacgactcgttcctggggaagcaggacacgncggtgctgttcaagaaatgcggcggcacgcccggggacgccggcggggtggccatgagggactcggcgctcggcgcgctcgtggccgcgncggcgccggcgggcggagggttccgcaccggagggtccggcgccgtgcaggccatgtcgcagtgcgtgggggacctcggcgccaagccctgctccgantgcgtctcggccgcgnccgcacagctcaaggccgggtgcggttacgccacggccggcgaggtctacctcggcaagtgctacgcgcgcttctgggccaacggtggcggaggtttcagtagcagcagcagcagcgccggccggcatggatttcgtctagtccacgtggtcgccgccggtttattcttcccctccttggcttatgcctcacttgccatataggtattgttgcaccgtgcggtgatgttgagactggagcagtagctatgctgtgttttgtcatcatgcttgagatttacagctcagtttttgctcttgtgctcaaactcaaatggtgttcatgtagcttaactctgtctctttctttctcaagtcttataactgtaaatttcttacgtcgtatgcatgcaaactatgctaaatcatgtataagtaatctttttactacagcttaccaccattattaatcttaagaaaaaaaaaaaaaaaa

SEQ ID NO: 2742 - DNA, 1068 bp, Zea mays
  Clone ID: ZEAMA-23APR03-CLUSTER461358_1
gcacgagaccattacctagaacatcctaatcgaaaaacctcctttcccccgcctctccgccgcttcttccgcgcgcgccgcgccgcgccgccctcttcccccggctcctcgtgtttgtttctcttctcttcttatccgccaagcccgaaggagaaaaacacccaccagaaacccaggacgaggaagagtctgcggccgatcgtggatgtcgccaccgacgaacggcgccatctcgctcgcctacgcgccgtccatgatgctgggggcgggcgccctgacgaacccgccgctcctccccttcgacggcttcacggatgaggacttcctcgcctccgccgacgccgctctccttggcgaggctggtaccgaccagaccctcctcctgctgccctcgtgccccggggcgaactgctgcggcggcagtagctccgaccagggtctcgagggcagcaggaggagggtaaggggaagaagggagcggccgggcgcaaggtcggcgggccaaggaagaagtcggtgtcgaggtccgtgaaggccgggctccagttccccgtcggccgcatcgggcgctacttgaagaagggccgctacgcgcagcgtgtcggcaccggcgcccccgtctacctcgccgctgtcctcgaatacctcgccgctgaggttctggagctcgccggtaatgctgccagggacaacaagaagactcgcattattccgcgccacgtgcttctggcgatccggaacgacgaggagcttgggaagctgttgggcggcgtgactatcgctcacggcggtgtgctccccaatatcaaccctgttctgctgcccaagaagacggcggagaaggcgtccagtgtggggagcaaggaggcaaagtcgcccaagaaggccgccaagtcccccaagaaggcatagactgactgtctggagtgatctgatgtttagcaggaccttgataccagtatgcggtgatgcgtaggctgtagatgggtcgaatgtgcttgtgtgtgtatgtgccctgctgcaagttgccctttgctatttaaaatggaagaagaaatgccttgtttc

SEQ ID NO: 2743 - DNA, 1173 bp, Zea mays
  Clone ID: ZEAMA-23APR03-CLUSTER461443_1
atgagctgcttccagcccggaaccgaggctaactccgccagccgactcggaccggtggtggtgtcgtggaagctgcgcagccacgggcgggcctgttcgctgttcgcagccgtgcctcgatcgccgcccgtgccagaggtctctctccaatggcggtgacgagcgccgcagcccgccgcttcctcgcgctcgcgcccgcccggggaccccgcgccttctggtcggcctcgtgtccacccgaccccgacgcaccttccgcctcgtcgacgtctaccgacaacaacagcaggaggaagaagaaggagccgtccgggtccgcccaccaccgcctcgccgccgtcatggacgccgtcaacgagcgcaagctcccacccgagctcagtgggcgcggcaacgcagtaaggtctgaaactgacattgtaaatgtcgttgaacaaagaatatggcattcaatggaggaagggcactttgaaaatctaccagggaagggcaaacccttaaacctcacttcaaatcctcatgccgatcctgccgaagacaccctttacaggatactttcaaagaatggttgtgcacctgaatgggttgaactgaataaggaaattcgtggcatgatcttgagctggaggtcggcattaaggaaagcatgggcaaaccgctctgaagatgatgattctaactggagtgatgacagcagggctctccaggagcgaattcgccagataaatgataaggttttccggtacaacctgatagtaccctttgggcgtcagttgtttggtctgaactgggacaaggagctggacaagttgaaggaagaataaaggacaaagaggtggacacattggtgaacatagcatggaggacttttgttgtatcaaaatgacctgtaactaggaatacctgataggacatacacatacttaagaaaaaccatgaaagctgagtataggtatttacacgtaggcttttattagtttatatatttttggagaaccaagttttccggtgtttccggtgctgtagccgattttgtgataaaactctgtcacatgggtaaaacctgagataatttcttagcggtaaaactcgatctatgccacatgggctaagctccaaaaataaaaaaaaaaaaaaattaaattaaaatataatatatattaatattataat

SEQ ID NO: 2744 - DNA, 955 bp, Zea mays
  Clone ID: ZEAMA-23APR03-CLUSTER461986_1
atcactctcagtctcagcttatcgggctagctagtccatgcatgcccccatggccatccgcgtcagcagctcggtcgccgcaaccgcaagcaacaggagcctcctgctcgtagtagccggcgtcgctctggccctcttggcgtcgccgacggcggtgtcggcccgccggcgccccgtgcggctgcgcctgtacatgcacgacatcgtgggcgggccggggcagacggcggtgcggctggtgaagggcccgggcccggagaacccgtcgatgcacccgggcaactacttcggcgacacggtggcggtggacgacctcctgacggcgggcctcgccgccggctccgcgcccgtcggccgcgcgcaggggacctacatgacgggctccatgagccgcccggtgttcgtggtcgccgtcacgctcatgctcgccgcggggccctacagcgggagcacgctcgtggtggccggccgcgacgacacctcgcagccggtgagggagctcgccgtggttggcgggacgggggcgctccgccgggccgcgggccatgtgctgtggagcacggccagggtggagtcctcgctgcacgccgtgctgcaactggacgtgcacgcgtccgtgccggcgccgagcaaggctgctgctgcggcgttgctcgtcagctctgcctgacccgactcgtgggatgcgtggttgatggttcagattgagatcaacggcgggtgatcgaataatcgaccactttgcgatgaaattaacgaacgaaactgtgtgctcgactgattatactgttggttgttcttgtgctcttccaagctgtccaagtgtgctgtggtcatgtaagaaataagtgaccgtttagatcgtcctaagtcaatggtataggatgttaatactttggatgacgtgatttataaatatacgtttttatacaaatatataaaaaaaaaaaaaaaa

SEQ ID NO: 2745 - DNA, 584 bp, Zea mays
  Clone ID: ZEAMA-23APR03-CLUSTER462033_1
gacggagacagtgggactgactgactgacatggcccactcggatggtgatgccttgcagcgcggccgctcaaagggggccccaggaagacggcggaccaggccacaccggcggccggccgccggaggggaggcgccggcggcgccgccgccaggctcatggagaagatcgtgcccggagcgcccgccatgaagaccaagtccagcaagaaggaccagtacctgctcaagcgccgggacgcgcccgaggcctccgcacacagccagccgcagctcccagacgcgccgccgccggcacccacgctcgcggcggaggacggaccacctggcttcccggccagcggcgacccgcccacaccgccgctgcccgggagctccgtcgctgacgaggacttcatgctgcagaggcgcgtcccgctcgtcgatgtccctcccgccgtccaggcccagccgagcgagggccccgccgcgcccaagaacgcgaccaagctcaagaagccccgcaagcgcgagcgggaggaaggccccgatgcaacccccgactccgcggacgccgccggcgaccccaagaaaaaaaaaaaaaaaa

SEQ ID NO: 2746 - DNA, 853 bp, Zea mays
  Clone ID: ZEAMA-23APR03-CLUSTER462084_1
tcttcgcgtttgtccgccaggcgccagcgcccctctctcgttcgttccacttccacctcctcccacgcatcgcactcgcacccaccgcccgtgatctcccgcgcgcctacctacggcggccagatgagctccgcggcggccgacgtcctcccggcggcgctgccgccgatcaggaccacggcggagcccgtggcctcgtccttgcctccggcggagaagggggcgcaggagcaggagcaggaggcggagcccacgacgccgacgtcggaggagagccggcttcgggcgccggccgagtgccctccggcgccgcggaagtcggcgtgggcgcctccgcggccgccggcggtgccaccaacgcccgccaagcgcaggctcccgtcttccgctgcgccgtcggcatcggcgtcggcgtcggcgcgccgcgccttcttccccgtcgcccgcgacctcgccgccgtgttccgcgccctgccgcccaagaagcggatccgcgcgggctgacggccagttgcgtgccttgcgggcacggcgacctcaccggcatggtggtacagactacagagtacagacctctcgtagaaatggtgtgttggtttattatttacttgccctatgcttcttcttcttctttttctttttagtgtggttgtgtgcgtgtgtgtgggtggaatagaaactgtagaattgggaattgttcttatttacaggggggtgatgaattggggtggggggcgagaagaaatggaaagcatgtaagagagttcgcagagatctgttcattactacattcgttatagtaaactatagctcacagttcgccaaaaaaaaaaaaaaaaaacggacgcgtggg

SEQ ID NO: 2747 - DNA, 1301 bp, Zea mays
  Clone ID: ZEAMA-23APR03-CLUSTER46208_1
ttcttccttgctcttcctctcctctttgtctctttttttgcttttgttttctcttttagatcggtgcaaaactaaataaataaataaaccaagaggcgacatattccctccgttcttttttatttgtcgcgttttagtttacaaaataaactagtgggcgacaaatatttgagaacaaaggtagtattttggactttacctctatgagtttatgtacatcaaatatactataaactgaaggaaaataaagagggcagcctacaacaaacttcaaatcaactctgtactactttagaaggtaatcaatatagcatgcaggaccacatagaaaggggtgtcgcacttttgagctgcagaggaactgtgggggctaacagttgtgacattcttattgtagaactggatggagataagaccaccatgcattctgactgatgatatagatggcctatggaagcttatgctcgccccgtgccttgagaaaaaccagtgttttatttcatcagcaagccttgccaaagtatgaagaagcataagatgacggtaatgatcaaagccaccaagttcccaatggaagatgctggtttggaattcttcatcttcttcaatgccttcatacgctcaatcctagccttctttaacaccgcaagctccgatagtgcactgatgagcttctgatcagcagggtctaatggtgaagtagtctgtaatcttggaggtcgtggcggcttcttataccattttttattttccttatcaacagttgacttatccaaaatcccaaccttgatctccccttcagctttcataggctctccacttttaacagatgaatcttgacggtgtgaagagaaacaacatatgtggtgactcttatcatccttcagtgctacaagatcatcccatgagctgggccgcattgtacttgcatgcccaactattgaattaaccttcatcccactattgtcctctatgggtagcaagcacttgcctttctccaggtcaaccaacatatcttggacacatacttcctttacctccattagaatgacagaaaaatctccaaatgatcaagatgtaggaaaacaacccctcctttctttctagaaatcaaggagctggtgggtgctcgtcgccggcgaagatactgacgaaggccttagccacctggcacaggacggcggcggcacaccagtcgtcggagagcgagacgggggcgagaccgcgagacaaacggagtcaaccgcggcgcagggacggatgttctaggtaatggtctcgtgcagtttagtacgttgaat

SEQ ID NO: 2748 - DNA, 1358 bp, Zea mays
  Clone ID: ZEAMA-23APR03-CLUSTER462144_1
attccgtttatcagggaggccggccgagaccgggacctcgggctcggagggtcacgcgttcgggcgacgctcctctcctgcgctccagcagccactcccgtttcccccgcctctgcatttaccgtgtcgcggacgcagatgcccacgtctccgcggtccgtgctccactcaccgcgcccgcctgcgaccgcgagctctatatccgtccaacacagccagagtgcgcacgatcccactgccactgcccactgctgtgctaccaacagtagctagcaaaaccatggatgcggacgctccggcgacggcgacgccatccaggaagccggcgtcccactccctcccgccgccgcccgcactgttcgccgcccgcgcgcgctcccgggttgccgacctgggtgccggcgcagcgttcccagcccccccacctgacacgccgccgcgccggctcgcccatcaccgtgccgttcctctgggaggaggcgcccgggaagcccaaggcgctgcccgccgccgcgacaccggatgcagccaacgccggctcctttaccgaagtcggcggtcggcgtcaggacagaggccacgcggacctgcctcgccccctgccgctgaagctgcccccgcggctacagcaggcgtcgtcgtcgttcgccgcggcggacaccccgctgtcccccaagaccgtgctccagggcggcaggaggcggccgaggtgggcccggagaggcgcctctgccttccggacgacgccgagcgccggcgggggactcttctctcgaaactggagcaagcccacggcggcggcaagcaacaagaacggagacggtgaccatgagcgggacgcggcgggccctgacgccccgtggtgctccccggcgtcctcgtcctcgtcctcgtcctcatccgcctccacctgcttcggcgtcgacggccacggccacggccacggaggtcgcgcgaggcccgccgacggacgggaggtctgctcggaggaggacgacggctccccgaggggctcggtgaggatcacgaggtttaggcggaaccggagcctccccagcatgaccacgtctaacctctgggcaagcatccgtaggagcgtcaagcaaatcactccatggagctagaacttcggcgactggtaccggcactactagaaataatcgcgagcgccgaactgcaacctgcggtgctcaatggacgtcgtgaagagtacaggctcaactcaacaagcctgtagataggcgctcaatgtgacattgtgacttggcccgaaagagaacatattcggtgcatacgagactttaatacatatatatgatgcatataaactaattcagtttacaaaaaaaaaaaaaaaa

SEQ ID NO: 2749 - DNA, 1417 bp, Zea mays
  Clone ID: ZEAMA-23APR03-CLUSTER46266_5
ggaattctagcatggattccaaaataaaatctaggagctgttcggttaaataatgaaattatggagagagactttagagacgaggcttgaacaaaacacggcattcaaaccaagcagagcagatcagagcagggcagggcagggcagggcatatatctctgtgctatgctctgctccaaggcgaaacctgcccccgtgtgtcctggcgctggcgtacggctatatatctctgtgcctgtgaggtcagggagacagaaagaaagcaggctagctagctacagcagcgagagaaaaatcgcccaaaaagccaacagcaaccgtcacagagcaaaagggatagggagagcgcgctttgccctttttcccggccagccaacgacgccgccggccaaccaacgacggagacgcggtggaggagatcggatggagggccacgtgaggaggagtcctgcatcctccgccgcggacgacggcgcgcccagcacgagcggtagcgcggacgcgaccgcccgctacgccgacgccgacgacaatgcggcgggcgccgggggcccaaaggtctgggtcctcgtgctcctgttcgcgctgctcctgctgcccttcctgccctctgcgatgcgccgcggcaccggcggcgggacggtttgggcgggaggcggaagaggcactgagggagggtaccggtaccgccgcggcgggatcagcttcaagagcggctgggacgtcgtcaacctctgcctcgtgctcttcgccatcctctgtggtctcctcggccgcagcggcggcggcggcgacggggactcctcttcctccgcgacttccgcttccgcgtctgccaaggacgaccgtcatcgcctggcgtcctcggcgccgcccgccgcggagcccgtcacggtggcggagggcgaggatgagtccccttcggtcacggcgtcgccggcgccggcgtactgcgcgagccccgacgtgaacacgaaggcggaccggttcatcgagagcttccgcgaggggctgaagctggagaagctccaactcgtaccgggagaagtggcagaggcagatccaagagaacgccgccgtcgagatcgaggagggggagttcatggtgatcgggtccctcttcggcgacgacgacgaagaggacgaagacggcatctccttgccgcagacgccggcgaccgctgtcgccgtcggcttctaacgacactgacgttgaagaaaaaaaatgaatcgaaaaaaatggtccccttttcgattaggatgttctaggtaatggtctcgtgcagctacaccagagtgctcaggatcccaaatccccaatccgggtcattgaacatctctaatgctccgtttggatgttgcaattggagatggtggaatcgaattggatccaataccaaatcagcctggtattgga

SEQ ID NO: 2750 - DNA, 953 bp, Zea mays
  Clone ID: ZEAMA-23APR03-CLUSTER46267_1
tttttttttttttttttttgcctacaattttctcgcagatcaaattccttcatttttcacaaggcggtttcttctccgtctggcgtatgcacgactgacatccatggccttggtgctccctcgttttatcccgcacatgggcgaatgcagaacagacatccattacgatgttgattgcacgatttcttcgacacatggacaccatgtactactgtatgtatgtacaatgacaatacaatgtaagctaaaaaaaacatgagttccacttccacttccagctgccgcccaaatgataacagtaagggctagtttgggggcaatagtaaggtgaggatagccttgtaagctaaaaaaaatcaaagaacatgagttccagctgccgccccaatgataacagcaattgtagcgaggatagccgctgcaacacatgcgacataacctggtttctccctgtaatcaactctggaacagcacagcagaaaggctccaacgtaccagggaatggcaccaaggaagaaaccgactatgaacaggaaccatccaaaaccaatgccacaacagggaagtcgatcatggctacgtccccgcacacctgcctcgtaatctcgagcgggaacggcctggtagtcgccgcggtggtgggcggagaggctcggcggcgggcgcgggggcgggtagctgggcggcccctggaaggtgccgtagtgtacaccgcctccttggggcttggagccgtcggcctcctccccgctcatcctgctgcgcgcccaactcctctggctctaccctctctcctctcccggaggccggagcacgcatttggtccggtagcctgacaacaatgtgacaacgccacactttggacgggaacaggagccctctctcctctcccggaggccggagcacgcagtttggtccggtagcctgacaacaagtgacaacgccacactttg

SEQ ID NO: 2751 - DNA, 1291 bp, Zea mays
  Clone ID: ZEAMA-23APR03-CLUSTER462869_1
gctagcctcctcatcctcgcgcccgctcctctctgcgccgttgactgccacgatgccgaacgacgcgccgtcgccgcccatccacagcgcgaaggacgccatggacgccctcgcgggcatcctcgggggcgcgctcccgggctccgtcgccgcggccgaagaccccgcggccgcgctcctcaacgaccccgacgtcgccagcgaggtgacgggacgcctccgcggacccgggtcgggcgccgggaacgacagcctctgccgctggctctacgacgcgttccggtccaacgtccccgagctccagctcgtggtgctgcgattcgtgccggtgctggctggggtgtacctgtgccgcgccgtgtcccggaagacgctggccgggttcgaggccgtgctcctcgcgctgtacgcgcacgccgcggcgcagcgcggcgccggggaggccgagaccgtgtcgctcccgaacctggcaaacccgagcccgtaccacgacgccaaggtgccgcccaaggccaagcccgtcgacctcgacgttgccgtgctctccccgccgctggagccgcacggcaccgtgcgcgccacccgacgcgcccaaatcgtcggcgcggtcctgcagctctaccacgggaagctcgcgcacatgccgctgtcgtccaagatggacttctgcgggttctgcgtcgcctgggcggggacgcacagcaagctggacggcgccgacaaacagcggctcccgcccgcccccgccggcggcgacgcggagaaatggcagcgggtgccgctgccgtgggagctcttccagccggcgctgcagatcgtggcgcactgcctgctgggcaccacgggctcggacgagctgaaggcgcaggccgcccgcgccgcggaatgcctgtattggagggccaccgagacgatggacgcgcgcgcggtgctggccaccaggagcctcgtgaggctgtcgcagatggtggaggaaccgatcccggagccctctttctctggcgccatcgagaatacggcggagctggaggccatgagggccaacattctcaactcgaacaactgatagactggtgaatactgacaacgtattcagctaatgcaacgagtatttatttattatgggtagcattacctctggcattcggatagaagtactccagtctctcttgtattgtccagcagagagattacgcgcaataagtgatgtaatcgtttgaaaactgaaacaaactatcagaatgataagttttcaagcttgtgaaatgaaaaaaaaaaaaaaaaaggctta

SEQ ID NO: 2752 - DNA, 1207 bp, Zea mays
  Clone ID: ZEAMA-23APR03-CLUSTER462894_1
aagcaccaccaacagctcttccatctcactgcaacatcgcatcgacagtctacagcatttgtcgatcaaacactgctcatcaagcttagttgtagttcgtcactactgtaacttggtcagctctcatcgtccagaaaacaagaggtggcggaacggaaggaacacatacacaagatagaagcttttggtcgctgcaacaataatggagatggtgctcgacaacagcgctccgggcgtcgtcgcggccgggcagtcgtaccgcggcgtgaggaagaggaagtggggaaagtgggtgtcggagataagagagccgggcaagaagacgcgcatctggctgggcagcttcgagtctccggagatggccgcggtggcgcacgacgtggcggcgctgcgcctgcgcgggcgcgaggcgcggctcaacttcccgggcctggtccaccgcttccgccgcccggccaccgccgagcccgacgacgtccgcgccgccgcgctggaggccgcggcccaggtccggttcaggcccgacctcgtcgcaatgcaggcctccggcggggagggcggctgccgcttcggcggcgccggcggcagcgacgacaccggcagcccggagccgctggctgcaggcgaggacgatgtggcgtgggacgtcttgctcgggaccgacgtggaggtggtggagtcgcccaagatgtgggatgagctggccgaggccatgctcgtggccccgccgccagtgtgggagggcgatatggaggacactgacgactgggcccaggggggtaatctctgggacctacctgtctgggccctgggccccaccggcagatgcagcttcacatcctttggtttttagaggtgtgaactgaaaacccatcagtttaatcaatcttcttcttaaaagttaaaaccatatatataggccaatgagcacatgaggtattctattctagagagcataattgatcatcgttaagaatgttctaatgatcctttgattttctttggtttctaaacgtctatgggtcccgtctgtcagtgtgtgcagacttggtagctagcaaagaaggtctagctagctagctagcacgtgcaattcacgtgggtaaaaaaaacaacaagcaggatgtaattctttctgtttccctctcatctcatggatgagaagttgaaatgcaactgctgctctaaaataaaaaaaaaaaaaaaa

SEQ ID NO: 2753 - DNA, 1312 bp, Zea mays
  Clone ID: ZEAMA-23APR03-CLUSTER462983_1
cggtacgcgcgggctgtgtagtgggttggtggataagaaagagacagagacctcctcctgatcgtccccaatgtgttccagcttgttttttatctcattcagtcttctctcccagatctcaccgtcgtcgttctcgatcaccggccgcctgcatgcgtctttcgatcggatcccctgccaatgcgcaaggaaaggaagaaacaactaattaaccaacccataatggtcatcaattgctccgttgttatactttttctaggtcgtatagaaaagctcgtcccgccccgcgcgcgtggtaagcaagcacttcttccgagctaaaaaatatatatatagcgatgatgggctacacctactcaccatgatcgtgcgtgcgtggttgctgcttgagaagcctcaatcgacactatagcagctatagtcattttcgacggccagatcccgaccgagctagggccgccggatccatccagctccatgcatgcagaccacccggccggccccattatattggacgatcgatgcagtactcgaacatagtgacttagtggcccgcagcagctctagcgcaagctaaggacgactgcagctacactgtttgtttgttcaagaaagcctgtaggatcgatcggatcggatcggacagagcgagctatatagctagctagggctagctagatggcgaggctacgcctggcggtggtcgccgtcgccctggccttgtgctgctgctgctgcctcatgatccacgcgccgacgacagctggtgccgctgctgccgccgacgccgccagctcgtttcctcctggactggaggtggcggcgcagcagcaggatacccgagtggctccgccgccgtcgtcgccgccgggcgcacaacaccatcaggtggtggcttcatcgatctagctagctatataataatagttaaatacactctactggatcggagtgacaacttcatcgttctcgtacgtcattcaggaggccgccgccgccgccgtagctgcggaggcgacaacgcccgtcgggaggaagaggacggagctggagctggtggaggactaccctggctccggcgccaacgaccgccactcgccgtgggcacagcagcggaggaactgatcgtccatcgcgatccacgaccgatcgatcgagtcacctctctgcatttttttttttttgttttttggttccacacgcacgcacgcacagcagtttcgtattcaggccgggcgtttcgctactgtagctttgtagtagggctatacgattatacatcgtatttgtatttgtaaaaaaaaaaaaaaaa

SEQ ID NO: 2754 - DNA, 1722 bp, Zea mays
  unsure (1)..(1722): unsure at all n locations
  Clone ID: ZEAMA-23APR03-CLUSTER463111_1
gcacgagaccattacctagaacatcctaatcgaaaatctctagtgtagtgtagggtcaggactcaggagtgaccgagctgagcacacccgccggccgccacccggcacggcgtcggcagcaacccacactatttactcccgcgccggcctctgtttccgcaccaccgcaccgtgccacgcactccaaagatccccgcgaataaaagccgcggcagcccgggtctcgcggtgagtgagaacccatcgtccctgtctgtctaggcagcacgcctcgctcgccagtcgccatgtcctcctcctccgcgtctctacagccgcctcccgccggtgcaaccggcggcagctccccctactccgcgtcctcgtccttcctcccctcgttcatgatcatcgccgcgctgctcgcattcgtcttcctcgcctccgtctccatccacctcctgctccgcttcctctccgcccgctcttcctcctcctcctcctcctcctcctcctccccgccgttgtccggacatccgcgcccgcggacctaccgcgacgacgcgggctcggcggacgcatccgtggcgaggcggcctgccgccaccgcggctccagccgacgcagggaagaacgaggaggaggaggacgcgggcgacgagaagcagcggctgatcgactccctgccgctgttcaccatggngtcggcgctcgcggcgctccccaagagctcgcccgactgcgccgtctgcctgtcgccgttcacgccngacgccgacctgcgcctgcttcccgcgtgccgccacgcgttccacgccgcctgcgtngacgcctggctgcgcaccacgccgtcctgcccgctctgccgcgctgccgtcgcgctcccgcacccctcgctctccggcatgctcgccgccgcgcaggcgcagcgccccgcgaggcccggacccggacccggaccgagcttcctcgtcgagatgggcaccgtcagcagccgcggctcgcccgcggcggccggcggcggccgggacaggaacaggaacaggaacagccgcacctactcgctcggctctgccttcgactaccagatcgacgaggaggtggaagccgtggtgtcccgcgtcgcgcgcatcgccgccgcgagagaatccagcgccgtcaaggaggagaagccgtcagccgagcagggatcggcgccagcgccagcgccagcgccgtcgccttcttcgcaaccgccgcctcccggcgagacggtggccgaggcggcgggctcctcgcgcgggtggctgcgggagtacgtggaccggctggcgtcctcggcctacacgctctcggagcggtggagctcgcgctggagccaggggcagagccagcagcaacggcaggaagagccgtggctgtgggacgcggaggccgcggagatgtcggcggcgccggggtccgacgacgacgaggaggagacggcgttcatggcgatgtaccgctggatcgccggggtctaaacgtagtcgagtaaggttacagggggtttctgtgtcaaaagtttctagttcaggagttgtgttgagttgaggtgatccaaatgttttggaaccttctgttgattgtgacgactgtgatgcaaaaaaaaaaaagcgtaagcagcagcagtcacacagttcatggatacatcctcggagttcgcattttggaacacgaggagataagaagccaacaaagacggatacgagaatgcgattgcag

SEQ ID NO: 2755 - DNA, 1446 bp, Zea mays
  Clone ID: ZEAMA-23APR03-CLUSTER463211_1
aataatggcaaatttctcccctcgtcctcggcggctcctcctttgaccaccaactccggcggcgccgtacgtcgcagccgcacgccacccggaaatacctacatggggcgaccggcgcgctcccgttctccagccacagagccgcctccggcggtcaccggccttcgctcctccaagatctcctttcgctcccgtaagatcgtcaagacagcatccgcgaaacctttggccacgaccgccctggcactagcgccgcaggcgcctccgcctccagtgcttcctgcgctgtcgtcccccggagagcttgcggccgcgctgcgccacctccaagccgcggaccctctcctcaccgcggtcattgccaacactgaggcgcccaccttcaccgccacaccctccctccccgcgttccactccctcgcgcgctccatcctataccagcagctcgcgacctccgctgcggacgccatctacgcacgcttccttgcgctcctcccctctgcttcggcggcggccgcagccgtagccgctgacgcggtcacacctgccgccgtccttgccctcgccgccgctgacctgcgtaccatcggcgtatccggccgcaaggcatcctacctccacgacctcgcggccagattcgcagccggggagctctctgactccgcagtcgccgcgatggatgaggctgcgctcctcgcggagctcaccaaggtcagaggcgtcggcgagtggactgtccacatgttcatgatcttctcgctgcaccgccccgacattctgccgtgtggcgacctcggtgtgcgcaagggcgtgcaggagctgtacaagctcaagtcgctgcccaatccggaggagatggcagcattgtgcgagcggtggaggccataccggtcagtcggcgcgtggtacatgtggcgcctcatggagagcaagggcgctgcgtccaagaagaagaataagggtaatgcgagctcttagttaggtatgtatatgtatgtgatggtagttcttgtcccaaagctgttaaatttaggccatctccggcagcttacctataaccatactcatattcaaactatactctataaacagtgcaatctacaatataaaacgatgcaaaacgttgtttttagtgatcatataggtgcaatgtacagtaattcacccgtatggtcacaaaaaacacattttgcactgtagattgtattatttgtagagtgtagtttaaatatgagtatgggtaagctgctttagctgattctggggtacatggtgtccctgtcccagatttgtgacagtctgtgttcaaatcagagttattgcagacttacaactgaagttgattagttttagagtcaattgcatgttgtaaacttgtgattttattagatattcataattgatgcagctaagttaatgggattattagcaaaaaaaaaaaaaaaa

SEQ ID NO: 2756 - DNA, 1604 bp, Zea mays
  Clone ID: ZEAMA-23APR03-CLUSTER463535_1
gagaccattacctagaacatcctaatcgaaaaaccgattcccacgtgattgcggcgcggccgcgcgaggagtgctcgtagccctcccccccgcccgcccgcccagattcggtcgcccatggcgagggacccagcccgcaccgtcttcataggtaacttggacgaaaaggtatctgagagaatcttgtatgagattcttattcaggcaggccatgtagtagacctgcatgtacccagtgacaaggagagtaacagtctcaaaggttacgcttttgttgagtatgaaaccgaggaaatcgcacaatacgctgttaagcttttctcaggacttgttcggatcagtggtaaaacgcttaagttcatgattgctggttatgacaaaccgtcttcaaatgtcaatacctcagtaatgctcaatcctgtaccctcttcaaatggcaataatccacatatcaggtggtaaacgggaggattggaggttatgtcttttctctcactccttatccatatggttttcaagctttatcaggtggacaagtacacggccatggccagcctttgcacatcggacatacttgaaggcttgaagctgtcgtccttacagtctcatcgaccgatgccacagcgacacatgcacgaacaagagcacctgcccgactgagcgtgcacgacctcgcgccgatcagggccaagaactcacccccgtcgtgtgtgccgatggaggtggaggccgacgggatccaggaagccaccgcaggcgcaggagacggcggcggcgtggcacgcatgtcttcttctgcgtcgccgcgacgtccaggggcaacaagaacagcatctcctacttccacaccaacgcggtcggcgaggacgccgagtcggcgctcgcgctcgccgcgctctgcctcgaccacgcccccgaccaccaccggtggcaccaccacaccgtcgccggggcgaagacgttcgcgttcctctcggccgacgacggccgcacgtacttcgccgcggccgacccgagccccggcgccgccgaggtggtccggttcctggagcgcgtccgcgacgcgtgcgacgccgcgcccaggaagcgcctgcgcgacgaggcggtggcccccgtcgctcgccagttcgccaggacgctgcgggcggcggcggcgggcccgagctcaggcgcggagctaccggaggcctcgctgcaggcgaaggagccgtccacgccgctggcgccggtctgcgagaaagacgaggaggagcgccagagggccggagagcgacgtcgcgccttcttgcagccggaggaaagcgcaagcgcgcttccggggtggcgcccgtggtggcgccacgcgtcggtcgtgatcgtcgtggatgtggtgctgtgcctcgtgctgttcgccgtgtggatgggggtttgcaaaggcttcgggtgtctgcgatgaaaatcgcccgagagcatgcaattgtaaatttgtaatcacatccatgctgtgtgcatggttcgcgttctttatgttaatttgcttgtcagatatcacatctacaatttgaaggaaaaaaacggtttaagaaacgaagacgcatgccttcaatgcaaaaaaaaaaaaaaaa

SEQ ID NO: 2757 - DNA, 1707 bp, Zea mays
  Clone ID: ZEAMA-23APR03-CLUSTER463581_1
actactggtagaactagagcttagaagtgccggttttccacgaggcgagcgcgcggtcatggggtcactgtcgacggcggaggggcagcggccgcacgccgtgtgcatgccgtacccggcgcagggccacgtgacgcccatgctcaagctcgccaagctcctccacgcgcggggcttccagatcaccttcgtcaacaccgagttcaaccaccgccgcctgctccactcgcgcgggcccgacgcgctcgaccgcgtgcccgggttccgcttcgacgccattcccgacggcctcccgccgtccgacgccgacgccacgcaggacatccccgcgctctgctactccaccatgaccacctgcctcccgcacctcctcgcgctcctcgccagggtcgacgccgacgccgggtccccgccggtcacctgcctcgtcgtggacgccgtcatgtcgttcggcttcgacgccgccaggcagatcggcgtgcccgtcgccgcgctctggaccgccagcgcctgcgggttcatgggctaccggaactacagaaacctcatcgactggggcctcgtgccattcaagagcgccgcggacctccaggacaacgtcggcggcggccacctcgccaccgtggtcaccggcgcgcgcggcatgtgcgacggcgtgcagctgcgcgacttccccaacttcatccgcaccacggaccgcgcggacttcatgttcaacttcctcatgcgcgagtccgagcggctgtcgctccccgacggcgtcatcgtcaacaccttcgaggacctcgagggagccacgctggacgccatgcgcgctatcctcccgacggtgtaccccgtcggcccgctcctcctccgcgagcgcctggagatccccgctagcagcccgctcgcggtcctcggctccaacctctggaaggaggaggaaggcctcctggagtggctcgctggccgcgcgccgcgatccgtggtgtacgtgaactacggcagcatcacggtgatgaccaactcgcagctgctcgagttcgcgtggggcctggccaacagcgggtacccgttcgtgtggaacatccggccggacctggtgaagggcgactccgccgtgctgccgccggagttcgcgtccgccgtcgagggccgcgcgttgctgacgacgtggtgcccgcaggaggcggcgatccagcatgaggcggtcggggtgttcctgactcactccggctggaactccaccctggagagcctctgcgcgggggtgcccatgctgagctggcccttcttcgcggagcagcagaccaactgccggtacaagcgcacggagtggggagtcgggatggagatcggcggcgaggtgcggcgcgacgaggtgacggtcgttctaaaggaggccatggacggggagaaggggagggagatgcgccggcgcgcagaggagtggaaggagaaggccgtgaaggtgacgctgccgggtgggcctgcggagactaacctcgagagggtcatccacgaggtgctgctctcccagaaaaagggatagactgccaacgcgtgatcgtcgtgggagtatcatgttcgggagcatcatgccttgcccctcgctttgctgtgttttcttatttacgtgtgttagctttgaataattaattatctcaactttcagctctcgaatgacaaacctcaaaccccagctctccgctgaaaggttgtact

SEQ ID NO: 2758 - DNA, 885 bp, Zea mays
  Clone ID: ZEAMA-23APR03-CLUSTER463977_1
acctgacaacttgtgcggtgcaattcagaagctgtagccactctcgccgtacagcgaccacaaacactcacggggccaggaagaggccgctgctggagggagctgcttattacggcgaaggccatggaggtgcagccggagctctcgctggggtttgctcctgctgtgaaaattccaaggaggtcgtcctccaactcggaaggcagcggtggcggcgccgggaacaagaggaagcactttgcctgggagtcccatggcagcagcctggacctccagctcggcgatcccctgcccctggactgggagcagtgccttgacctacactctgggaggatgtactaccagaacaggaagaccaagaacaagagctgggataggccgagttccaaagaggagcagggcaccctgaacctggaactcggcatctccacgaccccggacaccttcaagagccacacctccggtggccacatggtggccgtaccgtgcgtcaactgccacctcctcgttatgctctgcaagtcctccccggcgtgtcccaactgcaagttcgtgcagccctccgtggcagggatgcccaagacgcctcctcgccgccggctggaaaccgtcaagccactgctggagaccttgagcctcctgcactagcagcttgcgcgccatgcagtaacggcgggcatgtggtttatttacaaagggcaaatgcaaatcgagttgctcaaactcaatactccctactagtaaagtaatgatgagatagatttgatagatgggtactcgaatatgctacagtacaattaatgcatctcaggcgatcaagcagtaattaaaccgaaattaatttaagcatcccctctttgatcgaaaaacagaatatgatgatat

SEQ ID NO: 2759 - DNA, 739 bp, Zea mays
  Clone ID: ZEAMA-23APR03-CLUSTER463979_1
aaaaaaggcacctgaaatcggcatttgcccggagcattcccacgatcgcctcgtagtggatgtcgtcgtcacccacgtcgtgagcctggggcccgtggccggcagacctggccaagcagtatatgcccagccgtcctgagcctataaaccctgcagccgggtcttcagtcttcacgcttgagctagctttcacaagacaaaacaagaacacaactgcagtgtaagtagcgctacgcggccggggagagatagggaaagcgggaagcaaggacgatggcgtctctgctcagcctgtacggcggcgacgccgccggcggtcggaggaggatgagccgaggtagcggcacggcgccggcgccggtgaggcgtctgctgaggaggctgaggtccagcttcatcagacggagcgcggcgcggccgaggacgagggcggcggcgaggttcgcctacgacctgcgcagctactcccagaacttcgacgacggcgtcatttcgtcgtcagctccggcggccacggctcgtgcgtagctgcgactccaggaggattctgcttcttctgtgtagtaacaagtaactgtagccaagatgttagctactagctagtgtggtttagtgctagtgcttcctcactgagctagagactcataatcgagtccagtgttaatttcttgtgattagctatctcatccagttattgtgtaaaaatggaatgaaaattgtcaaaaaaaaaaaaaaaaaa

SEQ ID NO: 2760 - DNA, 1066 bp, Zea mays
  Clone ID: ZEAMA-23APR03-CLUSTER464040_1
cagtaacggcccgcttggcgtgcgtcgccgtccaccgccgcgacctcgaggtgtagggccgggttgctgaccgcatcgcccggcgtgtcgctcggcgtcggttcgggcaggccgcggccgcgcgcgtgatcgatggggaagagaccgccgaccgatccgaagcgcttcggggatacgtcgaatgcaggttcatcgtctggatggaccgatgagaagcacatgctctacattacctttttggaggaatcatttgttaaccaattgtacagtagtaagggggaaatgaattcggcagaatcattctatgcaactccaggtgcatggcaaaaatcttcttatagtggaaatggtagaaacacaaaatatgatgagggacatggatattgggggactgtcgaggttgacggagatggagctgattatatggatgatgatgcatcaactaatggtccaagacaagagagagatactagttaccatgcaaggcaaaggaattccagggggtcagctgctttccgtttgcgccagcatgggcattcgttctcttggagagaatcatcagaccagaacttcttggatggggagactcaaggtagcaaggaacaaggaagagggtctagcaaaaaccagcaaaagcatgctgatacgaccaaggtcggcccacatgattcatgaaatcacaggtttacgctagcagctcttttgtgattcaggagatcagtcatcctcatggggaagcttaggggccaatgggattggttcatgcaagctaataagtttgtaagaatagcagtgatggaggtgggcagatgtatataaatctgttcattcatctccagatagccaaaagataggtgtttcctgttggtagtgtatctattaggaatgtcgtagattgctaatgacttcctgtaaaatcgtccaggaaggtttcagatattgaggtggaccacctgggtaactgttgttgtgtcccgtaatgtacaagtacagatgtctgcaatgttcatttgacttgttgacaaaatggaattttatgatatttgaaaaaaaaaaaaaaaaaaaa

SEQ ID NO: 2761 - DNA, 1292 bp, Zea mays
  unsure (1)..(1292): unsure at all n locations
  Clone ID: ZEAMA-23APR03-CLUSTER464522_1
acccgcacacccaccatcagcacgctcccggactctgatggcgctgagccccacgcccacggccgttgctgcaccgccgccggagccgggccccgagcccgcgccgtccgctgagctgccgctgccggacgccatcgcggccgcgctgccgccggacccgtacgagcagctggaggtggcgcgcaagatcacggccgtggccgtggcgtcccgggcctcgcgcctcgagctggaggccgcgcggctacggcagaggctggccgacagggaccgcctcgccgccgagctcgccgacagggccgccaagctcgagcaggcgctccgcgacgccgacgcgcggntccgcagcgcactcgacgacaacgccaagctggccaaggagcgggactcgctcgcgcagacgtccaagaagctggccagggacctcgccaagctggaaaccttcaagcggcacctgatgcagtcgctgggcgatgataattcccaaactcatcatcaggaaacagtagacataagaacctacgagcaatcggtggcaaaagcgaattcctggaaagacgggctagagaagaacagccatcctgtatcctctctatccgacgagtccgtcgaagccgacagcgtaaatcaggaagtgacgacgaggccatttgagcagaaactgaccatcacgcacatcactccacgcctcacctcggatcctgcgccgaagctgagaaccgccgcgacatccccgagaaggtactccacggcggtgtcgcccaaactggcgtccggcgccacctcgccgcgattggagggccacatggcgatgtcgccatggctaccctcgagcaagatgtcctctgcagccaactcgccacctcgtggacagtctatctcaggacgcggtacaagagtagatggcaaggagttctttcgtcaagcaagacaccgcctgtcatacgaacaatttgcggcttttctttccaatatcaaggagctcaacgcccataggcaatctcgagaggagaccctgaggaaggcggacgagatcttcggtgcagaaaacatggacctcttcaggtcgttccaagggctgcttagccgcagcctatcgtagtaaaaaggaaaagaagcttgcccattctatcaattactactccttgttgcggttgttcatgattcatatggacagggccgacagcaggtatacgctttgtgtataataaataaaaaaacgacgtggaccgtactaagacgtgtgccaaaataaggctgtcnatagtaatatcatctaaatttcatctttt

SEQ ID NO: 2762 - DNA, 1230 bp, Zea mays
  unsure (1)..(1230): unsure at all n locations
  Clone ID: ZEAMA-23APR03-CLUSTER464592_1
gacagcctccgcgcgccgcgtcgtcgtcactgtgcagagctagctgnctgcaggtttgaaagcgatggccgcgctctacgccctcgtcgcggtctcgctgctgcccgttctcgtcacggcggagtgcgactgctcggacgacgacgccacgggccgcgacaaggcgggagcgctgcggctaaagatcatcgccatcttctgcatcctggcggggggcgcggccggcgcggcggtgccggcgctggggcgcaggctccccgcgctgcgcccgggcgcgggcccgttcctcgccgtcagggccttcgcgggcggcgtcatcctcgccacggggctggtgcacatcctgcccgcggccttcgacgcgctgggctcgccgtgcctcgcggcggccggcgggccgtgggccaggttcccgttcgccgggacggtcgccatcctcgccgcggtcgccacgctcgtggtggacacggtcgccacggggtacctgcgccggaaggccgcggcggtcggcgacgagccaccgcagctcggcggggacgaccccgaggaggcctccggcggcgggcgccacggccacgcgcacggtgtcgacgacgacgacgacctcgtacgccaccgcgtcgtctctcaggtgctggagctgggcgtggtggtgcactcgctgatcatcggcatgtcccctgggcgcctcgggatttccccagcacggtgcgcccgctcgtcccggcgttgacgttccaccagctcttcgagggcatcggcctcggcgggtgcatcgtccaggccaaatttcgcctcaggtcaatggtggcgatggcagtcttcttctccctgacgaccccgatcggcgtggccatcggcatcgggatatcgtcggcgtacgacgagacgagccagacggcgctggtcgtgcagggcctgttcgaggccgcggccgcggggatcctggtgtacatggcgctcgtcgacatcctccgcgaggacttcatgagcgcccgggtgcagggcagcgcgcccctgcaggccgcgctgagcgcctcgctgctgctgggagctggcttgatgtccatgctcgccatctgggcatgagtgaccagaacgtgagctggcttgatgcgcagggagtgaattgtagtagtttcgttaggttcgtgttacagtgggtcagccgcttgcccgcttttgagtgtatagaagaggaggggtttgttttgaaaaaaaaaaaaaaaa

SEQ ID NO: 2763 - DNA, 6689 bp, Zea mays
  Clone ID: ZEAMA-23APR03-CLUSTER4646_1
aaccatttctagaagcctccaaaccctagcgcaggaggaagaggagttaggaggagctccagggatggcgaaggcgaggaagcagaagggtgacggtgccagtacgggaggaggcgccaccgtgctccaccagaagctctgcctctccatcgacatggagaaccagctgatctacgggtacactgagataaaagttctagctgaaaacaacagatttgctctacatgctgacaatatgacgattcagagcatttgatggatggtgcaactgttgagtttgactattcccctcattggaaaaatgaaagtgatcaaccgaattggtcttcagtatcatgtttgaagactgctgctgatgctgcatgttcaatgtatactttgtctctaaatcgagaagctacaccaaatcttattgtgtcatctgagagatcagtcaagtcaatgactgaacagcagttagatgaaaacagtgaaaagcatgaagaaaatagtggaaggcttgaagaacatggtggaaatcctgttcaaacttcctatgatcaaattgttaatggctgcagtggaagagggaatagaaaattctgcacgaggggggttttctctgtgagggcttattcttgatgtaatatttgtgggctctcttacccgtaggtcgagtttttttgtatttgtgaatgaaagggctgtggctccttttgataagcagagtatgagttgtccagcaaagtagcttttccttgctcttgtattttgttacctttttttttgctgctccagcaagattgacattactgaagcatattaacatgcattggcatgtaaattttatgtcgtgctgtatgcatgtgtttcacaccgttcaacaacaaaagtgggaggtttggcagatctcttttctagcggatgcattctgttaagtgtgatacatctaccatggcaagcatgagtccgcgttgagtctgtaggctaatgtccacgcatatcgatttgataaggcggggcaccaatgttatttggtgttccgaagggcctcagaccccctctggtggtgaactacatcttcagtgatcaacaccctgaagatgcttcctcaattccgcataccatcatagtctcaggaagcttccactagcactcctagtgtccgggaggtcttaccgacctctcgaaccactcaagatactgataattatcttactgcagtgaaagaaggaatgtggtcaaaattagggtgaagcttactgcatcttccagtaaagcatctgatgctgaccatagaggccattctgatggcgcaagaaatgaaaatgaaccgggtcaatgcagctcaatgtcaatggatgcccccatggctggagcagcaaatgaaccattaaatgtaagcaatcataacattgaggaacaaaactcatgtcacgaccttggatcaaggatgtcggcaagtgttagcaatgctaaactaatggacagacatgatatttccaaggagctacagtgcactgctgattccaggctggatactgttcccaaggatcagttctctcctgccattaatccgccggaagttttagacaaacctggcagtcagcttgaaggtgtctccaactatgatgtaaaccaagctccagagactgaacggagtggaaacagaagagagagaaaaaaacaagaaagataaaaagctgaaacgtgacgaaaaactagataaaaaaatatgacccagagtatctagagaaaagctccgtaataagaaggaaaagaaagagttggccagaaagcagctagaaggtgaagagctacccctgaacagcggagagcagtgaacccttcaggttcacaggaagttttgccttcaaggccaccagctccagttctaagtgttgaaacacctgttcgaatctctgaaccccaggtatcaagcaaggaaacagctgtagatactgcacgtgcagcagccaaaccaaggataaagatcagagtcaagcccttggtaagaaaatctgaagggaattaaaaaagattgtagaattgtggccagtctgccatcatttgtaaggattactgtacagcaggaaaaatgcgggtttagttattttgtgaatggctgatgtatcctgtaaaaaaacattgctctgctctagtaatttctggggtaatcgaaatctgagttctagggtagtccatattttctgctgctgcatgttagttatgttctgtttcctgatcttagaaggtctctagtaaggaagatccttcaaaaaaacttatgtgtacaaattgaacactccagttagtccacagtggatatccttggttgttggctcacttgaagttcttcctgacagaatcacagaaatgacataaatgtctcacacatatgtttattccctgctttggcaaagcttcagaacactattgcatttttccacaatgcatacaggtgctgatcaatctttttttttctgtgaaaagtgcttagattggtgttgattttattagtatctcaataagcttatttttaattgatttctgaaatttgcatttcttttgcagctgttatgaagactatctttctgcaccatttcccttaggtttatacaagcacatttttcttccatctgaaatgacaatattaccagcaagcttaggagcctccacatgcatcctcagttctgatatcttgcatgatgagaaagttatatagatcaggtgcgtttgtttctcttattttactaccctgtcccctctgatctagaccaatgatttgacaccatactttttaatgagatccgaatgcgtggctgctatagcatgtgcttatcaattgtgcttattctttattaaactatttttcatatcagctgttgttttgaagccctcctttcactgagagcatttagtgtcagtaagcaatccatgaatgcataatttctgctccagtatttgtgttttaactaagttagattctggtttagatgcctatatgacactacattcttgttaagttgatcatttaattagtttggtacctccagcaaatactgtaaatatgtttatggaatatgttaaatacttctgtatgtttgcttgccttatattttgtattttttctgtatagggctttgtaaacctgtcatcctttggataggagtgcatgaaaatctgcaatccatgtgtctgaatcatgacctgctattacttttactttatcttcctaagcattaaccttgcttctttgtatccccttaactggtggcttgataacactttgtattatgcattaaccttgcttctttgtatccccttaattagtggctcttggtaatgctttgtacacctgcattacattatagtcaagtattatgtttcataccttgcagtctgcactaacttgtaaaatagttcagataattggcacaagaacgaaactggcttatgcccttgcaaagcaatggtttggaatatacacaagtgcagaggagtccagtgacggctaactgctcagtatgtgaatctgatgttagtggtgcaactgctttgagctcttctttgcgatgagcgacaaaactgggaactcaagcaatcggttcatatgggaaagttcgttcattgaaagctgagctgttttcaaatgttggagaagcagatgggaccagactcatttcggaaggtattttcatctttgatacggctattttctcatagttatttttttgcatattgcaagttgctgctggaaggtccccaacattatttggtgttccaaaggtcgtcacaccccctcttgtggtcaagtttcagatactaatcatccttttttttatctatatccatagttgaaaattctagatagtatctgggtaggagtaaagtacctattggctgttttttttgtacgcggttatttcttaattgaagattgctgataatatatctaactgcagcgaacgaaggaatgtggtcaaaattagggtgaagcttactagtggctccaagtcgtgcataaaatctagtaagatgtgacctatatttattgttagatgcattccatcttatcagtttatgcttggtaggagcaaaatggtttgatatgattagttatgaacatacatggtgaccttcatggaaataagctagtctgttcaagatagtttttttaggttaactagactgaatagttttgtagacctgtttgctggtctaatgctaaggcatgatatttctagggagctacagtgtactgctgattcaaggttggatgctcttcccaagaaccagttctctcctgccattaatctgccagaagctttagacaagcctggcagtcagcttgaaggtgtctccaccagctatgaaggaaaccaagctccagaatctgtgaacggagtggaaacgaaagagagaaagaaaaaagacaagaaagataaaaagcggaaacgtgatgaaaaacgattaaagaaagatgacccagagtatctagagaaaaagcgacttaagaaggagaagaaaatggagaaagagttggcaagaaagcagctagaaggtgaaggaagagctacccctgagcagccgaaaacagtgaaaccttcaggttcactggaagttttgcctgcaaggccaccagctccagtgctaagtgctgaaccagctgctgttcggagctctgaacctcaggtatcaagcaaggaaacaactgtagatactgcacgtacagcagccaaaccaaggataaagatcaaagtcaagcctttggtaagaaaacctgaagggaattaaaaaggatagtagaattgtgtccaggctgccaccatttgtaaggattactgtacagcaggaaaaaattggggtatgttgtaggttgtaccacgagtagccagtttttttcgtgaatggctgatgtatccggtaaaaaaaacattgctatgccctactaatttctggggtaatggaaatctgttctagggtaacaagtattgttcctcacgccaatgatcaaataaattttggcaactctagttggtcttcttcatctgcttgctggcacaaaggcatacaataacgtatttcttcgtcatcatgtgttctgcatattgcaagttgctgctggaaggtccccaacattatttggtgttccaaaggtcgtcacaccccctcttgtggtcaaggacatctgtagtgatcagcacactaaagctgattcctcgattcctcaaccatcaaagcctcaggaaccttccactagcactcctagtgtccgggaggtcttacctacctctggccccactaaagatgctgataatatatctaactgcagcgaacgaaggaatgtggtcaaaattagggtgaagcttactgcgtcttccagtaaagcatctgatgctgaccacagaggccattttcatggtggaagaaatgaaaatgaaccgggtccatgtagctcaatgtcagtggatgcccctatggttgggactgcaaatgaaccattaaatgtaagcaatcataacattgaggaacagaactcatgtcatgaccgtgaatcaaggatgtcggcaagcgttagcactgttaagctattggacaggcatgatatttctagggagctacagtgtactgctgattcaaggttggatgctcttcccaagaaccagttctctcctgccattaatctgccagaagctttagacaagcctggcagtcagcttgaaggtgtctccaccagctatgaaggaaaccaagctccagaatctgtgaacggagtggaaacgaaagagagaaagaaaaaagacaagaaagataaaaagcggaaacgtgacgaaaaacgagttaagaaagatgacccagagtatctagagaaaaagcgccttaagaaggagaagaaaatggagaaagagttggccagaaagcagctagaaggtgaaggaagagctacccctgagcagccgagaccagtgaacccttcaggttcactggaagttttgcctgcaaggccaccagctccagtgctaagtgctgaaccacctgctgttcggatctctgaaccccaggtatcaagcaaggaaacagctgtagatactgcacgtgcagcagccaaaccaaggataaagatcagagtcaagcccttggtaagaaaatctgaagggaattaaaaaagattgtagaattgtggccagtctgccatcatttgtaaggattactgtacagcaggaaaaatgcgggtttagttattttgtgaatggctgatgtatcctgtaaaaaaacattgctctgctctagtaatttctggggtaatcgaaatctgagttctagggtagtccatattttctgctgcagttgctttagtatctcagcgcttattatctcacaggttttaagtgtttgttcgatttgctgggcctaaaactaaaactgaaggatcgctgtgctcaatttgtagctgttgatgcattcatttcagatttgaggaggcttgacggaattgaatccctatcttatccaataaaacctcttatccaataaaatgagggttttagcccctctaatccccttcgggtgtgtgacttcccaactagtccttatagtttttgaagaaacagccaaaccaacccagccctaagtgaagggtccctgtgctcaatatgtagctgtttacgcggtccttttagatttttattaggcttgagcctgcgctt

SEQ ID NO: 2764 - DNA, 3133 bp, Zea mays
  Clone ID: ZEAMA-23APR03-CLUSTER464914_1
gaaattagttctcgtgttttcggccgtgcgctcgctggcgcaagccgcgcgaatcggatcgctgtccgcctctccatttcccctcgtccgcacacccgagcctcgcttccgcctcccacttcccaccaggccaccaccccgtccggcgatcccgatcgcgagacgagggtagcgagatcgagaggattgtcgcggctgccgggcggcgctccagttccaagtcgaggcgaggaactacacgtgtgatatctgcaactcatatggctgggacccacaagaagcgaatggaagaccgttttggtagttttttctcatttgatgaagattctgaaagtgaggacatatcgctggatgagttggaggaggaacttaaagagcacaagaactgtgatgtactagtaactattttaaccaatggtgaaaaacaacgaggcatggcaacattgattgagggcgacctaggccatactgaagaagctcttattcaagattatattgaggataatgacagccttgttctgttgcacgatcagattcatgactgtgacgttattttgtcacaaataggattaattcttagtgggtttcagacccatatatgttcgataagctcggaaatcagaagcctccaggagaaatcctgggatataagcttgaaattgaagaaccgcaaggtcaggacaagcctgcatagtgcataccatatgttaacatcaataatttcctgtattttcacaaattagcttacaggtaacattaattttcatagcaatttgattgatttttcctctactatattgcaagtgtaacatacagtgcacaatacacttatttattttagctttgttataattaaatgcgctgacatgaaagcttaaacatgctcagttggttgagacaaagcttgctgggtttgttgaagagatagttgctcctcctggtttggtaaatattcttgttaatggagaggtaaatgagggttatgccagaagtctggagatccttagcagaaagttgaaatttgttcaagtggatccgttgattaatgcatcaaaagctctgaatgatattaagcaagaattggaaaggcttcgacaaaaggcactatccaagatttccagccatattatggagattttctttgctatgagaaaccctgggactaatatacagatattgcaacaaaatttgcttcagaagcacaggtatctcgttctgtttcttaaagagcatggttccgagacatatggtgatttgtgtgcatcatatgttgatacaatgaacaaggtgctgagtacatactttcatgtgtatgtagaagcattggagaagttgaagctagaaattggtgtacccagtgattttaatggacatgataccagtatcatcgatattataataagaggaagggagcatttgagaaatcatggtttcatgttttcgttaggtgaacgtgcaaatattctaaggagattcatcaacctggcttggttccacatatatctcaaggcaactctcgtaaatacccatatgaagttattttcaggagccttcagaagcttctgatggacactgctagctctgagtatcttttcatggaatcattctttggagaagagtcactgttttatcaagtttttgaaggaccttttgctgttattgatcaacatttggatattactcttccaaattgtcatgatgctgtatgcctcatgctcataatctgcataactaggaagcaccaggtaagaaggtataaacacaatgtattaattgtgtaatcaacaaaagaaaatgtgttattgctgatcacacaaactgtaattacttcaaagttaatttcttaaaccacaagattatggatcatttctaaactatttttctttctattatagcacattttgcttgttagttcaccatattgtcctttttttgtttcagttggttatgtgcaacagacagctttcttgtcttgataactattttgataaggttcgttacgagctacaattttgtatgcgtgaaaaatcactctgccgtcaacttccacttgttctgttttttagtttcttatcttgattgtgagttgtgacactcatatctgctttaggctctgatgtatctctggccacgtttcaaggtagtatttgacatgtatattcaaagcttatatcagtgtgatgcgaaaacattatggatagatggtacccatccacaccatattgcaaggtgctacgtggagttcacagcatcccttgttcaacttaatgctgaatgcggagatggtcagcttgatatgaacttggaacgcttgcagtcagctatcgaattcctacttgttaggcttgcccaaacttttacaactaccaagctgcagcacctttttcttctaaataattatgacatggccatctctgtcctgaaggaaactggcgatgaagccaaaaaactgcaaaaatattttgaagagaagttagaaagtaacatgatggcttttgtggataatttgctgatggaacatttcagtgacttacttcggtttgtgaggagtcatgtctcggaagacctggtatcttacaccgagaacaccaatattgccgacgttgagccagttgtgaagaactttgccatgaagtggagaattgctctagagctcatgcacaacgaagtcataacttcttgtactaaccttttgtctgggatggcaattctaaaagcagctatgactcagttgcttaatgactataacaggctctcagagtgcgtcaaaaaaatcacagggggttcaactttgaacagacatatggtttccatcacatctatttcatatgaaatcaggaaatactcaagaacactctagctgcttataatggtgtcaaagaaattctgataaaaaggttaaacaaaaatatcaccatcgagatttttttgaacattccaaccaggcaaatgctggttgcatttttagtttgatttttgaaattaggtattgtaaatgggacagctcgaacatgttttaatttttgtttgtgactattattgctcatttttatatgctacaaggctttgttgttgttgtcgttgttgttggtcagtcagactatactcgacaacagtaatctgcattattttg

SEQ ID NO: 2765 - DNA, 2025 bp, Zea mays
  Clone ID: ZEAMA-23APR03-CLUSTER4656_1
tgcgcctttccggcgttgcccttgtttttttcccctctccaactcgaggggttttcgatccggggggcggttcccggcgagatttttgacccggcccggtgcttggttccattgatctccgtctgctactccttcctcctccttggttgccttgccttcccggtccctgatcggagcctgtcgccggcgggcgggcgggctgagtttactgcccgttactggggggacaaagagcagaaggaacagagagtaaaaaatccccggccttgatcggatcccacgtcggcgacaagtgcatcgttggaagctgcaaaagtttttttgcccccctttcctcagtggtggtggcacagctgccgtcgctggccacactcacgcagaagcggaggcaactcccgaggcgcccgccatgctgcgcaacagatcgagaagggcggttggtggtggtgccaaccaagcccaaggaaaaaaccaagcccaaggacgagcgggcggcctcatggccgagctccccgcggccgccgctccccagtcgccgaggcatccttcgtcgtcgtcctcctcctcctctcccgctgctgctcccgtgttcccttccccgaggccgttcgtggcgatggcggcgctgccccaggccgggctcctgctggacgggtcctccgaggggtcccggtcagctgtgagccccacctccatcctcgagaccaagcacttctgctgctctccgctcccgccgttcctgtcggagcggagcctccggagggcggcgcgcgtggacgcggccgcggccgcggccgcggagccggccggcgtcggcctcgccgacgtgctccgggaccacggggacgccaaggtcgccgggggcaaggtggtgctagggtcccagctcagagtccaggtcccgtccggcagggccgtcgagctgctctcctccccgatcgagttcggcgcgaagaacagggacgcgcagctggcggcgctgtcgcccgccaggaggctcctgccggaggtcgtgagctcgccgtccgcccgggtgttcgccgccggcggcgtggccgtcgtgccccccggggagatggccatgtcggaggactacacctgcgtcatctcgcgcggccccaacccgaggaccacgcacatcttcgacgactgcatcgttgagagctgcggggatttgctagccgacaagcccgcggccggcggcgcagcagctgctgactgtggcttcttcagctcttgccatgcatgcaacaagcaacttggacatggcaatgacatcttaatctatcgaggccataaagcgttctgcagcagcgagtgccggtaccaggagacgcttttggacgaagcggtggacggagaatttgcgctaggcgatggaggaaaaggaggagggcgttgttagtggaggagaagagaagccatgaggacgatcctgaacaaccaaccaccggcaccgagacgagatttctttctttctttctttcttcttcttcttcttttctttccttttcgttctgtctcctttgcgggatctgcgtgctgttttcggtcgtcgactcgatgaggagagtggtggtgatcttattagtcttttgcggattaaagaccttttttttttggcgcccgctttcgtaagaggctgaagattggtgacctgggcctgatcttgttcatgcaacttattttcccaaaaaaaaaaaaaaaaatgatgcgcttcgatgcttgtccatgtgactcgctcatccagtgtggaccctagcgtgaagtaaattgaaacaggggaaaaaatacttgtcctcacattatttccagtgattcatcagggtgctaaagaaggggtagggtctagtagtacagtatttccactatgatgattaggggctgttgagatgttagtatacctgtgtgtgtgtactggtggcctggtggggtggcttggagtttattaggagtgattggctgatttcctgtaactggatgtctggttgcagccctgggagtgtgcagctggaccgatgctat

SEQ ID NO: 2766 - DNA, 1476 bp, Zea mays
  Clone ID: ZEAMA-23APR03-CLUSTER466_5
accactcttcttcctctgctccgcctcttcacccagcgtcttccgattgctgacggatccctcttcgccgcggccgccgccgcggaccgaccgtgggagagaaggcgaggcgggagcgatggaggccgccgactacggcaagctcttcgtcggcggcatctcatgggagacgagcgaggaccgcctccgcgagtacttcggccgctttggcgaggtcaccgaggccgtcatcatgcgggatcgcagcacggggcgtgcccgtgggtttgggttcgtggtcttcgccgacgctgcggtcgccgagcgcgtcactatggacaaacacactatcgacggacgaatggtggaagcaaagaaggctgttcccagggacgaccacagtattgtgagcaagagcaacggcagcagcacagggtcacctggtccaggacgcaccaggaagatctttgttggaggcctgccctcgagtgtcacagaggctgacttcagaaggtatttcgagcagtttggcatcatcaccgatgtggtcgtgatgtacgaccacaacacgcagaggccgaggggctttgggttcatcacttacgattcagaagacgccgtggacaaagccctgcacaagagcttccatgagctcaatggtaagatggttgaggtcttccttctgctcatgggatgggcaacatttcaagccttgggtcagggaaccttgctcgtggagctggagataataacttcggtttgccttctggcagctatggaaggagcaactcaactggtacaattggcgagcctttttctgcagcaggcaatacatatgatgtaaacaatccagatacatatgggagcagctctatttatggtggcacagcctggaggttcacatcatctgaggttgacatgccttttggtcatgatattggaaattttgatccgacaatcaaatgagacatgtcggcaagtcacatgtgcaactatcctgttaacaacaatcagccaagcagaggtaccacttcctagggtgagtattactatatccacatatgacttggtgtagatgaaacacccattcagtcaggcatccgggtgcgcggccgtgaatcggtgattgtcagattaatatacaggttagttttgtctagctaaccagcgggtgtggtttgcgaacaccaacatgctagagatggagctgctagaggagaagcggatacagaaacactttgtggagggtttgtttttttggggtcatgttttagttttgattcttacgcgtgcgtgggtgaggccttttggtttttgaatgagatgtaattattgcggcacatatttagaagccatgttccaaccggggattacattttcgttttgtaatcccaaaaactgttttgttgaccaaagtttgactttatatttttaaattctaaactaaaaaaaaaaaaaaaaatccggaccggaccgaaaacggtaaattttaccgcc

SEQ ID NO: 2767 - DNA, 1081 bp, Zea mays
  Clone ID: ZEAMA-23APR03-CLUSTER467_51
acagcatctcaagtcttcacactcctcgccatcacataaaaccagtgcaagcagaagcagcgcaatggcgagcagcaccatggccctctcctccacagccttcgccggcaaggccgtgaacgtgccgtcgtctctcttcggcgaggcccgcgtgacgatgcgcaagacggcggcgaaggcaaagccggcggcgagctccggcagcccgtggtacggccccgaccgcgtgctctacctgggcccactgtccggcgagcccccgagctacctgacgggcgagttcccgggcgactacggctgggacaccgcggggctgtcggcggacccggagacgttcgccaagaaccgggagctggaggtcatccactcccgctgggccatgctgggcgcgttgggctgcgtgttcccggagctgctcgcccgcaacggcgtcaagttcggcgaggccgtgtggttcaaggccgggtcgcagatcttcagcgagggtgggctggactacctcggcaacccgagcctgatccacgcgcagagcatcctcgccatctgggcctgccaggtcgtgctcatgggcgccatcgaggggtaccgcgtcgccggcggcccgctcggagaggtcgtcgacccgctctaccccggcggcacgttcgacccgctcggcctcgccgacgaccctgaggccttcgcggacgtcaaggtgaaggagctcaagaacggccgcctcgccatgttctccatgttcgggttcttcgtccaggccatcgtcaccggcaagggcccgctcgagaacctcgccgaccacctcgccgaccccgtcaacaacaacgcatgggcctatgccaccaactttgtgcccggcaagtgagggggtggaggcgccaccgcccaccggccaccgctgcggatatctaggtgttcggatgcacgtgagcgcgcactggttccagtttgtaccatgatgtaaattacttaccgtaccagggttcaatcggcaaggaagaattgttgtgttcactgtcttgggcagtctcttggtccaatatgaatcaacttacacagaaaaaaaaaaaaaaaaaggccccta

SEQ ID NO: 2768 - DNA, 2266 bp, Zea mays
  Clone ID: ZEAMA-23APR03-CLUSTER467_68
gttgtgtgcgaccgacgacgcacagacgatcagagaggtctcctgccgccgtgccacggacgcgaccgacgcgtaaaagttacgctccgcctaggtcgcgcacgggcgccttgcatccgcgccccagtggcctcatttccaggaggcctggggcctgggcacggaacgtgcagcgggcctgtgctttatgccaaacacgaaagggttattaggccccgctcaatattggttttggtctaagagccaagcctggaacgcttggttgggctacgatcctttcggcccacgattgctgtgagatcatcgactgaaagcatgtgatggcggcaatgctttccgctgcttttctttaccgtcctcctagtagacactgacattttaaagactacgattctagtggttgtaataaacagcgacacgtgactgtcgactgtcgttatagccggcagtaaccgccatacagcttgtttcacttgtctcactgagtcactatcagcttctttcatccataaccaaagcaatttgttttctcaccattccttttaaaaaaaggtgaaataaacatgagtccgagtgagcactgagtcgcagaaatatcaaacctaggaccggagacgaggtgctacttcttcaaaatctgaactgtgccatcacaaaagaaagaaagaaagaaaaaagaagagaaatccacaccacagccaccgcaagatcccgggcgcccaatcacccttctccacggagattcctagcctcagccacagcccacatctgcctcatcgtctccctgaggctcccgtcgcgccacgtgttccagcatcccggacgcaccaatggcatccaagcatcagatttatttttattttctggcaacattcaagatagaacttgatcgcggcggtgtttcctccgtcgctttaaataccttcgtcgcctccacaagtccacagcatctcaagccaccatcgatcttcaagtctcgctacgtagcagtgcaataaaaaaagcagccgcaatggcgagcagcaccatggccctctcctccacggccttcgccggcaaggccgtgaacgtgccgtcgtcgtccgccttcggcgaggcccgcgtgacgatgcgcaagacggcggcgaaggccaagccagcggcggcgtccgggagcccgtggtacggccccgaccgcgtgctgtacctgggcccactgtccggcgagccgccgagctacctgacgggcgagttcccgggcgactacggctgggacaccgcggggctgtcggcggacccggagacgttcgccaagaaccgggagctggaggtgatccactcccgctgggccatgctgggcgcgctcggctgcgtcttcccggagctgctcgcccgcaacggcgtcaagttcggcgaggccgttgggttcaaggccggctcccagatcttcagcgagggtggactggactacctcgggaacccgagcctcatccacgcgcagagcatcctcgccatctgggcctgccaggtcgtgctcatgggcgccgtcgagggctaccgcatcgccggcggcccgctcggcgaggtcgtcgacccgctctatcccggcggcagcttcgacccgctgggcctcgccgacgaccccgaggccttcgctgagctcaaggtgaaggagctcaagaacggccgcctcgccatgttctccatgttcggattcttcgtccaggccatcgtcaccgggaagggcccgctcgagaacctcgctgaccacattgccgaccccgtcaacaacaacgcttgggcctacgccaccaacttcgtccccggcaagtgagggaggcgccgccggtgacctttaggtgtccggatgcatgtgagcgcacgctggttttcggtttgtaccatgatgtaaactattgttcaatcaacaaggaataattgtgttcattgtcattatttttcccctctctttttcgttcctgccgattttatctaaatcaggtgtttgataaacggcatgattggtttcctgcttggccgtgtccagtctcaccaccagtgttgaccgtgtgcatgcacatgattggtgacctacactggctgagcgtagtctgaatgtacgagcacaacctagtcattttaccaccgcttccacatgcacgcgcagaaacgctagaaggaacgttcgctggttacccagaccggcggtaaccaatcacgcgaaaaaagagtagccgaattttacatattagagttcacacatcctagattaagcaccaagaattcg

SEQ ID NO: 2769 - DNA, 1140 bp, Zea mays
  Clone ID: ZEAMA-23APR03-CLUSTER47235_1
ttttttttttttttttgaaaaccagtaatgacagttgtactgaacaatcagagctcatctgcaggttctcaaagaggatatcgttctaataaaatcaacagctgtaagctactgaacaaacgaccaaaattttgctcaaccaaagaacggcaatgcccactgctatctggttgttctccgacttctgcggcgacattcaaagcagtccgagcatggatagtaggccttcactccatttttatgacctatttgtaatttggttggtgaaatcttaagttcctctatcagaatctgacgcagattttcgttttcctcctgcagttcctcaataaccttttggtgcttcagtaccaactgaagtacactatccattccatgcaaatttccaggggcatctctgaagtccacctttgtatcattctggaacagtggatcctgtagaaaattggcaatgacctttttggttcgacttacagtcaatgcttccggctgagtagattgcacttttgacatttcataacttgaagtttggttcaaattactttctgcatccttagcctctagatccatcgacatgctgttgtgagtttgttcattgctagacaaagaatgaaccataggatttgacgaagacggcgtctcaggggtatcttttagctttgatgtccatttagacataatttcctaggggggaaacccaacagatgactgaattccatgaagcacccgtggctttaatgcaattcctattccaaaaccatggcctataccaactccacagccaatccctgcttcgatgttctttaatccagccgtccttagcgcggaattgacatgccttgtgacaccagaaaaagcatctgttgctccccttgtagcactcataacttgctgaagcccaggtatcatacctaggtagatgggtcgtccgacgccgatgccgacgccgcatcctacgccgaaacctgtgaatacctgcagcaccttcacgctgaagggattctccatccggaacgcaggcggcggaagcctttgctcccgggggctcgacaacgagcgacggacgccggcgacaggagtgccggaggaggggaggtcacggatcactacttgtttaatccgggctggacagcttgatcc

SEQ ID NO: 2770 - DNA, 2731 bp, Zea mays
  unsure (1)..(2731): unsure at all n locations
  Clone ID: ZEAMA-23APR03-CLUSTER47319_1
ttttttttttttttttggaacaataacagagaaccatcgtacaaatattgtctgtgttacagtttgacttgccacgaaaacttacagcttacaagcaaatttacacgcgataaaaagctcgatcgaggaagaaaataaaggcagagggagcaacatacaaccagccccgtgcataccgatcgcaccagcaggacgaggaaccgctcacctcctcttgtttctgctcccgagcagcagcgaaatgtagaagaggatgcggaagaggaacccccaggcgacggtgatccagaggcagtcccacttggtgaggtccgtcacggcctgctgcgccaggaagtccggccccgtcgtgatgcacgtggccgtgccgatgtccacgcccagcgactggctcatggcgcgcagcacccgcaccttgagcaccgccggcagcaccgccagcggcgtgttgtcgaacatctgcacgccccgcacgaagcaccgcgtcgggtcgctgaactcgttctgcatcactgcctcgtacggatacttcaccagcgacaggtagtggaaccagagccagtagcgcgggatgcggtcccggttgatgaagaagccgctgaacaggaggaagtaggccagcgtcgacaccaccacggggaagcccagcatcacgttcgtcaccacgccggagaggaacgtcgcgaacccggaccccgcccagaaggaggccagcacgatggccacgaagaagaagaacccgtcggcgccgccggccaggcccacggcgaagaacgtcgtgagcgcgaacgcgaaggagagcacgatcagcgacgggaagccgacgatggtgtgggagagcacgtacgaggacctccggtacgcgttgtaggccgtctccctgaggaagatgtagcgctcgttgaggaacacgggcagcgagtcggagcaggtgtagaacatggtggacatggcgatggcgaagaagcccaggcgctcctggactcccttgggggagtcgtccaggcgccagaagatggtcgccaggatgaaccccgtcaccatcacggccgctaggcggatgatgaagatcctccggcgtgcgcttcgtgttgaggaacgcgcgccgggtgagcacgcccatctccacccagaacgggttcgcgaacttggacaccgcggctgcgggcgccgactccccggccgagtgcaccgacacggatccgtcggtcgcgccggacacgagcttcccgcgggagatgctggcgctgatggcctccttcagggacagcgacggcttctcgccgtgcccgtcgtggtgcttcgccttgggggccgtgcgcatctgccatttcttgttgtgctccacgaggtccgtggccccgtccggcatggtctccagctccctgatgaggtcgagcgcgaactccgtcgggttctcgttgccagggatgggcttgccgaagtcgttgaagaaggacggcagcgcgcctggcgggccgtagtacaccgtctggccgcgggagaggaacaggaggcggtcgaggaggccgaggatgcggtagctcggctggtggatggacatgaccaccacgctgccgctctgcgcgatgcgctgcagcaccttgaccaccatgaacgcgctggtggagtcgagcccggaggtgggctcgtcaaggaacaggacgattgggtcgtggatgatgtccacgccgatggacacccggcggcgctccccgccggacacgccacggtggccctcgtcgccgatgatggtgttggccgcgttgcgcaggcccagctggtcgatgagcgcctgcacgcgcttcttcttctccttggttggcagagagcggggcaagcggaactcggcggcgaacatgagcgtctcctccacggtgagcatcgggtacaggaggtcgtcctgcatgacgtacgcggagatgaccttgagcaggttgctgtcgagcgactcgccgttgagcgtgacggagccgcggaggctctccttgacgatgcggttggcgagcgcgtcgatgagcgtgctcttgccggagccgctggcgccgagcaccgccatgatctcgccctcccttgcctcgccggagatgttgtccagcagcgttttcatccgggacacctcgggctcggccggctccccggccccgcggcggaacggcagcaccggcaggcacggtcccctcttccgctgcttgacgctgtacgtgaggtccgtgaacttgagcacgaacggcaggagcggcccgtcgccgccgccgccgcctatgcgctcgctcaggtcgctgccggtggaccccggcacggagccgcccagctcgatggtgtagtgcgagtgcgtgggcgaggacgtgggcgacgaggcgtcgctgcgcgcctcgttgacgcgcttcagcagctgcgcgagcgtgaacgacgactgcttcgccggcggcgacggctgcggctgcatgagcaggccgctgtggtgcggctggtggtggtgcatgtgcaggaggccgctccgcggaatgtccccggcctcctccatcagcgacgacctccggtcaaagaatggcagcttgtcgacgaaccgcgacatcgccgcgcccaactcacgtacgtgctcctccaccttctcctcgccgccggccggcaccccacctctctgcctgccgcggcgagcgagatatagagatgcgggctctcgatcgggcgttggcttggacttcgattacgatgtccgaggtaatgn

SEQ ID NO: 2771 - DNA, 1448 bp, Zea mays
  Clone ID: ZEAMA-23APR03-CLUSTER4781_2
aaaaatttaaccgcagaggccaacagcacaacgagcgcaccactccccaagaaatggagctgacccaactcctcctcctcaccggcaccgcctcccgagctcctgctccgcgcgcgtagccgcgccgcagttcccagtaataacacgcccgcaagctccgcagtccgctccctgcgcgaggttacgtacattgcctttgcgtaccatgtggcgcttcggtttggtgttgctgtgcctgtgcatggagatctacttgtgtcaccgacaccgagccgacccgatgatgtcttgtgggtgttgtttgagccatgaagatggcgacgatgactgcttacaagtatcaagctcaggcgttgatgagggactacttgctagctgatctactcgttccgtacacctctgtgctctttggcattgtcctctgcaaggcttatgatttcactcgaatactgagctccttttatttcaaggggtatactttattgacaaaaatacagcgcatcgaatggaacaataggggtatgtccagcgcacatgcaatttttatcacggctgtatcattatatattgtcacgtcgactgatcttttctccgattgtgtcaaggggcctattacattccgtaattcgataatatccacttctgcattgggggtttctgttggctacttcatcactgatcttgaaatgatcttctggctgtatccttcccttggtggaatggaatatgtcctccaccatactctttctctggttgcaatagcttacacaatgttgtctggggaagggcagttttacacatacatggttctcatttcagagacaaccacccctgaaatcaacttgcgatggtttcttgacactgctggactgaagaaatcaagtgcttacttggttaatggaattctgatgtttgttgcatggctggtggcaaggatatttttgttcatgtatgtattttaccacatttatttgcattacagtcagataatgcagatgcatgcctttgggtactacctgacgtttgttgtgccatcggtgctctttgtaatgaacacaatgtggttcatgaagatcttaaaaggcgtgatgaaaacactggcaaaatggtcatgatggatgatgccaagaggatcccagaactatcaacaggatttggtctttctggcatcattgatctgtaaagttatggatatcagggtaactagagaaagttaatatgtaaagtattagcaaacaagctagattaggtgaaattgccctattttcagcagtgctggaagttcataaccagtttggtttgtaccggagatccagcacgctgttctgcttacccccaatgccatgtgtatatctggagcattttgcttaccccaatgccatgtgtatatttggagcattttaatggatggtttgttcaacacgaaaaaaaaaaaaaaaaaagcggcc

SEQ ID NO: 2772 - DNA, 988 bp, Zea mays
  Clone ID: ZEAMA-23APR03-CLUSTER4787_3
agcaaattcatcactagactagatcattccgatgccatagaatgtactaactttccatcttaccttgtgcgcctacaacatgccggaagataccattatctgatcaagtgtccgctgacaccacccccagacctgaatttatatttatgaaccgtgtttgttgttctgcagtctgtgttaatatatctatccttcggtgtcagaggttcaaggatgcatgaacgttcttattgaagcaaactgatatattcaattattctttggatgtgcataggttgatggaatggggtttgctcccggtggatgtggctagaaaatgttttgagaagaaacaaggtcagaaggttaagtcaccagtcaaagcaattgtggcgaagagaattccttcttctccagccaagacactgccttcatctgcaaagaagttagttatgccttcaaacagtgctggaaagctgaagtctcagaagaaaaggaaggcaagtgatgacacagatgatgacgacgacgacgatgattttgtagcttctaaagcaaagaccaagaggcacaaggcctagttaggtcctagcatctcattatcctagtaatgagacgtgttcttcagacaatttctagctcgggatgaccttggatgattgttccttccattggtttgctcatttggggcgcgcacaactaaattctgtgaagtagcgtgttgtgttgtgtcaagaagttcctgcaaactttcacttggttagcatttgactccagtgaaacatctgattggatgactgtatttgcagggaaaatatcctatgcaatcacttatcctaaaaaagggcctgtatttgcccggggtaacatatttcgccgacctcgaggtaggggcatccccaagcaaaacagaatttaaaataactattaggtcgccgtcgatgatatgtaattctgaaacgcttgaacgctttattccaaacttgtatgtcaatcgggttagcagagc

SEQ ID NO: 2773 - DNA, 1011 bp, Zea mays
  Clone ID: ZEAMA-23APR03-CLUSTER478_3
agttccaaccccagctcctcagttctcgtcatcgtcctcgcgctcagtgtcatttgcagttcccggtagcagccatggcgtcggtgcagctgtctgggccgcgggtggtggcggctgcgaaaccggctgcgttgggcgggctcctcctgacgccgtcccttgcggtgccaaaggggcggagggccaggggcctcgtggtgagggccgccacggtcgtgtcacctaagtatcagttcagacaagaccacaaggaggggagattgttgcggttggagaagggagaagttttggaagtaaccgcattgagatcagtgttccggttggtgcacaagttgtctactcgaaatatgcaggcacagaattgaaattcaatgacgccgacccatctcattttgaaagaagatgacataattggtattcttgacagtgatgatgtgaaggatatgaaaccactgaatgatcgcattctgattaaggtttgctgaagctgaagaacaaactgctggtggtttgctattgacgcaggcaactaaggagaaaccttctgttggatcagtggtagccgttggcccagggccgttggccgaggacggcagcaggaatcccctgtcgatcactcctggaagcaacgtgatgtattccaagtatgcggggagtgagttcaagggcgaggacggtgagtacatcgtgctcagggcgtctgacgtgatggctgttctttcctgatccccaaaccatacagcgccaggtgtgcgataggaagttttgatgttgaggccgagccttatcttttatttgctcttgtttggaattggtggaggcttttgaactgtaatctggtgcgaattataaggaaaataagccgagttgtgtagacttgagacaggactgtgctatgctgtttggctggtaggtgagctgaccagtgttcagctggtgggtgaattaattaatgtgtgcataagtttgttgtgactaaaaaaaaaagaaaaaaaaaaaaaaaaagcggcc

SEQ ID NO: 2774 - DNA, 1629 bp, Zea mays
  Clone ID: ZEAMA-23APR03-CLUSTER47978_2
agggacggagcagttggtcgcccgccattggtccgccgatatctatttttcctctctctccttttctctgcttcagttcccgtccacgagcaggtgtagtagcttctagtagctagcaagtcggccagcacgctcgctcgcagcagtcgctagccagacagcattggcgccggcccgctcgcacgcgcgctatggaggaggcgaggcaaaggcggcggctgtgcctgtgcctggtggtggcggccgggagctgggcgctgctggcggcggtggcgcggtgcgacccgcaggtgccgtgctacttcatcttcggcgactcgctggtggacaacggcaacaacaactacatcgtgtcgctggcgcgcgccaactacccgccctacggcatcgacttcgccgccggcccgtcggggcgcttcaccaacggactcaccaccgtcgatgtcatcgctcaacttctgggtttcgacaacttcatcccgccgttcgccgcaacgagcgcagaccagctcctgggcggcgccaacttcgcctccgcggccgccggcatccgcgccgaaaccggccagcagctgggcgggcggatcccgttcgcggggcaggtgcagaactaccagacggcggtgcagacgctggtgagcatcctgggcgaccaggacacggcgtcggaccacctgagccggtgcatcttcagcgtgggcatgggcagcaacgactacctcaacaactacttcatgccggccttctacaacacgggcagccggtacaccccggagcagttcgccgactcgctcatcgccgactaccgccgccacctgcgggtgctgtacaactacggcgcgcgcaaggtggtgatgatcggggtcggccaggtcgggtgcagccccaacgagctggcccgctacagcgccgacggcgtcacctgcgtcgaccgcatcgacgacgccatccagatgttcaaccgccgcctcgtcggcctcgtcgacgagttcaacgcgctcccaggcgcgcacttcaccttcatcaacgcctacaacatcttcgacgacatcctcgccaacgccgcctcctacgggttcacggtgaccaacgccgggtgctgcggggtcggcaggaacaacgggcaggtgacgtgcctgccgtaccaggcgccgtgcgccaacagggaccagcacatcttctgggacgccttccacccgtcggaggcggccaacatcatcgtcggccgccggtcctaccgcgccgagtcgcccaacgacgtctacccgatggacatcagcacgctcgcctccatctgattctgattctcatccctccataaatataaacataaaaatatatgatataatccacccaccactgcgcaaaggctgcaatattaaacagggctccaagaggaggtagccgtgcaattctttcctgtgtacaagctcgcgccttatctgtaatttttcatgctttcatacatttgcatcgggtacttagaaaatatccgatcgaatcacttttttttttcgttttcaattctcatgcacacctgaattccgcgaaagattccacaagtacacccccataaaaaaaaaaaaaaaaaaaaaaaaaaaaaaagtactctgcgttgttaccactgct

SEQ ID NO: 2775 - DNA, 2114 bp, Zea mays
  Clone ID: ZEAMA-23APR03-CLUSTER483_102
ccggtgtgggcgtttttattataacaacagggcgcccccacggtgttctccctggagaaaaggggcactggggcgcacacccaataaatggggggttgccccccccttagggcccccccgggttttcccctttttttttccgggttgtatttttgggggggatttgtgacgggtaaaaaatttcccccccggaacccggttgggcccgggtttcccccagctggaaattaaccctcccttaaagggacaaaaaactggagcttccccgcggggggcgccgctttagaaatagtggattccccggggtgcaggaatttggcacgagggagatagagagagagagctccattgttcccccccccccccctttccttgcttcatttttcgtcaccctagccgctttactctcttgcgatatctctgagatttgtttgacagtctctaaccatgggtaaagagaagtttcacatcaacattgtggtcattggccacgtcgattctggaaagtcgaccaccactggacacttgatctacaagttgggtggtattgacaagcgtgtcattgagaggttcgagaaggaggctgctgagatgaacaagaggtccttcaagtacgcatgggttttggacaaacttaaggctgagcgtgagcgtggtatcaccattgacattgctctctggaagttcgagaccaccaagtactactgcactgtcattgatgctcctggccatcgtgatttcatcaagaacatgatcactggtacctcccaggctgattgtgctgtccttatcatcgactccaccactggtggttttgaggctggtatctccaaggatggtcagacccgtgagcacgctctccttgctttcacccttggtgtcaaacagatgatctgctgttgtaacaagatggatgccactacccccaagtactccaaggccaggtacgatgaaattatcaaggaggtgtcttcctacttgaagaaggttggttacaaccccgacaaaatcccatttgtgcccatctctggattcgagggtgacaacatgattgagaggtccaccaacctagactggtacaggggaccaactcttcttgaggctcttgaccagatcaacgagcccaagaggccatcagacaagccccttcgtctcccacttcaggatgtctacaagattggtggtattggaacggtgccagtgggacgtgttgagactggtatgatcaagcctggtatggttgtgacctttgctcccacagggttgaccactgaggttaagtctgttgagatgcaccacgagtctcttcttgaggcacttccaggtgcacaacgttgggttcaatgttaagaatgttgctgtcaaggatcttaagagagggtacgtcgcatccaactccaaggatgaccctgccaagggtgctgctaacttcacctcccaggtcatcatcatgaaccaccctggtcagattggtaacgggttacgccccagtcctggattgccacacctctcacattgcagtcaagttctctgagatcttgaccaagattgacaggcgttctggtaaggagattgagaaggagcccaagttcttgaagaatggtgatgctggtatggtgaagatgactccaaccaagcccatggttgtggagaccttctctgagtacccaccacttggacgtttcgctgtgagggacatgaggcagactgttgcagtcggtgttatcaagagtgttgacaagaaggacccaaccggagccaaggttaccaaggctgccgtcaagaagggtgcgaagtgaaccatcctcaaaactctatctgccgcaggtgaatcaaaggacagtgttagttttattacaatagtttggtatttggtcgcgtgtctgtgttcttgtttcgttttctccccgtcagagcgttgttctcgtaattgggttcttgatcggaggtggcggatctacacacacattcttcctgttttttgctttttatttgttttctcattttgaactgtttaaaatttctgttatatgaatgaatgttttccctgcggttattatcttctttactccaaaaaaaaaaaaaaaaaaactcgagggggggcccggtaccca

SEQ ID NO: 2776 - DNA, 1619 bp, Zea mays
  Clone ID: ZEAMA-23APR03-CLUSTER483_53
cgcctcgccgtctgccttctgcgcctccatttcggcctctgtcccttgcaagttcaatctcacctccaaccatgggtaaagagaagtcccacatcaacattgtggttattggccatgtcgactctggcaagtcgaccaccacaggacaccttatctacaagcttggaggcattgacaagcgtgtgatcgagaggttcgagaaggaggctgctgaaatgaacaagcggtccttcaagtacgcgtgggtgctcgacaagctcaaggctgagcgtgagagaggtatcaccattgatatcgctctgtggaagtttgagaccaccaagtactactgcacggtcattgatgcccctggacaccgtgacttcatcaagaacatgatcactggtacctcccaggctgactgtgctgtccttatcattgactccaccactggtggttttgaggctggtatctccaaggatggccagacccgtgaacatgctctccttgcgttcacacttggagtgaagcagatgatttgctgctgcaacaagatggatgcaaccactcccaaatactccaaggcacgttatgaagagattgtgaaggaagtctcatcctacctcaagaaagttgggtacaaccctgataagattgcctttgttcccatttctggttttgagggcgacaacatgattgagaggtccaccaaccttgactggtacaaaggcccaaccctgcttgaggctcttgaccagatcaccgagcccaagaggccttcagacaagcccctgcgtctagccctccaggatgtgtacaagattggtggtattggaactgtaccggttggtcgtgtggagactggtgtcatcaagcctggtatggtagtcacctttggtccaactggcctgactaccgaggtgaagtctgttgagatgcaccacgaggcacttcaggaggctcttccgggtgacaatgttggcttcaacgtgaagaatgttgctgtcaaggatctcaagcgtgggtttgtggcctccaactccaaggatgaccctgccaaggaggctgccagcttcacctcccaggtcatcatcatgaaccaccctgggcagattggcaacggctatgcccctgtgctggactgccacacctcccacattgctgtcaagtttgctgagctcattaccaagatcgacaggcggtctggcaaggagcttgagaaggagccaaagttcctgaagaacggtgatgctggtatggtgaagatgataccgaccaagcccatggtggtggagacattctcagcgtatcctccccttggtaggtttgctgtccgtgacatgagacagacggttgctgttggagttatcaagagtgtggagaagaaggacccgaccggcgccaaggtgaccaaggcggctgccaagaagaaatgatgcgatcctgcgcctgctttagcaatacctagttttcatcatcacaagttttgtttgtgatcgttgctgttatcgtgtgaactgttgagatctgttagcatgtgcacttttatctatttatttggtaccatcttgctatttcaccttttgcaatacaagaatgctctaagagctatatgttaaaaaaaaaaaaaaaaagcggcc

SEQ ID NO: 2777 - DNA, 1623 bp, Zea mays
  Clone ID: ZEAMA-23APR03-CLUSTER483_72
tgccttctgcgccctccatttcggcctctgtcccttgcaagttcaatctcacctccaaccatgggtaaagagaagtcccacatcaacattgtggttattggccacgttgactctggcaagtcgaccaccacaggacacctgatctacaagcttggaggcattgacaagcgtgtgatcgagaggttcgagaaggaggctgctgaaatgaacaagcggtccttcaagtacgcatgggtgctcgacaagctcaaggctgagcgtgagagaggtatcaccattgatatcgctctgtggaagtttgagaccaccaagtactactgcacggtcattgatgcccctggacaccgtgacttcatcaagaacatgatcactggtacctcccaggctgactgtgctgtccttatcattgactccaccactggtggttttgaggctggtatctccaaggatggccagacccgtgaacatgctctccttgcgttcacccttggtgtgaagcagatgatttgctgctgcaacaagatggatgcaaccactcccaaatactccaaggcacgttatgatgagattgtgaaggaagtctcatcctacctcaagaaagttgggtacaaccctgataagattgccttcgttcccatttctggttttgagggcgacaacatgattgagaggtccaccaaccttgactggtacaaaggcccaaccctgcttgaggctcttgaccagatcaccgagcccaagaggccttcagacaagcccctgcgtctagccctccaggatgtgtacaagattggtggtattggaactgtaccggttggtcgtgtggagactggtgtcatcaagcctggtatggtagtcacctttggtccaactggcctgactactgaggtgaagtctgttgagatgcaccatgaggcgcttcaggaggctcttccgggcgacaatgttggcttcaacgtgaagaacgttgctgtcaaggatctcaagcgtgggttcgtggcctccaactccaaggatgaccctgccaaggaggctgccagcttcacctcccaggtcatcatcatgaaccaccctgggcagattggcaacggctatgccccagtgctggactgccacacctcccacatcgccgtcaagtttgctgagctcattaccaagatcgacaggcgatctggcaaggagctcgagaaggagcccaagttcctgaagaacggtgatgctggtatggtgaagatgattcccaccaagcctatggtggtggagacattctccgcgtatcctcccctgggtaggtttgccgtccgcgacatgaggcagacggttgctgttggagtcatcaagagtgtggagaagaaggacccaaccggcgccaaggtgaccaaggcggccgccaagaagaaatgatcgatccgtgtctgctttgcagtgcctggataacttgccactaaagttgtgtatgcggttgttgctgttattgcgtggactgtttgctgcggtgtctcctgtttgtttgggtagcgcagcgtctggcctcttcaggtgtctgttgtctgttgtctttactatcagtaatgctcctgagacttctatttgtccttttggcgccgctaaatggaattttcg

SEQ ID NO: 2778 - DNA, 1787 bp, Zea mays
  Clone ID: ZEAMA-23APR03-CLUSTER483_75
aaggtatcaccacgttcactgtcgctcgacctctgttcttgagctgcttcatgcgatagcgactggaccaaagttgtactctgctgcctccccgtgcctttagtgattcggtcctcgggtttgcgtgcaatttttaatcttcgcctccagccatgggtaaggagaagtctcacatcaacattgtggttattggccacgtcgactctggcaagtcgacaaccaccggccacctgatctacaagcttggaggcattgacaagcgtgtgatcgagaggtttgagaaggaggccgctgaaatgaacaagcggtcctttaagtatgcttgggtgcttgacaagctcaaggctgagcgtgagaggggtatcaccattgatattgctctgtggaagtttgagaccaccaagtactattgcaccgttattgatgcccctggacaccgtgactttatcaagaacatgatcactggtacctcccaggctgactgtgctgtccttatcattgactccaccactggtggttttgaggctggtatctccaaggatggccagacacgtgagcatgctctccttgcgttcacacttggagtgaagcagatgatttgctgctgcaacaagatggatgcaaccactcccaaatactccaaggcacgttatgatgagattgtgaaggaagtctcatcttacctcaagaaagttgggtacaaccctgataagatagcatttgttcccatctctggttttgagggtgacaacatgattgagaggtccaccaaccttgactggtacaaaggcccaaccctgcttgaggctcttgaccagatcaccgagcccaagagaccctcggacaagcccctgcgtctccccctccaggatgtgtacaagattggtggtattggaactgtgccagttggtcgtgtggagactggtgtcatcaagcctggtatggttgtcacctttggtccaactggcctgactactgaggtgaagtctgttgagatgcaccatgaggctcttcaggaggcccttcctggtgacaatgttggcttcaacgtgaagaacgtcgctgtgaaggatatcaagcgtggttatgtggcctccaactccaaggatgaccctgccaaggaggctgccagcttcacctcccaggtcatcatcatgaaccaccctgggcagatcggtaacggttatgccccagtgctggactgccacacctcccatattgctgtcaagtttgctgagctcattaccaagatcgacaggcgttctggcaaggagcttgagaaagagcccaagttcttgaagaacggtgatgctggtatggtgaagatgattcccaccaagcccatggtggtggagacattctcgcagtatcctcccctgggtaggtttgctgtccgtgacatgagacagacggttgctgttggagtcatcaagagtgtggagaagaaggacccgaccggtgccaaggtgaccaaggctgctgccaagaagaaatgatgcgacctgtcgttgatgcagcgtctgcttttccaatacgtagctgagatgttccattttgacataagttttgtatgctgtggttgctgtttaccttgtgaactgttgagctctactattgggtgtccgtttatctgtttatgtagcatcttgttatttcacctattgcaatacaagaatgctatatgacatatatgttagacatttgggcaatgttaaatggatttttactaagtcgtgtagttagatttaaaaaaaaaaaaaaaaaaaaaaaaaaaaaaaaaagcggcc

SEQ ID NO: 2779 - DNA, 981 bp, Zea mays
  Clone ID: ZEAMA-23APR03-CLUSTER4844_14
ggacaataatcgtcgtgtgttttgacatggacatggataaacaaacaaacacgcccttctgcaaaacgaggactgacaaatcagttcaaatgtttcgaataagcatgtgaagttgtagtgtagttgcaaacccaggcttgcactatcaccaaaaaacaaaacaaaaaaaactatctcggaacctgtcacacaccaaaactataaaaacacgggtttcagaacttgtcacacaccaaaactataaaaaaacacgggacatcaatcaagacacacaacgctctttgcttcgctgtagaaatgcgctgcggtaggtcgtcgaaagctctcgagctcaaggaagggcccccctgcagtatgttatagatagaatctctgggcgcgagcaaacaatatgggtccatgtgctcctcggctcctcctcagcgttaagactgcttcgttgcgtcatcaattgcgccaaaactctctggcggccaaacccggcaaaagatcttccctgtaatcagcccataaggcacagctccaaattgcctcgaatcgttagaagcaaagatattgtcaccctgcacccagacatgatcttgcggtaccacgacggttctggaggagtcgcttttgccggggtcgacaaggtaggtgacggagtccccctgcatcccgacgacgcgcttgacgaccgacttgcgcgggtcctcgggggagatcatcagcacgatgtcccccggcgcgacccggccgagcctcacgctgaccctgtccaccgccaccgcgtcgcccgccaggttcagggacggcagcatgctggcgccccgcactaaggtcaccgagcagaggtggtcgttgacgacgtggatcaagcagtaggccttcgccaccaggaacacgcgggagaggccttgcctcgcgatgctccgccacgggatgccccgcgagacgctgagcgaagcccggcatggcggcggcggcggatggcgagggaac

SEQ ID NO: 2780 - DNA, 1037 bp, Zea mays
  unsure (1)..(1037): unsure at all n locations
  Clone ID: ZEAMA-23APR03-CLUSTER48655_2
gcacgagaccattacctagaacatcctaatcgaaaaagttcatccacgacgcaccgaccagcaatggccacgttcctgggaagctcaccggcgctcctcgcccgtcccatcgccaagccccacatctcctgcgcgcagacaccgcgcccgccaagcgcccagaaccagccgccgtccagcgagcaaccgcaagcacaaacacagcagcagtccgtgcaagcgcagccacagcaggcggcggcgaggccgaagcgcgcgggcggcgcggactccacggactgggtggcctcgtcgctgacgcggcggttcgggatcggcgcggggctggcgtgggccggctttctggccgtcggcgtcgtgtccgagcagctcaagacccgcttcgaggtcgcgcagcagcaggccaacaccaaggacgtggaacaggagcaggaggtcgtcctgcccaacggggtccggtactacgagatgcgcgtcggcggcggcgacgtcccgcggctcgggcgacctggtggtgatcgacctgcagggccggntngcgggcagtggcggcggcggggaggcgttcgtggacacgttcggcgacggcaagcggccgctggcgctggtgatgggctcccggccgtacaccaggggcatgtgcgagggcgtcgagtacgcgctgcgctccatgagggccggcggcaagcggcgggtggtcgtcccgccgggcctcgggttcggcgacgacggcgccgacttcggggaggagcacgtccaggtcccgcccggcgcgacgctcgagtacatcgtgcaggtcgacagggtgtccatcgcgccggcgtgaggcggcagtagatagatcgcagtcctgtggtgttctgatctttattccatggctcggctcggttcttctgtactggcagtctgacactcggtagcgtgaccacaattgttctagacccatgggacaagttcattctcgttttttcaagcaagatctcccaaaagagcagagagatttctggagcttgcaaaccaagctcgttttgagcttc

SEQ ID NO: 2781 - DNA, 927 bp, Zea mays
  unsure (1)..(927): unsure at all n locations
  Clone ID: ZEAMA-23APR03-CLUSTER487612_1
acttcagcacacatcacacagaggtagtgcctacccgcacggccgcacggcagttcgtcaccgtggtggcgtatccgccacaagcccacaggcccactgctgccgtctcgcctcagggctcaggctgcaggctgacgacgccaacgccgcccctcccggccttggcccaagccgtcacctcctcgcccctcgcccacggctgcagccacattgtcgccggcttgtcaacacgcccgtgtagatcggccgccgcatcgcgctacgccgccgtttcgatcccccgccagggcagcaggcaggaatctggcgatgaagagcaagaaaagtgtgcacggatcatcatgcaagaaggctaagttgtttgacggcctaattggtaaacatggttctgaaatagatccatgttataaactttttcttgaacatttaagcaaagatcggaatacctatgtccttgatgtaccaaagggtgaccacggcttgcctttttctgtacgttatgaggaggactatacgtcctatggaaatactaagtgcagaagtagtccaaattttcccaaccattcacggcgcacaagttggggcattccagatggcaaacagcctgatgtaaaagctatcaaggctgccagcagaaatatgtgttgctccttttcaccaaagagatcatatgtgaagaagaccacgacctcattagtagatgaaccttatgagttatttctgagccttgtgaagttcaaggatggtttcatggttattgaaccagaaccaggtgtcaccattgtatatgagcgagaagaagatatgccagctggctatgatgactggagaactggcagttccacaaatgaactgtctttggtgtctncacttgaaacacgnagggagactcaccatgcaaagatatgattatggccttgcacagct

SEQ ID NO: 2782 - DNA, 1013 bp, Zea mays
  unsure (1)..(1013): unsure at all n locations
  Clone ID: ZEAMA-23APR03-CLUSTER4883_1
ccacatttgatgatttcagnctgaacaccgaatccacagcgcattctnttaaacaaagccctaaacaacacaatcgtctacgtgttgcaatggcaggatcgattcctgtcgaagtaggaaccggcagttcaccagcatctaccaactcgttcgatttccatcgcggaccactcttataaaacccacacaggncaaagcctgaaatcggcgaaaagaagaagaaaaaaggcagcggcaacagaacactacccattccgggaacttcctgacaagctaggtggtctggtcacacgtcacgtctaagcaaacccaagcagtttgaaatggcggcgagagcgagggcagcggcgccgttctggctcctggccgcggccgcggtcacgctgctggtggcggcggcgtccgcgcagtccggcggcagcagcagcgacgactgcacgtcggcgctggtgagcctgtccccgtgcatgggctacatcagcggcaacggcacgtcggcgcccagcgcgtcgtgctgctcgcagctcaaggccgtggtgcagtccaaaccgcagtgcctctgcgccgccctcggcagcgacgcctcgtcctccctcggcggcgtcaccatcgaccggtcgcgcgcgctcggcctccccgcggcttgcaacgtccagaccccacccgtcagccagtgcaacaacgggtcgtcgggcggcggatcgaaggcgacgcctttcctgccatctggtggtgcgtcgctcggggggccggcggctcttgtgctcgggctcgccgcggctgctgtttacgccgtggcagctacgtgagcgtttgtgttgtgtgattcagggatcaggatgcgttgcgtcgtgtcaactttcgcttttcagaacgggcaggggggattttgagtgctttgtgtctatggctttgtcgcatttgtgaaattggttgattcggtctacggtcgcaataaatttgccgtaatggtttcacttgaaaaaaaaaaaaaaaaaaaagggcggccgaaa

SEQ ID NO: 2783 - DNA, 1201 bp, Zea mays
  Clone ID: ZEAMA-23APR03-CLUSTER4890_6
ctctttatttctccctcgcttccggcctcccctattcctccggtcgacgtgagagagcggaaggttggtctgtaggcagggttagatcctcgcgacgctcgatcctgacggtggtgggcgaagatgttggacatgcagaagcggcgcgtgcggctgctgctcttcatcacgggcattctggcgctcagcatgaccgctgagaagtccagagaacttgttggaaaggaggctgcatcaaagagtggtcaatccacattcatgaactgctttgacaagggctctggcagccttgcatgcacatcaaaggagggtgtcaagttgtacgtcaacaacattcgaagtgcacacttggaaatggtgcgacagcgacccatggggaaagctttagctgatgctgtggcagaaggcctaacacctagcgaagcagccaaacaagctcagaaggttagtgcaaaagcgacaaaaattgccgctcgtcaagcaaataggatattggggccaataatttcttgtggttgggacttcttcgaagcaatgtactctggcggaagcatgatggaaggttttcttcggggcactggcaccttgtttggaacttatgtgggtggtttccatggtgaggagcggtttgggaagctggggtatcttgcaggaagccatgtcggaagctggggtggaggaagaattggattgatgatttatgatgtcataagcggactgaaatatatgttcatgtctgtccaacctaagtatgaatcatcgtcatatgcatcagaagatggtccagaatacgcaaaaagatatacaaatcaagaggagccaacatactatgaaccatcaaaggaaaagcaagaagaatcaaaatggtttggtttgttctaaatctatgaaccgaagtgttccgtcttaaactcaagggcggagctaggtagtagctagattgttgcaccccccccccccctaaaaatgtgaaaatggtgtctttcaccaaaagtccaccatatatgcacccatgaggcaattgtactcatcactgcttcgctactggagcatgaaacaattagcttgttttgttgtacatttctgaatgttcagcttcattttgtatggttacctagattaggtgtgattcttcattgtaattcttgttttggctaccatgtatataaaacatatgtatcgactaaaaaaaaaaaaaaaa

SEQ ID NO: 2784 - DNA, 1840 bp, Zea mays
  unsure (1)..(1840): unsure at all n locations
  Clone ID: ZEAMA-23APR03-CLUSTER4907_2
acgccacaggaaggggaaaaaaaacgcaggtgcccaaaacacgttcgccccagagaattgaaaacttaccactgcgaattcaattcgaaagcctcagacccagagagcttcccatggcatccgctaccacctccatctcgtcgcaccctgccgccctccgcgacgtcaaagctgcgaggattggtggcgcgctgaggcaggtgggcgtggcggcgcgtggccagcgcgctcgggcggtgcccccgctgcgcgcggcggagcctgcgaggcggccggtggcggcctccgcgnccgcggctgccccncggccgcgcccgtggccgacgaggcggcggtggactacgaggccctggcgcgcgagcttgagggcgcgtcgccgctggagatcatggatcgggcgctggccatgttcggctccgaaatcgccatcgccttcagcggcgcggaggacgtggcgctgatcgagtacgcgaagctgacggggcgtcccttccgggtgttcagcctggacacggggcggctcaacccggagacgtaccagctcttcgacagggtggagaagcactacggcatccgcatcgagtacatgttcccggacgcgagcgaggtgcaggagctggtgcggaccaagggcctcttctccttctacgaggacggccaccaggagtgctgccgcgtgcgcaaggtgcggcccctgcgcagggcgctcagggggctcagggcgtggatcaccggccagaggaaggaccagtcccccggcaccagggccagcatccccctggtccaggtcgacccttccttcgaaggcctggacggcggggctggtagcttggtcaagtggaaccccgtggccaacgtcgacggcaaggacatctggactttcctccggaccatggacgtccctgtcaacgccctgcacgcccagggctacgtgtccatcgggtgcgagccgtgcaccaggcctgtcctgccggggcagcacgagcgggaaggccggtggtggtgggaggacgccaaggccaaggagtgcggcctccacaagggcaacatcgacaaggacggccaggcggcggcggcggcggcggcggcccccaggactgccaacggcaacggctcggcgggcgccccggacatcttcgagagccccgccgtcgtgtccctcacccgcgccggggtcgagaacctgctgcgcctggagagccgcgccgagccgtggctcgtggtgctgtacgcgccctggtgcccgttctgccaggccatggaggcctcctacgtggagctggccgagaggctggcggggtccggcggcgtgaaggtggcccggttccgcgccgacggcgagcagaagccgttcgcgcaggccgagctgcagctgcagagcttccccaccgtgctcctgttccccagccgcaccgcccggcccatcaagtacccgtcggagaagagggacgtcgactcgctcctcgccttcgtcaacagcctccggtgaggcccgccagtgagcgagaaccatcgttctctgtcagtatgtactgtattacatgttggtatccatctaggtgcgctgtacgtagagagggaggcggagggaactgggatgctagaaaaaacagatgcaggtgttgcttgtaactgcagaatgatggtaggtatgcatgaagtctgaggtcctgtgttatttggcagctgagggagagatttgtgcgtgcttgtagttgtagctagtggcgatggagtattctaaggaaaatcaaataagaatcgaagttttgagaaacgctgctaaaaaaacagactgcagcgtctgcttggaactgcagaatgatggtaggtattgccc

SEQ ID NO: 2785 - DNA, 1612 bp, Zea mays
  Clone ID: ZEAMA-23APR03-CLUSTER49527_1
ttttttttttttttttaggaaaaggggtgcgtgactccctttcgatctcttttagtgtcatcttccttattttaaattcacttagatacatcaatcaaattacactccaagcgcagcgccatgcaagagcatgcaaatcctctttacaaaaaataaaaccccatttaacacgcacactcttagccttttagtcttcaattcactccacaaagcccaaaccaaaaaccaaaaaaaataaaggttaaatcaatatgagaaaaatgaaaaatccagcaaaaataaattatgcgccttggacaacaacctcattattgcatgtatggacacagatcagcagatcgggtgagagagctagaggtagcagatcagatcaagaagagagggggatagatgcgcatgcacaccaataataagctagctttttcgtcatgtatggtcatttggtcccataaaaaggagggagtgagctgtactttccatggcttccaggttggacggtgttagttcttggtcatcgtcccacatcagcaggtgccgcgccgactcgtcgtcccactggtcctcctgccccagcgacggctgctgctcctcctcctgctgcttttgcagctgcccgtagcagcagccgttcgccatgccggccgccgccgcctccgcctgaccattgttgttgccgccggcaacgcggtggtcatggcctagagcgccgcagtccatggcctgctggcatgcccattcccatgccgtccaccaagggcggcagatggaagcccatcggcgcgttgtcgtccatcgccgccgccgccgtgaaggtgaggaacgggtgctgcaggtggtgtgctgcggccgcgggcgacggcgggctgacgctgacgctcgtgtcgaacatgaagaaggggcagtgcgggggcagcggcggggactcttggccgccgccgccgccgccgccggagcccagcttcggcggcggcaaggcaaggctctggctgaggatggcgtcgagccggtgctccgccgcgctgaacggcgtctgcaggtgacgaccaagcgccgcgtccgacgccgccgtgctgcacggagggctcgccgccgtcacggccgagctcgtcgtcgtcgtgctcatcgccggctttcggatcttcttcttgatccacgagttccagtagttcttgatctcgttgtccgtccgcccgggcaagtggctggcaatgtgtgcccacctgttgccaacaatggcgtgcaggctgatgatgagcttctcctcctccgccgtgaaccggcctcggcggatgtccggcctgaggtagttgatccaccgcagccggcagctcttcccgcagcgttgtaggccggccttctcggggacctcgctccagcacccgtagccatgggtggtgatgtacctgatgagcttctcgtcctcctcaggggaccagagccccctcttcaccttctgctggttgcagcaggagtgatgccccatgcacgcacacacagaccgacctccagctgaataatcggaggctatgtgctgcctggtgcctgctagctagctgtacgttgctgggtgcaaaatttttcgattaggatgttctaggtaatggtctcgtgc

SEQ ID NO: 2786 - DNA, 1489 bp, Zea mays
  unsure (1)..(1489): unsure at all n locations
  Clone ID: ZEAMA-23APR03-CLUSTER4980_1
tctcacagaagcaaaacccggacagcgctcaaatccaccggccaacctgcccatcgtccacctttcttctgttcttgtgtaggacgagcacgagaaggagaagctgatgaagcatgaggccctccagctgcgcaagaccctgaaaccggtaaataatttcaggaagaaagcccaggagaaccgggtgaagaaggaccaggccaacgctgactccaaggaggtgtccaacacgctgggcgccaagtggaaggttagcggcgccgagagggaagcagccaatgtgaagagcgctaccgccaggagaagaaggcctacctgcaggtggttggccaggagaagcgagaggccgaggcgatgaagcttctcgtggagcagcagatgcagtggaccgccaaggagctgctggatcagtacctcaagttcaggcaggaggccgaggagggtgactgcaagaaggggaggaagaagaagagcaagaaggataaggacccctccaagcccaagcagcccatgtcggcctacttcgtgtactcgcaggagaggcgtgccacgctggtcgcggagaagaagaatgtacctgagattggcaagatcaccggggaagaatggaagaacatgacagaaggtcagagggctccctatgaggaggtcgcgaggaagcagaaggaagagtaccacaagcagatggaggtgtacaagcagaagaaggctgaggaagctgctagtcttgagaaggaagagcaggagcataagaaaatcatgaagcatgaggctctccagctgctcaagaagaaggagaaggcagataatatcatcaagaaaaccaaagaaaagcgccagaagaagaaacaggagaacgctgatcccaaccggcccaagaggccagcctcttcctttcttcttttcagcaaggaagagaggaaacagctgatcgaggaacgcccgggcatcaataactcaaccctgaacgcgctcatcacggtgaagtggaaggaactgagcggcgaggagaggcaggcctggaatgcaaaggccgcgcctgccatggctgcgtacaagaaggagatggaggagtacactaaggcccaaagctcatctgcttgacagaataactaattcctgcgagtgagctttggttacaaggatcctcatctctgaatcctggtgtggtagattacttcgtgtgatctttagctttgtgtgaccttattagtcgcagcaatcagtgtaatggcggttcatatggtttagtggcagtttatattgttgccacgggcccaggaattgagtaatctttcagttctgacaaaaaaaaaaaaaaaaaacctcgtgcggaggggccgagggggcagccatgggatattagacccctttantcagtcggcatctgccgtgatgatggagatggacaccggcaatgtctgtttgacccccccccccctcaacaccaaaattatcaaatcctgaattaatttnacggggccaaacc

SEQ ID NO: 2787 - DNA, 2570 bp, Zea mays
  Clone ID: ZEAMA-23APR03-CLUSTER49976_1
gtggacagtcgacttctgccactgtcagctcccctcccgcccgggcagcctcccaccgatgctcccacagggtgcggtccaatgaacctggccctcaatccgttctcaggcggggattatttgcgaagatcgaagaggacttgctgcacggtgctacgatgatgtgtagcgcttttacccccagaggcacacctcgcgcttcggtggctccaagtggtagctggaatttttggggccttgaaaccagggggcctgcaaaaagaatttgcgtgataaatggtaccacccctcctacaacgagtggggtgcctgggtcctagtatgggccgccggttggctttggcctctgctactggacaagtcattgacgccgttgggggggaggcaactacccgcaaaaaattgcgagtacaagagttaagcagaactccattacccccccccccccccaaaaaaagaatcttcctccgccactgtcgactcccatctgcgagggtagcttcgcgccgaggcgtcagtggcgcgatgaacgtccctgtagtcgatccatatcagggggaatttcctgagacaatcgaagagtacttgcatcacggtactatgaaatgtatcgcgtttaaccgcaaaggaacacttcttgctgctggatgctcaaatggtagctgtattatatgggactttgaaacaagggggcttgcaaaagaatttcgtgataaagatagcaccgcacctataacaagtgtgtcctggtccaggtatggccaccgtttgcttgcctctgctactgacaagtcattgacactttgggatgtgccaactggggaaaaaattgcacgtattactcttcagcagactccattacgtgccagccttcaacctggttctccaactccatctatttgtttggcatgccctctatcttctgcacctcttcttgttgatttgaatactggaagtactacagttctccctgtttctgtatctgagaatggtaacccccctgcacctaacccccgcaataaatttgcggatggtaccccacctttcacgccaacagctgcaacatttgataagcatggggccctgatatatgtgggcaactccaagggagaaattttaatcatagattcaaaaagcatccaggtacatgcaatagttcccatccctggtggaagtgttgttaaggatattgttttaagccgggatggtcaatatctgctgacaaattctaatgatcgggtcattagagtctaccgaaacattctacctgttaaaggttctagagaggagatcagaaacataagcagcaacagtaatgaatatggaagtcactacgataaattaaaagcaaatggtacaagctgccttattctttcctgtgaacttttggatgccatcacaaagatacagtggaaggcaccatgtttcagtggtaatggtgagtggatagttggtgcttctgcaaacaaaggagagcacaggttgcagatatggaaccaagcagggcgccttgtaaagatgcttgaaggtccaaaagaagctctcattgatcttgcctggcatcatgttgagcctacaattgctacagtatctgtgacaggcttcgtatacatttgggccaaggagcatgtagagaattggagcgcttttgctcctgatttcgtagagttagaagaaaatgaagagtacgccgaacgagaggatgagtttgacttgaatccacgtgaagaacaggctgagaaagtagtgatagatgaggatgctgatgttgatatcgagacatctgagaagaatacagtgttcagtgatgtggaggattctgtggatgagatctcctacttaccagcaattccttacccagattctcctgatgagcagccagagaaatgccttggaagttcaaagttggaggatagcaaccattctggttccccatcctcaatggatgctgtacagaatggacaagccattcctccagcatcaagcccaatggaagttgacaactctactgctgaagacccagaagaagggccaaactcaaagcggaagcggcggctgtcagtgaaggggcttgagttgcagcagtccgagaaaggcaaaaagggatcaacaaagaacaagtccctcgggaagtccacaaaatccagcgccaagaagatggaatctgccaatggtaacagctctgccttcgatgatgaagccactgaggatgatgagattaacattgatagctagtgtgtttctgactgagggcaataggcgtgggggatagaaaatgccttttccccaccacccatccaccacctaattaaaattaactgttgtatgctgtgacaatataaacgcatgtatcagtgttcttgactgtaaattgatatgtgctgtttctcgtaaaaaaaaaaaaaaaaaaactcgagggggggcccggtacccaattcgtgttaaacacaataaagatggaacgggaggggggggttcagtttcccccccccggcactgggaaaaaccctgggggttaccccatctaaatccccctgaaagaaaattcccgcttttccacaactggggag

SEQ ID NO: 2788 - DNA, 1844 bp, Zea mays
  unsure (1)..(1844): unsure at all n locations
  Clone ID: ZEAMA-23APR03-CLUSTER4998_1
accaacccaaccactgcatctccggcaccagcagtctagctagctagctcgtttgctatagcttgccagatccccgtgaccagccgtagcacactcgctgccctgttaatataatggagttcaccgtcgtcaggaccgccattgttctgcttctttcgctcgccgtctcctcgaccttcctctgcggaggcgtccagggcggccgccactaccactaccaccacaccacgcacacaaagcacaacaccgcgcacccaccgtccgcccacgctccggggccagcgagcgggaggcggctaccccccgtctccccgccgccgtccgactcgagcagctacccgacgcctggcgccgcgccggagccagcgccggcccccgcggcagccggcaccatgtacgacgtcgtgaaggacttcggcgccgtcggggacggcgtgacggacgacaccgacgccctcaagaccgcgtgggacaccgcgtgccaggacgatggggacagcgttgtgctcgccgccgccgggtactcgtttctcgtgcacaccaccgtcttcaccggcccgtgccaggggagcgtcacgattcagctcgacggggcgatcgtggcgccgagcaccccgacacgtggccggccaacagcaagcgcaactggctgctgttctaccaggcccacggcatgtcgctgcagggcgccggcctcatcgacggcaggggccagaagtggtgggagctcccctgcaagtctcacaagggccagggtggatcaagcggccacggtgcatcctgcgacagcccagtggcgctgaggtttttcatgaccaacaacgtgacggtacaaggcctcaaggtgcagaatagcccccgagttccacatccgattcgacagctgccgcggcgtggtcgccagcggcctgtccatcagctccccggcgctgagccccaacacggacggcatccacgtcgagaacaccgaggacgtcctcatcaccaacaccgccgtctccaacggcgacgactgcgtctccatcggcgccggcaccctcaacatgcacgtcgagaacgtcacctgcgggcccggcggccacggcatcagcattgggagcctgggcaagcagggctcgcgggcgtgcgtggccaacgtcacggtgcgcaacgcggtcatccgccactccgacaacggcgtccggatcaagacgtggcagggcggctccggcgccgtctcctccgtctccttcgagaacgtgcgcatggacgccgtgcgcaaccccatcatcatcgaccagtactactgcctctccaagagctgcgacaacgccacctccgccgtcttcgtctccggcgtctcctacgccggcatccggggcacctacgacccgcgcaccacgcccatccacttcggatgcagcgacgccgtgccgtgcaccaacatcacgctctccgacgtcagcttctccccgcgtccggcgacagtaccatcgacaaccccttctgctggaacgtgtacggcagcaccgccacgcccacggtgccgccggtgccatgcctcatagaaggcgtgcccaggagagtcgacgataacagcaccctcaaatgctactagatagcagctagtgatcgatggacgtcttatacatatgcatccggcctgctactacttgtttattagaaggagatgaggccgacgagcagacaaaagttattaagattagtgcagataaaaggagttcaacgcgtaattggttatgtatgtagagaaaaagatggaaaatgtaatagtagtactaacaagtcatttgtgtaagaactatacatatagtgttaccggaattaaaaaaaaaaaaaaaana

SEQ ID NO: 2789 - DNA, 1822 bp, Zea mays
  Clone ID: ZEAMA-23APR03-CLUSTER4998_2
accattccggggcctcccatcattttgcccgcaatccagagtttagctcctcctcagcagcttaattgaacggcctctcgtaatacatacaatggagttcaccgccaggaccgccattgctctgcttctctcgctcgccgtctcctccagcttcctctgtggcagcgtccagggcggccgccaccaccaccacgggaagcacgcaaagcatagctccgcgcacccgccgtccgcccacgctccgggcccggcgagcgggaggcggcacgcgcggcccgtctctcccccggccccgccgccgtcgtctgggtcgggcggctacccgacgcccggcggcgcggcgccggagccagcaccagcccccgcggctgcagcggcgggcggcaccgtgtacgacgtcgtcaagggcttcggcgccgtcggggacggcttgacggacgacaccggcgccatcaagaccgcgtgggacacggcgtgccaggacgacggggccagcgtcgtgctggccgccgccgggtactcgttcctcgtgcacaccaccgtcttcaccggcccgtgccaggggagcgtcacgattcagctcgacgggacgatcgtggcgccgagcgaccccgacatgtggccggccaacagcaagcgcaactggctgctgttctaccaggcccacggcatgtcgctgcgaggcgccggcctcatcgacggcaagggccagaagtggtgggatctcccctgcaagtctcacaagggccagggcggatcaagcggccacggtgcatcctgtgacagcccagtggcgctgaggtttttcatgaccaacaacgtgacggtgcaagggctcaaggtgcagaacagccccgagttccacatccggttcgacagctgccgcggcgtggtggccagcggcctctccatcagctccccggcgctgagccccaacacggacggcatccacgtcgagaacacccaggacgtcctcatcaccaacaccgccgtctccaacggcgacgactgcgtctccatcggcgcaggcaccctcaacatgcacgtcgagaacgtcacctgcgggcccggcggccacggcatcagcattgggagcctgggcaagcagggctcgcgggcgtgcgtggccaacgtcacggtgcgcaacgccgtgatccgccactccgacaacggcgtccggatcaagacgtggcagggcggctccggcgccgtctcctccgtgtccttccagaacgtgcgcatggacgcggtgcggaaccccatcatcatcgaccagtactactgcctctccaagagctgcgagaacgccacctcggccgtcttcgtctccggcgtctcctacgccggcatccggggcacctacgacccgcgcaccccgcccatccacttcgggtgcagcgacgccgtgccgtgcaccaacatcacgctctcagacgtcgagctgctccccgcgtccggcgagaccatcgacgaccccttctgctggaacgtgtacggcagcaccgccacgcccacggtgccgccggtgccgtgcctcatagaaggcgtgcccaggaacctcgacgataacagcagcctcaaatgctactagcagcctcaaatgctaccttcctgctacttgttcattatattagaggacggaagaaggcaaaccaacagagaaaagtaatcaagattagtgcagataaaaccgagtttaacgcgtgattacttatgtatatatagaaaaaaaatgatagtactagtaacaagtgatttgtgtgacaattatacatatagtattaccagaatatatacatggttttcaactttaatattcgag

SEQ ID NO: 2790 - DNA, 1157 bp, Zea mays
  Clone ID: ZEAMA-23APR03-CLUSTER5001_19
tttttccccacctggaaaagggggaattctccaaagggattaatttggtaaccccaggtttttcccaatcacgaggtgtaaaaacgcgggccagggagcccgggtaattcggatccctattagggggaattgggttacgggccccccctcggaagtcggcggtatcgaataagctttttttttttttttttttttgaatcatgaatcatttattttaaactgtatatacggacaaaaatgtaactgtgacgctggtttctcagcagcgcagaacaagaccgttaggaagagcaacaaggcattcttcaagtcaaaaagaatctcttattttgtagagagctccaaagaggatgatttgtctctctccctgctaacttggcgccagttaccaaggaggagaaggccggcacaacatcgtgagttcctaattctttttgcattgtaggattacagaggtccagggaacgtgccattttcacgctgctcgttccagcgttcaacccattcacctgggcacagggatcgatagtacttggcaaacttatcacactcaggtgcatcctcaccttttgcagccacacacctgtggtattcaacatagcgtgtgaaacagtgcctcgtttgatttgttgttgggaaacgaaaatctgctggagctgtttcaatcttgatctcaggtttctcagcctcttcctcctcggtagtctcacttgcttcctctgcagcagtgttagtttcttctgcgtctgacttttcagcagcatcttgtacttcagatgtttcattcttatcttctacagatgaaggagtcccatcattggttgaaggagcagattcagtctcagtaccactagagggcttctcctcagctaccttttccactggaacttcctgtggtggaagtgaatattcctcagcgagggacggcgtcttggcttccgcggccatgggcgcagcagcagcctcgaagcttctacagtggcggctgcgagagcgagggagagatcagagagataggaagggagggggaggtgctggactgggatcgcctgccgtcgcccaccgaaggctcacccagtcagctgctctccaccgttgaagcaatccaacggctggcaacagattggcaggcgacagcatttctctgctttgatgtt

SEQ ID NO: 2791 - DNA, 656 bp, Zea mays
  Clone ID: ZEAMA-23APR03-CLUSTER500540_1
agtctacctaaattttctctctctcttagaacgagcaaccattacccgtgctcaggaccgaggcttcgaaccggcacttcccgatccgattcccatgagcgaatctgacggttgcgccttgcggcggccgccgacggcagcggaggtggtggggcggctcaaggatgacggcgacttcgatgctctccgccgcgccatcgtccggaaggtcaaggacaacgagatactacggaacaaaatcatctcagaggtaaagcagtcagtggttctacaagaagatggatctgagaggatgaaattaaaagacctatctgatgcaatttttcaagatattgggagcaaaataatgggtcaaatctcagatgaggtatggaatgtcatccagtcaaatgaaactgatatacagggaactgtgaaagccgtctacaataggatactgaaccctgaaaaggtctctgagccttctcccaagaagctgaagcagagaggcaaagaggaacaagttctgcccacaaagacagcaactagcgttgcagtcgaggcggaagatgatgatccagaggagccaccaggatttggtttcaacaatacacagcgtaatgatattggagcaacaaagccacagatgagtttggaaaatggtaatgaagggaagc

SEQ ID NO: 2792 - DNA, 2769 bp, Zea mays
  Clone ID: ZEAMA-23APR03-CLUSTER5016_2
actctctagcgtctagcctctgcctctcagtctcccctgcgccctccactccaccctgcctctgccttgcgctgcgctcccacaccagaacaccacaccgctccgcgtgcgtcgcccgcactcctcgcctctgcccgtctgcctaccgtgctggcgtgctgtgctccccacccgatgcagccgccggcgcgggccgtcccgagccacagccggagatgagctccaggaaccgctccgccgccgcctcgtccgctgccccggctctccggacaccgcgccgcctgaggcggcggccagttaaggcgtcggcgccggggccggccggcgggcggcggagcgggcccgcgacgccgctgctgaaatgggacgtgggcggccggcgtggtgagggcacgaaagctgccgccgacgaagcgggggacgccgcgcgggcgcgggagaccaaggcgagggaggtgtcagtgcggaggctcgcggccggggtctggcggctgcgcccgccggaggccgtggccggcgccggcgccggcggcgagaacagggtccgtgtgggtgtcgagcatatcccaaggcatctacaagtccagcttctgaagcagaacacttcaggtcatcaccagagtttgaagaatgaggtttcaagccccatatctgttctggagcggaagagtggagagctccacaaggtacaacttcacgctacctctgccatgcttcctgtcgctaccatggagaaggcaacgaaatgggagcctggggacataaagggaatggagtcacatgatgcgtatctgatagccagccagctaaatcttcttgatgaacagcaagacacagtgtatgttgctggcctccagatggagctccagcaagcacgtgataggataagtgagctggaaaccgagcggcggtcggctaggaagaagcttgatcacttgttcaagaaacttgcagaggagaaagcagcttggagaaacagagagcatgaaaaggtgcgtgctatcctcgaagatatgaaggcagaccttgaccatgagaagaaaaacaggaggcggctggagatgatcaacttgaaactcgtcaatgagctgaaggaggccaagatgtcagcaaagcagctgttacaagattatgagacagagaggaaggcgcgtgagctcaccgaggaggtatgcaacgagctagcaagagaggtgggggaagacaaagctgagattgaggccttgaaacgggactccctgaggttgcgagaggagctagacgaggaacggaagatgctccagagggctgaggcggtggcgtgaagaacgggtgcagatgaagctcgtcgatgcaaaacttactcttgacgccaaatcacacagctgagcagactgcaacaggatgttgaggcgtttattgccgcatgcagtactgcaaatggagacataacagtagtagaggaagcagagaacataattcaggcaatcaagtcagtcagagcccaaggcgctgaattcagatatgagccaccggcggcatcggaagacatattttccatctttgaagagctgcgtccaagtgaggagcctgtcattaaggagattgagccatgctacacgaatagctctgccaaatgtgaatcggaaattcaacaggttagcccaatgaccgatatattcctcgaaacgaaagccaaagtttactcaaacaaaagccctaaagatgaaagcgacgccgaagatggcagcagctgggagacaataagccatgaagacatgcggggttcgagcggttcgcctgatggaagcgaaccttcagtcagcaataagataagcatttcttggaacagcagaaatggtttcgagtacagggagaacgagaagctggaagatgacttagctgatgcctacctggcaagcatgaaccaacccaagaagaaagaatcggccatttcaaagctctggaagtcgtcccgcccaaagaacagtgaggtatgcaagaaagatgcagtcgttgaaacggtgaatgcaagaccgtctaatgcacggcactcagtggggacttattccactgttgaaagtggcatccaagaaactggactcagtccaccgagcgtcgagcagtggagctcgccggactcgatgaatatccaattcaaccggggcttcaagggctgtatagagtacccacggacgtcccagaagcacagtttgaaggcaaagctcatggaggcacggatggagagccagaagatccagctccgccaggtcctcaagcagaagatctagtgcaggccagaaccagaggacgaaatattgtaaacctagattttaatccaaggaataatgtcaaggagtacctagatgcttcatttttttctcctgttttagagtaacctgtaatgcatgtacaacaaagggctagagagaaaaaaaagacagggatggccttggtgggctgtccggactccggagcctttgctgcttctgtatcttactttagttttggtgttatggtcggatctggtaggctatggtgagatctagcatgatgtataatacagacacaaacaagcagcaacgttgagacaaattgcatccctttgtaaacagttctccggtgtttcccataaccattttgtgtgtgtgtgaaactcttatgcccccaaaaaaaaaaaaaaccaaaccaaaaaaaaaaaaaaaaaaaaaaaaaaaaaaaaggacgacgggcgcacgctatacaggactcaagcacgcgtgcagcgtgcgtcatagctcatagatagtg

SEQ ID NO: 2793 - DNA, 2141 bp, Zea mays
  Clone ID: ZEAMA-23APR03-CLUSTER5064_2
aaactgctgtaatgactgagcacgagcatcaagcactcagctgacggacagagcccacgtcgggttgacaaaaggaagacgcacgacgcgcgacgaggggagcaggcgatgcccggcgttggggcagggccgagcggtcaagcgccagcagagggaatcgccatggcgaacgcaggggcgagccaggagaaatcagggagcaggggctcgcggctagcaggagaagcagagatcaagctgggcgagatccaagcaggaagattggcggccggcagagggaggcgccatgggagggagacccgagcagaggagctgaagggggcgctggccatgggggaggcagggaggaagaagcttggggagatggggaggagagaggtccgcgcgtagccatgaagttgggcagagccgagcagggacagggtagaaggaaccgctcggcaggggagaggagaggataaagccaagcgcctgaaggagaacgtcggcgagatttttctccgtgcggccaggaaactccacggcggggaaaaatccacagagatggctgaacaaaaaatcagacgagaacagcggttcaaaaaatcggagggaggacggctgcagagggcgctcggccaactaggagctggagagagcgtcacgaggaagataggagcagagacacgtatgcgaggggattttagagataaggaagatggcgttgagaagatagatgagaatcataaaagagacaatactgcagtcagccctccggaggaacaacgtccaaagaaagcaaggattcagatgttttcccctgcggagggggtgccagataatgtaacagtctctgttgagtatgcgaagtctggtcgctctacctgcaagggctgcagtgagaatattgccaaaggtgccctccgccttggtgcctcttttcctgatccccgtggctacgaaaatactaagtggtaccatgttgtgtgcttccctacatcatcatacccattatttccaatgtcaaatctgaaggggtttgattcaattgaggatcatgaccgtgacaagttgcacaaattggtggagaatcacaagagcgatggaaaagcggctgatgtattgaatgagtcaaatctgaagagagaaatggctcacagcatagatgactcgaatgaaggtgctgaaaaggatctggaaggaataaagattcactgcatgggggagtttgaagaaggtgctgaaaagaacctggaagaagcaaagttacctgcagggaacaaaatgattggtccatcgatatccttttcactttctgatataaaaaaagaatacaagaatgctacccttcctgctcattggaaggtttttgatacagttatcttccgtgagaaggaagatggccttcatgcttcatctaagattgctgcatttgattttgatgggtgccttgccaataccagtatgaagagggttggtgcagaccagtggtctttacagcataaatcaattccagaaaaattgcaaagactgtacgatgatggttacaagctggtcatattcaccaatgagtcaaacattgagcgctggaagaacaagcgacaacaagctgttgactccaaagttggccgccttgataactttattgaatgtgttaaagcccctattcaggttttcattgcttgtggtttagggaaaggaaaaggtattccagatgatccataccgcaaaccaaatcctggaatgtggtggttgatggctcagcatttcaattctggaatcaaaattgacatggatcaatctttctatgtcggtgatgctgctgggagagagaacgatcatagtgacgcagatatagaatttgctaaggccatcggtctcaagttccatgttcccgaggagtacttcggtttctaattacctgtgaccagctagtaagatggttacactacgtcgtttagtgtttggatattatcaatactgtggctattctggtatggtgatctacatgtctgtttaaaccgtcaaataatatcccagttattcacttaggtcctgtttgtttccttccagaattatgtaatccatatggattatataagtacttcataacctgcttatggattatcataatctaggtatctagattatataatccacct

SEQ ID NO: 2794 - DNA, 1152 bp, Zea mays
  Clone ID: ZEAMA-23APR03-CLUSTER5070_2
gcacgagaccattacctagaacatcctaatcgaaaactcttctcttgcgcgttcctcttcttcctagtcctaggctactttcttcgatcccaactccgagtcgcctgtcatctctctctaccagattagattggggatctcatctcatccgaatccttcatagtattacacaaccagcaaggccgcccgcttgccggcaacatgaagaagatcttcggcgccaagaagaacaaggatccgccgcccacaatccaggacgcaaccgacagaatcaccaagcgcggcgacaccgtcgatgaaaagatcaagaagctcgacgccgagctcgcgcgctacaaggagcagatcaagaagacgcgcccaggccccgctcaggaggccgtcaaggcacgagccatgagggtcctcaagcagcgcaggatgtacgaagggcagcgtgacatgctctacaaccaaacatataaccttgaccaagttgcttttgcggcagagggacttaaagatgctcagcaaactatgactgcgatgaaggctgccaataaagagctcaaagggatgatgaaaactgtcaagctcgaagatattgatagtatgcaagatgagatgatggatcttatggatgtgagcactgaaatacaagaaactcttggcagaagctacaacgtcccagatgacatcgatgaggaagaacttatgggggagctcgatgctttggaagccgacatggacttcgaatcagagtcagtcccatcttacctccaaccagaccaagaacctgaactcagcttacctgctgcaccaactggccatgcagcagtcccggcaaaccagcagcaggaggatgagctaggattgcctacagtgccacaagcatccattcgtacataatcaagcagaatcacgtttcttgcagtcaacgatataaaggaagtcgtattatatatctacagctgggtgtaaaaatgctgttatgtaccgcaccacttcgattttttttgtcactccacttgtggatggtgtaaatctgattgaattgaattagttgggagttggggcataataagatcctccttgtatttggtggtggagggctgtgctctgccctacatggttgtacatacatatgaggatctgttggcatccattttgctt

SEQ ID NO: 2795 - DNA, 547 bp, Zea mays
  unsure (1)..(547): unsure at all n locations
  Clone ID: ZEAMA-23APR03-CLUSTER5084_8
aggcgaagcggagtagtggaagcagaggcggcagccatggccgtgatggagaagctcaagatctttgtcgttaaggagcccgtagtcgcggcctcctgcctcatcgctggattcggtctctttcttccagcagttgtccggccaatcctggattcatggcagaccgcggaacaagttcctccacctcttctaaatgatccatgttcttgatgaaggtgatgaggagcacaggaaaccacagaacccagcaaccccctttggtttcccacgctcctcgtcggcatcagcaactattcgatcacatcccctatttcaaactttactcggtggttgcaggtgtcaccggccagaaaaagtagtgaacttgcattgttttctcatgccaatgttgccccacattttcttccccgtgttttttctggcgaccagattggaaggcttttcccaagagtcacggtcttgaactctagatggtntccgcggaataatcattgtacctgaatcattttctgcaatgtggcagttttgaaaatgtttccccttctac

SEQ ID NO: 2796 - DNA, 1393 bp, Zea mays
  Clone ID: ZEAMA-23APR03-CLUSTER5120_2
aagttcaggcagtttcgtgcccttttcttctccaccagctcaaagctgaacgcggcatccttcctttcacaccggggaccggcgagcagagccgcgcacagcagaacgcggaagcaagaggaggcgatcgactactcgaccagccctctccgtgtctccgatggcggctcgcgtcctcgcggccctcgcccttgccctcgccctcgccctcgtcgccgtacccgctcccacgcgggcgtccaacgacgagggggacgcgctctacgcgctgcggcagcggctgtcggaccccaacggcgtgctgcagagctgggatcccacgctcgtcaccccctgcacctggttccacatctcctgcgaccaggtcggccgcgtcgtccgcctggacttgggcaactccaacgtctccggctccatcggccctgagctcggccgccttgtcaacctcaagtacctggagctgtacaggaacaaccttgacggcgagatccccaaggaattgggcaacctcaagaacctgatcagcttggatctgtatgccaacaagctcacgggaggaatccccaagtcactctccaagctcgactcactcagattcatgcgcttgaacaacaacaagcttacaggatcaattccaagggagtttgccaagctctccaacctgaaagtcatcgatttgtctaacaatgatctctgtggaactatccctgttgatgggcctttctcaacctttcctctccgaagctttgagaacaacagcaggctcaacggtccagagctacaaggattggttccttatgattttggatgttagatgccgatcaacaatgtaccaccttccccagttgaaagggggaaagacaagatagtattatcaatagaaacctagcttcaagaatgtcgtgactatatatatgtatgatattaagactagatttgataagggtggcatagcaagtcctgatattctgtgtgcattcagaatagctgcttttatgccccttgtgttgatattttgcaaaccaaaacaaactgttctgaaacgagggcacatattgttcatgaataaatttgagcctccaataaaagaaaggttccttatgattttggatgttagatgccgatcaacaatgtaccaccttccccagttgaaagggggaaggacaagatagtattatcaatagaaacctagcttcaagaatgtcgtgactatatatatgtatgatattaagactagatttgataagggtggcatagcaagtcctgatattctgtgtgcattcagaatagctgcttttatgcccttgtgttgatattttgcaaaccaaaacaaactgttctgaaacgagggcacatattgttcatgaataaaaaaaaaaaaaaaaaagcggcc

SEQ ID NO: 2797 - DNA, 1005 bp, Zea mays
  Clone ID: ZEAMA-23APR03-CLUSTER5140_10
atatccacacctgagtcccctccgccgcctgccgcactctcccgcgacgccaccaccacacgttcacggtagcgagagcttatcgtcgtcggcggcgaagatggtgtcgctgaagytgcaraagcgsctygccgcgagcgtacctcaagtgtgggaaaggcaargtstggcttgacccmaatgaagtyagygagatctccatggcwaactcccgccagaayatccggaagttggttaagratgggtttatcatcargaagcctcakaagrtycactctagrtcccgctgcaagaagggcacatgaggccaagcagaagggaaggcactctggatatggcaagcgcaggggtaccagggaggctaggctccccaccaagattctgtggatgaggaggatgcgtgttctgaggcgcctgctctgcaagtaccgtgaggccaagaagatcgacaagcacatgtatcatgacatgtacatgaaggtcaagggtaatatgtttaagaacaagagggtgcttatggagagtatccacaagtccaaggctgagaaggccagagagaagacactttctgatcagtttgaggccaagcgtgcaaagagcaaggcaagccgtgagaggaagattgctaggagggaggagaggctggcccagggcccaagagaaccaacagcacctgtcgcagccccagctccatctactggggtgccaaagaaagcaaagaagtgaagtatggaaacaaagctgtagccttttggtactatataagcatgactttggagcacctgaagtattttgctgttatatagtttcgtgtctcaaatattctgagtcttgtatctctaccgttctgttggataatgcatgccgtaagagttgtttatggagcttttgttgttacaggacccctaaaaatgtttgtttgacagatgtttggaattgtggtcatgtttatgaaaattagtgttgtgggtcttcgtataaaaaaaaaaaaaaaaaaggccccta

SEQ ID NO: 2798 - DNA, 2525 bp, Zea mays
  unsure (1)..(2525): unsure at all n locations
  Clone ID: ZEAMA-23APR03-CLUSTER5140_19
gcacgagaccattacctagaacatcctaatcgaaaaacaccagctccactgcatcaaaacccctcatcaccctgcagcctgcactcatcagacatggtgctcaccatggccagcgcccaagaggactcgctcctcctgctcctcctcccgaccacctccccactgccgcccctcgtggccgtgttcatcctagccgccgtcctcctgtggctctcccccggcggtcctgcgtgggcgctctcccgctgccgccgcccgccgcccgggccaacgggcgtggtcaccgcgctctccagccccgtggcgcaccgcaccctggcggcgctgtcccacgccgtagacggcggcaaggcactgatggccttctcggtcgggctgacccgcctcgtcgtgtcgagccagcccgatacggcgcgcgagatcctcgccagccccggcgttcggcgaccgccccgtcaaggacgcggcgcgccacctgctcttccaccgcgccatgggcttcgcgccctcgggagacgcgcactggcgcgggctcccgccgcctcgccgccaaccacctgttcggcccgcgccgccgtggcgggtgccgcgcaccaccgcgcctccatcggcgaggccatggtcgccgacgtcgccgctgccatggcgcgccacggcgaggtccctctcaagcgcgtgctgcatgtcgcgtctctcaaccacatcatggccaccgtgtttggcaagcgctacgacatgggcagccgagagggcgcccttctggacgagatggtggccgagggctacgacctcctgggcacgttcaactgggctgaccacctgccattgctcaagcatctcgacccccagggcgtgcgccgccggtgcaacaggctggtccaaaaggtcgaatcgttcgttggtaagatcatcatggagcacaggacgaggcgcgcaaatggaggattcgtgagcgatgagtgcattggtgacttcgtcgacgtccttcttggcctcgagggtgaggagaagctgtcagatgcggacatgatcgctgttctttgggagatgatcttcagaggcgccgacaccgtggcgatcttgatggagtgggtcatggcgaggatggcgctgcacccggacatccaggcgaaggcccaggcggagctggacggcgtcgtgggcatcgggcgcggcgtggcggacgccgacgtcgccagcctaccctacatccagtgcatcgtgaaggagacgctgcgcatgcacccgccaggcccgctcctgtcgtgggcgcgcctcgccgtccacgacgcgcacgtcggcggccacctggtccccgccggcaccacagccatggtgaacatgtggtccatcgcgcacgaccccgccatctgggccgagccggagaagttccgccccggagcggttccaggaggaggacgtgagcgtcctcgggagcgacctccgcctggcccccttcggcgccgggcgccgcgcctgccccggcaagatactggccctcgccaccacccacctctgtgtcgcccagcttctgcacaagttcgagtgggccgccggcgggggcgtcgacctgtcggagcgcctgagcatgtcgctggagatggccacgccgctggtgtgcaaggccgtacccagggttcagggccaagcggcctcctagcctagcctccatgcatgcctgatgcctggatgccgtagcgagagtgggagactgatgagtgtatgccgttatgtttgtgtgtccatgcatgcatgcatgcctcggctactgtagcttcctggcttgcttgttgtgcatgtcctgcgtcgagaccttgcgtagtatgatgcagtataattttaataataatattattattaaaggttaaaaaaaaaaaaaaaaaaactcgagactagttctctccctcgtgccgaattcggcacgaggaagccaccgccgcctcgcatctcctcctccgccccacgcagctgaggcgttgatcctcaccggcgtcgccatcgtaatcgccttggacagcggcaccagaacctctgcctccgcagggtgcttgctggtatcattacaatctggtagttttagtggttgggcttgacttcctactattcagaaacacagtaccgagaagtctttaggtggggtcaaagatggtgtcgctgaagttgcaaaagcgccttgccgcgagctacctcaagtgtgggaaaggcaaggtgtggcttgacccaaatgaagttagtgagatctccatggcaaactcccgccagaatatccggaagttggttaaggatgggtttatcatcaagaagcctcataagatccactctagatcccgctgcaagaagggcacatgacgccaagcaaaagggacgccactcaggatatggtaagcgtaggggtaccagggaggctaggctacccaccaaggttctgtggatgaggaggatgcgtgtgctgaggcgccttctcccgcagtatcgtgagggcaagaagcttgacnagcacatgtatcatgacatgtacatgaagg

SEQ ID NO: 2799 - DNA, 1192 bp, Zea mays
  Clone ID: ZEAMA-23APR03-CLUSTER5143_9
atccgcaagtccgcaacccccactactacagtgcccgccgccgctgcgtccaccacctcctttcccaactcctccgcgtacccccgccctctccggcggcccgcgtaaccacccgcgcagatggcgacggcggccacggcgtccgctacggcggcgacccgcttcacgctcctagcgggcgccggcctccgcagccgcatcagccgcctccccaccgccgtgcggttccagcgccagcgggggctcaccaccaccgcgctcctgaagaccgccgacctccagcccaaggagcagggcaagcccgagacgctcgactaccgcgtgttcctcgtcgacggcgggggccggaaggtgtcgccgtggcacgacgtcccgctgcgcgccggggacggggtgttccacttcgtcgtcgagatacccaaggagagcagcgccaagatggaggtcgccaccgacgaggccttcacgcccatcaagcaggacaccaagaagggcaaccttcgatactacccgtacaacattaactggaactatgggttacttcctcaaacatgggaggacccaacttctgcaaattctgaggttgaaggagcatttggggataatgatcctgttgatgttgttgagataggtgaaaggcgtgccaatgtcggggatgttcttaaggttaagccattggcagctttagcaatgattgatgagggagagcttgactggaaaattgtggccatttctttggatgacccgaaagcatctcttgtgaacgacgtggatgatgttgagaagcattttccggggacactgactgccatcagagactggttcagagactacaagatacctgatggaaagcctgctaacaaatttggtctgggcaacaagcccgcaagcaaggaatacgccctgaaggtcattcaagagaccaacgaatcatgggaaaaattggtaaagaggaatattcccgctggagagctctcgttggcctgattttggcccatgggaagccaccacattcttttgaactgctttcgtgagcatgtcgttttgtatgctgtgaccatgcttcttcgtttgcattccaaacctttttacgaactgtttaataaaaatgatcttgtcggatgaataatgattctggtgcgagtttaccagaacggcaaggagtgtttctcaagcaaaaaaaaaaaaaaaa

SEQ ID NO: 2800 - DNA, 942 bp, Zea mays
  Clone ID: ZEAMA-23APR03-CLUSTER5187_6
gaattcgggggggggggtgtggacgcgtcaaatcagctccctgcctctggtcacctcgcttccgctcccggctcccctccggctacccagacatcgtccgtgcgctcgccaagagacaggaccggagaccatggcggaccagctcaccgacgaccagaccgccgagttcaaggaggccttcagcctcttcgacaaggacggcgacggttgcatcacaaccaaggagctcggaactgtcatgcgatcactgggtcagaacccaaccgaggctgagctccaggacatgatcaacgaggtcgatgcggacggcaacggcaccatcgacttcccggagttcctcaacctcatggcccgcaagatgaaggacaccgactccgaggaggagctcaaggaggcgttcagggtgttcgacaaggaccagaacggcttcatctctgcggcggacgtccgccacgtgatgaccaacctcggcgagaagctgaccgacgaggaggtcgatgagatgatccgcgaggccgatgtcgatggtgatggccagatcaactacgaggagttcgtcaaggtcatgatggccaagtgagtaaagcctgcggtaacggtatagtaccccgcgggaattgaaggaggaaaccaaaccgtgcatcacatattagaaaggcaatgcaggtcttgtttccttcgttttccccatgaagaaaccgtactagctgtagctgctgaacgtttgagtccccctgctgccacccttatctccatttgtgtcatcgaaactccgtgcttcccctgctgtgtgaatctgtacggctttgcgtgttctggacactgattgcagttggatccagtttgtagttctatttgttcatcgaatctgcccagactcctttggtaccattcaacaggctgctgctttctgtttaaaaaaaaaaaaaaaaaaaactcgag

SEQ ID NO: 2801 - DNA, 1836 bp, Zea mays
  Clone ID: ZEAMA-23APR03-CLUSTER5303_1
agttcgcaatggcggctcgtcttgcctgagcagagcttcaaggagcgcgcgcattggcgccgcccgcggcgtggcccatcgccgccgatcgccggcgcccccgtcaccgcgttgtcttggcggaacagcttaagccagcttgctgcgccgtcaggaagccgaaacgcggcggccccacggcgggcggctcggcgtctgcagaccccgctgacgctgctggctcctgcgctcctggcggcggccgctgcaccaggacgcagccagccctcgccgaagttcgaccccctccaccgcgcgcaggcgccctgggaccaggtggcgcgcatggaccaggagccccccgcgttcatctccgcgcacgctcctccgccgccgccccgcggaggccgccgccgtccccgaggccaaggcgaggcccgggctcaaggccaccccgccggccgacgaggccttcgcgatgccgctcttgtccggcgcatgcacgggccccggccagtactttgtgcgcttccccgcgggcacgccagcgcggccgtccctgctcgtggccgacaccggcagcgacctgacctgggtgaagtgccgccgccgccgccacgacgcgccagccccgggctacagcgccccagcgtcgaacggctcctcgtcctcctcctcctcgctcgcgccggcggcatcctcccacgcgcgcgtgttccggccggacaggtcccggacgtgggcgcccatctcgtgctcctccgacacctgcacggcgtccctgcccttctcgctcgcggcctgccccacccccggcagcccctgcgcctacgactaccggtacaaggacgggtcggcggcgcgcggcacggtgggcaccgactcggcgaccatcgcgctgtcttcgtcgtcggcgcggccggccggcaagaagcggcaggctcaggccaagctgcagggcgtcgtgctgggctgcaccacgtcctacgacggcgagagcttcctggcctccgacggggtgctcagcctcggctacagcaacgtctccttcgcgtcccgcgccgcggcgcgcttcggcggccggttctcctactgcctggtcgaccacctcgccccgcggaacgccaccagctacctcaccttcggccccaacccggccgtgtcctcggcctccgagacggcctgcgggggctcgggctcgggctcggcggcgcccggcgcgcgccagacgccgctgctgcttgaccgccggatgcgcccgttctacgcggtcgccgtcaacggcgtctccgtcgacggggagctcctccggatcccgcgccgcgtctgggacgtcgagaagggcggcggcgccatcctcgactccggcacgagcctcacggtcctcgtgagcccggcgtaccgcgccgtggtggcggcgctgagcaggaagctggccgggctgccccgggtggccatggacccgttcgactactgctacaactggacgtcgccgtccacgggcgaggacctcgccgtggccgtgcccgagctggcggtgcacttcgccgggtcggcgcggctgcagccgccggccaagagctacgtcatcgacgcggcgcccggggtgaagtgcatcggcgtgcaggagggcgcgtggcccggggtgtcggtcatcggcaacatcctgcagcaggaccacctctgggagttcgacctcagggaccggtggctccggttcaagcacacgcgctgcgccctatgatgattgctcacggacgccgcgcatggttcctctatgccttgataaaatttgtgacgagtttggagttgggatttttttcctgaatgaatgaatgaaaatataatttttagtgc

SEQ ID NO: 2802 - DNA, 1998 bp, Zea mays
  Clone ID: ZEAMA-23APR03-CLUSTER5332_2
aggcaggcagcgggctggcggaaaagcctagtgcgcgctcgtgctcgtgctccccgaccagactagaccagcttgctagcgccagcaaggcgagcggcgatgctcgcacgatctactacagctgccgccgcggccgccgccgggatctgcctgtgattaaggatgtcggcgtcgcggagcgggaggcggcggaccggtagcgtggcgctcggagaccttctgcagcgggaggcgtcggcggagcgggccgcgttgggatgcggcgagcggccctcggtcgcggcggggcaggcctgccgggcgaagaagggcgaggacttcgcgctgctcaagcccgcctgcgagcgacgccccggcgcgccgtccacctccttctccgccttcgccctgttcgatgggcataacgggagcgccgccgcggtgtacgccaaggagcacctcctcggcaacgtgctcagctgcgtcccgaccgatctggcctgggacgactggctcgccgcgctgccgagggccctcgtcgcggggttcgtcaagaccgacaaggatttccagactaaagctcattcctcggggacaaccgtgacgcttgccataattgatggctccgttgtaactgttgcatctgttggtgattcacgttgtgtccttgaagctgagggatccatctactatttgtcggctgaccatcgcttcgacgctaatgaagaggaggtgggacgtgtaaccgaatgtggaggtgaagttggaaggctaaatgtcgtcggtggtgctgagattggtccccttagatgttggccaggtggtttatgcctctcaagatcgattggtgatcaggatgtaggtgaatttattattccggttccttatgtgaagcaaattaagctgtctaatgctggaggccgtcttattatttcaagcgacggtgtttgggatgctttgactgcagaaatggcttttaaatgtgcacgagggcttcctcctgaggctgcagctgagcaaattgttaaagaagcagttgaagcaaaaggattgagagatgatacaacttgcattgtcattgacataatatcaccagagaaaccaaaacgcactatacaatctcaaagatcgccaagaaaaggccttgtgcttctaaaaaatttctttttaaggaaaacagcatctgactcgttgtctctccctgataaggataattatcctgagccagatttagaggaggtctttgaggacggatgcccatccctttcaaggaggcttaattctgagtatcctgtccgagacatgttcaaactttttgcatgtgcaatttgtcaaattgacttggaatctggccaaggcatatccatacacgagggtttgtcaaggccaggaaagctgcgtccctgggatggccctttcctttgtcacagctgccaggaaaagaaagaggcgatggaggggaagcgccattcacgagattcctcgtcgagaaatagcgggtcaagtgaatcgtgactgaagccgagaatcatcttgaggcaaacgcctagcggtgtgacgagctaattattgttgctgctgtcgttcttgcagcactttctcatggattaccattgaattgagacatgttggaagtcgccatgcctatatatatgttggagctgtacggtactggaccgtagagcaaatccaatcgcctctagataccacaccagcgtcttcggcagggcttgtgacagcagcttatgcagggaatgatgacaagaggttgttattattagtgaagaatgtcgacagtggccaatagtcatgtaaattattcgtcgtgtagaggtgcaagtgacaaatagccacggttttgtaattctcaactaggattaggtattgagacctgtaattcgtctgggcagacctcaaactgaaggtcaacaacgtagcgtggccctattgtagaatgtatgttgccctacaatctaaatgattcaacgctgcaattaaatctaagatctttgcggacgc

SEQ ID NO: 2803 - DNA, 1056 bp, Zea mays
  Clone ID: ZEAMA-23APR03-CLUSTER5346_15
gtattcagagtagggaacttgtgaatgcaaaacgagtcactcaccggcgccactctcggcggagaatgccctcctcgaccatgagtgcaagcacagggtcctggaggacgaggcgacggagcgggaggcgagtcgcagttgcctggccttccccagacgggcggcgcgcgcggccagggcgctcgtctcctccgccctcggcctcaacaacctgcagccgagcagggccgtcgtgcggaggttcgagtggtacgcggacgacgcgggcgagttcctgcgatttgtggagctcggctgctgcgcgtcacgctgccgcgtgccctccgtcgccgatgctttcatccggaacctcgctgcggggaggaagctgcaacacatggtggagctggcggaccggtgcacgttcttcttgctgtggctgtcgtttttcatcagtgattctccggtggaggaacgcggggtttttgactgaagagaacaaactgatcacagtgaatcccgacaccaaggtcctgcaggcaatgcagctcatgacagaaaaccgcgtcagacacatcccggtgatcgacggcacggggatgctggggatggtctccatcggcgacgtcgtgcgcgcggtggtggccgagcacagggaggagctgaaccggctcaatgactacatccagggaggctactaggacggcgtgtgcagcgacgaccccctccgatcccgccagtcagtgaagtccgcctttgaaatccaataactcggaacaatgatgatgacgaaataggccgtgttttcttggacaatgatgttaagttcggcaaggttttcctttctctttttttattctactgcgtggtctatgtgtatattgccaaaggcatgcgtgagccatgcgcccggtgctggggcgcagagaccatctgatggtggaaacaccggaaataagagcgtgccgctgtgtgtttcctttgaaggaataaaaatggtgttcgtgttgtgcattgcttattgttgatgttcgctttggattaaggccttgtttatgaacggtacggattcagtgc

SEQ ID NO: 2804 - DNA, 1425 bp, Zea mays
  Clone ID: ZEAMA-23APR03-CLUSTER5363_31
atcctatactgcccccaaatccggcttgccccgcaaaccaagagctccagttcctcttcctcacgcctctctgccaatccctcctccggccctctctccaggctccagcgccttctccggcgacgccggcaccgcccctagacgcggcccgaatctagggttcccctttcccgccgttggcggccggatcgctcccagaggagcctccgcgatgctgccgtgcgcgaggtcggtgcttcggaggagggggctggcgtcttccctcctgcggatgtgcggtggggagggccagtgctccaccggcacgggggagctggtcgccaatgccaggtgtgcgagcacgctggccgcgctcggcggcggcgggcgcgtgctcgagcgcggcgccaggttggcatatccgcagaccggcgtgattggcgcggggcggatggcgcgcacgcagaccaggtgttttctcgggtgcggcgacggggaggaggggggcgtactctccaaggtctacgaggagaggcgtgtgatggggtactcgccagagcagatgtttgccgttgtcgcggcagtggacctctacgaggactttgtgccgtggtgccagcgatccaggattgttaggcggcatgacgatggctcatttgatgctgagctcgagattggattcaagttccttgttgaaagctatgtctcccgtgtggagatggagaagcccaggtatatcaagacgacagcatctgaaagtggactttttgatcatttgataaacgtttgggaatttaagcctggtcctgttccagggacatgtgacctctacttcttagttgattttaagtttcaatcaccactgtatcgtcaggttgcatcaatgttcttcaaggaagttgtttctcgactagtgagctcatttagtgaccgttgttttagaatatatggccctgctgttccagtgctggaaaacacttatggacaaggaagatgaagccgttatgattcaatttcgaaggatggatcctttgtggatctttgggaattccttgtagtcaaagcataatccttataattggtggtagtgccatttagggcgccatcagtcaaggaaatcggtcacttttgagttctcactcatggctatttctgaggttattttttcgtctatttctaaaggggtgtttggtttatagggactaatgtttagtcccttcattttattcatttttagtgtataaattgctaaatatagaaactaaaataaagttttagtttctatatttggtaattttggaactaaaatggaataaaatctagggactaaacattagtccctagaaaccaaacaccccctaaattcggttcacatgtatacaacgaaatggccatttcttacgattatttaccaagccattcagtcaatcaaaaaaaaaaaaaaaa

SEQ ID NO: 2805 - DNA, 974 bp, Zea mays
  unsure (1)..(974): unsure at all n locations
  Clone ID: ZEAMA-23APR03-CLUSTER5363_45
ctcccgcagagcagccgacaactctctaccgtccgagaccccaagcaccagcgcggcggcggcggcggcggcgaccatggctgtcgggaagaacaagaggatctccaagggaaagaagggtggcaagaaaaagaccgtcgaccctttctctaagaaggattggtatgacatcaaggcaccgtcggtgttcagtgtgcgcaacatcgggaaccgccgccgacgccgcaggaggagacgcatcgaggttagcacgcgaagaagcgaccatgagggccaagtggaagaagaagcgcatgaggaggctcaagaggaagcgcagaaagatgaggcagagatccaagtaggcagatcgagatggattgtggacctgatgacatgcgtgggtacatacatttcttcggatgcgttggtgtgcctgtggagagatgtcaacctgccatggtgtcacggtccgccatcagttgaacgtcttgcctgcacttcagtaggccatttttcatggttctagttgtatttgaatccagcgtttgccactaagataaatcagacattcgttttgtgaacctattatgatggagctttatttgctgataatatctacctacctatttgagctgaaaaaaaaaaaaaaaaaaaaaacagccctagtcgaacaagtccaacgcctcccccaagccgcaggaacgccgccacccgccgccgactgcagcttccggctccggcgtgcactcagctcaactgctccaaccctccagctctcgcttgccgcccaactgctccaagcctccagcnttcctggtgttgtgctacaaggtgatggtcgatggatggtgcagtttgcttgctgtgtgcctctgtgcaatgcttttagactggtgctgcgtctcttccaagttgcagcttgtagtttgctccaagtgaccaagttgtgtaactgaatgaggttggcaaggtgcctagtcggccagccctac

SEQ ID NO: 2806 - DNA, 1494 bp, Zea mays
  Clone ID: ZEAMA-23APR03-CLUSTER5382_3
acctagaacatcctaatcgaaaaagagtttcccgcatcggcctccgccacccaccgccgccgccgccccgccccgccccgccaaaggaacggaggatggaagccccgggctcgccctacgcctcctcgccggaatccgcccccaagcgtgcccctcgctccccaccgcagcagcagcctccctccgaggaaggagatgacaaggagaaaccaatacatttgaggtttctggtgtctaatgcgtcagcaggatgtatcattggcaagggtggatcaactattaatgactttcagtcccaatctggggctcgtattcagttatcacgtagccatgagtttttccctggtactaatgacagaatcatcatggtttctggactgtttggtgaagtaatgaaggccatggagttgattcttgagaaacttttggctgagggtgaagaattcaatgaagctgaagctagacctaaagttagacttgtagttcctaacaactcttgtggcgggataattggtaaaggtggagcaacaataaagtcatttattgaagaatcacatgctggaatcaaaatttcgccacaggataacaattatgttggtttgcatgataggcttgttacagttacaggaacctttgataatcagatgaatgcgatagatttgatactgaaaaagttatctgaggatgttcactacccagctaatttgagctccccatttccatatgcaggtcttactttcccaagctaccctggtgttcctgttggttatatgattccgcaggtgccatataataatgctgtgaactatggacctaataacgggtatggaggaaggtaccaaaacaacaagcccagtacacctatgagatctcctgctagtaatgaagcccaagaatctctgaccattggtattgccgatgaacacattggtgctgttgtaggacgtgctggaaggaacataacagagattattcaggctagtggtgctcggatcaagatatcggataggggtgacttcatatctgggacatctgacaggaaggtgacgattactggaacatcagaagctatccggaccgcggagtccatgatcatgcagagggtgtcagccagttcggagaggctatgataccagatatgtttgacggactgtgggggccgttgttgagtccgagcagcatgtttgatgcaagttattattgtttgttgcgttgcgccaatggtttagtcgaagatatataggtgcagcgtttgaatggatttgggaatagggctgagttatatcccgtggatgccacaacaaggcaggcaggcgccgctctgtgctagtggctgagtaggttgacaattcggtatgttgatttcctggtacccccccttcctttttttttgagtcttgtgtatgtagatctgagtatgggttctttctttcacgtggccagaaagagcatggttggaagctaaagaaaaaaaaaaaaaaaaaagcttatcga

SEQ ID NO: 2807 - DNA, 1724 bp, Zea mays
  Clone ID: ZEAMA-23APR03-CLUSTER5395_1
acctaggcgagctgccgagctattgctcggcgcctccatctcgtccacaccacacagccgttgagtccaattcgctcactcaccgtcaaacccacacctcaaactccttcccttcaagaatgtcagattatccactgcggcctcttcctcctcttcctccgcccctcccaccatgattgccacccatctctccccagccctcaagcagtaccgcttcccgtccccgctccactccacctctcacaaccaccaccttcccgtgcacctcccgctcccccgccgccaccgcaacttcgctaagcccgccgcggccgcgccagacctcctcgccagcgtcgagtccgtggcctccgcggcctccgtcctggccgccatcgtgctcgtccacgagtccgggcacttcctggccgcggcctcccggggcatccacgtctcccagttctccatcggcttcggcccggcgctcgcccgcttccgcctcggccccgtggagtacgcgctccgcgccatcccgctgggcggctacgtaggcttccccgacgacgacccggagtccggcttcgcgcctgacgaccccgacctcctccgcaaccgccccgtcccggaccgcctgctcgtcgtctccgccggcgtcgccgccaacctcgccttcgccttcctcatcgtctacgcgcaggcgctcaccgtcggcgtccccgtgcaggcgcagctccccggggttctcgtgcccgaggttctcccgggctccgtggccgcgcgcgcgggcctcctccccggggacatcatcctcgctgtgcccggggccgcgccggacccgtccgtccccgtcctcgtcgacctcatcaaggccagccccagcagggaggtgcccctcaccgtctcgagagccgcgcccggggcggtggacaggcggtccgttgagctcaccgtcgtgccggacaccagcgccgatggctcggggcgcatcggcgtgcagctctcccccaacgtccgcgtcacgcgcgtgcgcccccagaacctggccgacgctaccgtccttgccgtgcgcgagttcacgctcttgaccgggacggtgttcgacgggctcaggcagacattgctcaacttctctcagtccgccgacaaggtgtcaggccctgttgccatcattgcagtgggagcggaagtggccaggtccagcgcggatgggctgttccagtttgcggcggtgatcaatctcaacctcgcagccataaacttgttgcccttgccagcattggacggtggcaccttggcattgatccttcttgaggcagctcggggtgggcgcaagatcccccgagaagttgaacagggtattatgtcatcggggatactggtggtgctcatggttggcatgttcctcattgtacgtgacacactcaaccttgatttcatcaaggagatcttgtgatacttcgcgtgaaaaatcaattgattgcagttgtagtaaaattgccagtgtcagaacttggttggcctggaaatgtgtagttgttgtgattctttttgcctttggtgggactgctctaccactctagtttcttgctatactgatcgtagtttcttgtattgctggttttggaatgaagcttgtgatattatagttaatcgtgactgagatgtgttgtttgagaggatggatgggaaggggctggagacagaggtggaggtgctaatgttaaaaaagaaaaaaaaaaaataaa

SEQ ID NO: 2808 - DNA, 833 bp, Zea mays
  Clone ID: ZEAMA-23APR03-CLUSTER5408_2
agaacacgtctgcctctcaccaaccgcggcttgccaaccttctaattagcctttgacccacccccccgccggccgccgctgcagaccatggagcacgcgtccgccttcctcgcgcgcgcgctcaccactccgcttccggcatccgccgccctcccgcggcgccgcccggctcgcgtggccgtcgccgccgcggcgccggagcgcaggccgccgggcgcggtggcgtccaccaccaactacgtcgtgccgctcgacgcggcgccgtccgggatcacgcgcccgctcgtcgagatcctccgcgacctcaacaagcgcgtcccggacgccatcgtgcggccctcctcccggcgcgcctccgcctccgaccccgtcatcccctggtaccatgccaataggatgctcagcttttatgctccaggttcacagggaggctgctggaacagcatcgctgagcgatgaacggttcgacgaccccgtgtctgcggcagaagaggcagcgttctgcaaagcctgcgcgaggttcggtttcggcctttacctgtaccatgaagacgagacaccatagaagaccaacaatttctccacatcgtctatgccggccctgttctgttcagatttgcgcttgaggggctgtgctctactgttgttgatcagtaagtctatcagatacccatcccattgctgctaggtccttgagctgttgtaacgctggtactatgttgtttgctcgttttggtagctttgtcttgcaaaaaaatgttgtcagctacaattggtatggattatggaactattagtatatatgcaatacttttttgttgcttacctctaag

SEQ ID NO: 2809 - DNA, 1491 bp, Zea mays
  Clone ID: ZEAMA-23APR03-CLUSTER54247_1
tcagctacgtaggccccccccccagtgatagcaagaaagtggctacagagaaggcctgccggcggactcgaacaaagacaccatgctcacgagaccattacctattacatcctaatccaatactctttccgttttccttcctcgtcgcggtcgtgggtcacttgccgccgcgccggcaacgtccccttcccatccccagccacgcataaatcaatcgatgcattggtccttggcacgacttgattcctgattccctctgctgttctccacccgctctctctctttcgcgtggcatttcttcctgccagcgacgaattggcgcgcgccgccgccgccgtctgcccaggcccttcgcccacccaccagggccatgaaggaaggtataccatatatgttcatgcctcaagggagaagcctgaacatgtcagtcccatatttgttggtcgagagatagacagtgaaaaggtaacttggggtaaaatttctatggttgatgctgagaggaggttgatggcaaatgctctacaagatattgacaatcagcattttattttgctatctgatagctgtgtacctttgcacagttttgattatgtatatgactacctgatgggtgcaaatctcagttttattgactgcttttatgatcctggaccacatggaaattttagatattcaaaaaatatgttacctgaggtcacagagactgattttaggaagggttcacagtggttctcagtcaaacgccaacatgcgttgatgattattgcagatagtctttactatactaagttcaagcttcattgcaggcctgggatggaagatggtcgcaactgctacgctgacgaacattatttgccaacagtattccgtatgatggacccagatggaattgctaattggtctgtaacccatgttgactggtctgaagggaagtggcatccaaaagcttaccgggcaaagcacgttaatttggagcttctgaagaatatagcatcaatcgacgtgagccaccatgtcactagtgatggcaagaaagtggtcacagagaacccctgcctatggaatggagcaaagagaccatgctacctgtttgcgaggaagttctaccctgaatccataaacaatctcttgaccttgttcgcgaattacacacttatttgagcttctaggtgacgcttagaggctacaggaaatattttgttatagaaatccttgtacattggataggaacagaataggagattaattaacagaatagcaattggtgaggagaaggctttcggctttcgctgcagcaacacagtggcttcggatttaccacaggccattggtactcctttagcctcgttactttcatagtttatcctctccacatatctttagctgtggttttaccatgtacatcaagcttatttggacaagaaatggtcattaaatggaaaatcagagatcatggtcttaaaaaaaaaaaaaaaaactcgagcccgg

SEQ ID NO: 2810 - DNA, 1613 bp, Zea mays
  Clone ID: ZEAMA-23APR03-CLUSTER54732_1
ttttttttttttttttagctttaacgacattgatgtatcatgccaataacaccagggatccaggatccgcaagcaggagtgggaacaccgatataggttgatacactgcacgctgagtgttaatttattcatacaggttcgtgctgaggtgcaaaccctgcagcttggcatcgagcacctcggagcagatcttgcccattgtctggtagaaggtgacgaggtcggagacctggttgacggtcatctccgccatgagtgcccgcgccgccgcctcgcgtacgcccttcaccttgaggctgttgaggtaccctgacgcgttccgaccgtggcgcccatctgcttcagccgcttctcctgctgcacgctcagcgacgccgtgttcgactcgaggaactcggctccggcttcgagctcgcgctgctccgccggcttggtgcggccgccggagaggtacatgtccttggcgagcgagaagctccgggagatgaccttgcgccgcctctccatctccttgctcagcttgggcgacgacgacgcggggagggggagcgcggcgcccggccggggcaagtgcgtagccgccgtcttctcctggtacgcgaccacggcgcggacgaactcctggtacgcccgggcgcagccggggtagtcgaactcgtcggagcctggcctgcgcatgcgctccgggtggaactggaggcccatgatgaaccttccctcgccggggctgtacgccgccgggtcgtagaacgcctcgacgagcccgtccggcgcgaacgccatgggcacgaaccgctgcgccaggcgccgcacgccctggtggtggtagctgttgaccatgagccgcgcgccgtcggcgaggtcgcccgcgaaccactcgtgcagcggcgtgccgggcacgacgcgcaccgggtggcggtgctcgtcgtagtcggcgtagttgatgtgctggacctggacctgctgggcctcagccagctcgtgctccacgtcctggtacagcgagccgccgcaggccacgttgagcacctgcgagccgcggcagatgccgaggtaggggatgttgcgctccaggcagcggcgcgcgaggcggagctcgatggagtccttctcgcggtcgacggccgcgtcgctcgcgtgcaggcgccgcacggcctccagctgctccggagagagcgaggcgtcggcggactcgtagagggacgggtccacgtcctcgccctcgcagaggagcacgccgtggatgggctcgaacgagtccagcagcgcatgcacgcccgccacgcgcggcacgatcaccggcaccgcgccgtagcccacgatgaggtccaggtggtactcaccgacgaagtcgacgaacttgttcttgcggacagtgcggcgcgagacgatgagaacgcgggggaggacgcaggagaggtctgctggggaggaagacatggccggagcgcctctcgcagcgcgcgcgcgaaagcaatcgcgatcttttttttttctctcgtggttagctagccggccggccggccctctagcgagagattaattggctgtgggctggctgattgagagttcttggatttgatcccggccccggcggcctcgagaggtaccca

SEQ ID NO: 2811 - DNA, 1090 bp, Zea mays
  Clone ID: ZEAMA-23APR03-CLUSTER54803_1
aaagcagccccccaccggtccaccgcgcgtccccatcggcggcggtagggcagaacagaacaccggagatggagcgggagcgcggcgcgtcggcggcgctgtgggggcacgcgcacctcccactgctggcgcgcgccgggtccaaggagtcggtcgagtacatcctgcaggcgctctggcgcacgcgccgcacgggcctcgacgccgccgaccgcaccgtcgcccgcgacgccctccagctctcctccgacgccgagctcgaccctgtcagtacccctatttccagcttttcttcgttgcttccttccttccttcctgcgccgtcgctcgcgtcgcgggcgggcgggcgttgcaggtccagaccgctcagtacccaactggtgctgcagctgctggtgtgcctgaggatactgatcagacggtgcgtcaacgaggacttcgccaaggacgacatccccaagctcttccccgaggaggtgccccccgatctgcagaagctgctcaccttgctgctgcagaagttccagccggagtggcaggcggatgccgccaaggatcaggcttctgctgcagcgcctccgccgccgccgccgcatctaacgcagttccctccgccgcagcccgaggcaagatggttctccagaacgacattgatctgctcaacccgccggcagaactcgagaagctcaagcacaagaaaaagagactcgtccagtcgcccaactccttcttcatggatgttaagtgccaggggtgcttcagcataaccactgttttcagccactcccagactgttgttgtgtgccctggctgccaaactgtcctctgccaacccacaggaggaaaggcaaggctcactgagggctgctctttccgcaggaagggagactagagcggatgtggtcttcaagttttgctctatgccagatactagcgtcatgaactgcctttagctaagattttccataagttgttctcgagcagctatgtgttgcatgttggctacttccaaacttatatctggtttggtttggattgtgatgaactaatggctctttgaatttatattatgatgttgacgatatttggc

SEQ ID NO: 2812 - DNA, 835 bp, Zea mays
  unsure (1)..(835): unsure at all n locations
  Clone ID: ZEAMA-23APR03-CLUSTER5506_2
atccccaatctcctcccagcgatttgccttgccgaggtcgccttgccgctgttcccgagcccgacgccttgccgcccctgccctgctaggctgctacagaggaggagaacccccagattttcccacccccatggcaacgcgcgcgccgccgcagtcttcttcgaccggatccgtgacggtgacgatcgacccgtccccctcgtcgtcgtcctcctccgcnccgcccgcgtcggcgccggccccggccccggctcctgagtcggtggtgctgcgcctgaagcgccgggctaagaagaaggtgtcgtggaaggaggggacggtggacaacgagggcctcggccgcaagagctctaagaagtgctgcatattccacaaggaggtccccttcgacgaggactgcagcgacgacgaggcccccggcggcggcggcggcggcgggcaccggtgccctcgccctcatggtgacgccggcgaggggaccagcggatgctcgtcttcttcccacgacccatggccaccactgatctccgtgcgtgttactcgttcttctctatcctccttagagaaatggttgcacaaatcatgcaaaatggagggcaattttgttcatccatgggcaactactactcacagttacaactagagctggacaaaatactcgtggtcagctcggctcgactcggctcgtttctattttgtcacgagctgagctagcatctcagctcggtttgttaacgagctaacttgttagcttgaatgagctaccatttgtcagtaaaacaaagtctacacttctattggatgaactaatgtgatgacctgtgttaatttggtg

SEQ ID NO: 2813 - DNA, 1843 bp, Zea mays
  Clone ID: ZEAMA-23APR03-CLUSTER5524_3
gcacgagaccattacctagaacatcctaatcgaaaagaacgcttccgccccgccgccaccttccccgctctcctccctccgctcgcctccgcttccgttccgcgccctgcccccggaaggcaagcaaagccctcgctacttgcggagcgtcgttggtcaaaccctagcacacgtacgagcaggccagccccgcccgctcccattcccaggccctcatccatggcggcgctctccgtgcccctccacgccgccgccggatcccgcgccgccgcggccgaccccgtcaaggttccgtgcgtgaggagcactggttcagcccatttcggccgcgccttcccctccgtcgcggtctcctctttggctgcgaggcacatcgagccgatgagagcgatagctacacaggcgccccctgccgtgccacaatatttgagtggcgagaagacaaagatcggcatcaacggctttgggcggattggcaggttggtcctgcgaattgcaactagcagagacgatattgaagttgtggctgtgaatgaccctttcgttgatgctaagtacatggcctatatgttcaagtatgactctactcatggcccgtttaaaggttctatttgtgttgtggatgattcaaccctggagatcaatgggaagaaggtcacaattacaagcaaaagagatcctgcagagattccatggggtaactttggggctgaatatgttgttgaatcttctggtgtctttacaacgactgataaagcatcagcacacttaaagggtggtgctaagaaagtggtgatatctgcaccatcagcagatgctcccatgtttgtagttggagttaatgagaatagctatgattcgaagatgaatgttgtttctaatgcaagttgcaccaccaactgccttgctccacttgccaaggttgtacatgaggaatttggcatcgtggagggccttatgacaactgttcatgccacaacagccacccagaagaccgttgatggtccttcaatgaaggattggagaggaggacgtggtgctggccaaaacataattcctagctccactggtgcagcaaaggctgttggaaaagttctgcctgagctgaatggaaagctcactggcatggccttccgagttccaacaccaaatgtctctgttgtggacttgacatgccggattgagaaaaacgcctcctatgatgatgtgaaagcagccatcaaggcggcatcagagggtgcactcaaaggtattcttggctacacagacgaggacgttgtttccaatgattttgttggtgattctaggtcaagcatctttgatgccaaggctggtatcggactgagctcttctttcatgaagcttgtgtcttggtatgacaacgagtggggctacagcaaccgggttctggatctgatcgcccacatggctctcgtcagtgccgccgccaagctctgatgtccgtactcgtttctccagtagtagcttagaaaaaaagactgcaattttgacggccattttctgttagctgttgtttggaataagatcaaatgctggaacacttcgaactcgcgcgagactggactcagatccatggcctgtattttagttgtagaagtgggcaaatttgcaccgtagtaccctggcatggttatatgcggaattgttgattgatgagtcgttgtacggtttgtccacttaataataagttgatgtgggagccccttaattaggcggtattaatggaaatatataggatggcaatggccaaaaaaccccaaaaaaaaaaaaaaatacacccaaaaaaaaaaaaaaaaaagggcggcaaccgactagtgagctc

SEQ ID NO: 2814 - DNA, 1040 bp, Zea mays
  Clone ID: ZEAMA-23APR03-CLUSTER5530_10
ctctttgcgccgccgcagccccaaaccctcatcccccatcaatctcaggggcgccccagccaccccacccttcactcacctaaccatggcggacggcggcgcgagcgtggtggagagcgcggcgggttcggccgtggcccgcgccaagaggaagagaagtgggttcccgtcaccaagctcggccgccttgtcaaggagaacaagatcaccaagatcgaggagatctacctccactcgctccccgtcaaggagcaccagatcgtcgagaccctcgtcccggggctcaaggacgaggtcatgaagatcacgcccgtccagaagcagacccgtgccgggcagcgcactcgcttcaaggccttcgtcgttgtcggcgatggcgacggccacgtcggcctgggagtcaagtgcgccaaggaggtggccaccgccatccgcggcgccatcatcctagccaagctctccgtcgtccccgtcaggagagggtactgggggaacaagatcggacagccccacaccgtgccctgcaaggtcaccggcaagtgtggctccgtcactgtgcgcatggtgcccgctcccaggggttctggcatcgtcgccgcgcgcgtgcccaagaaggtgctgcagttcgctggcattgaggatgtcttcacctcatcccgtggctccactaagacccttggcaacttcgtcaaggcaaccttcgactgcctgatgaagacctacggcttcctcactcctgaattctggagccagaccaagttctccatggccccgttccagcagtacaccgacctgctggcaaagcccaccaagggtcttgtgctcgaggccccaactgagacagtagaggcttaggatggtttgagtggagagctctactcgtcgggtgcatgtctaaatgcgatatctatattatagctaagaactgcgggagtcaaattttgggttctgttttgtcctggatgctgttctgtactgtcaagttttggattttgccatgtcactttttatctatgaatgctacataatgatctcatgat

SEQ ID NO: 2815 - DNA, 853 bp, Zea mays
  unsure (1)..(853): unsure at all n locations
  Clone ID: ZEAMA-23APR03-CLUSTER55734_1
ttttttttttttttttttttttttttttttgagtgatagcttttataaatacccattcagttgcccatataaatatgacttatgtgtggacagcaacaattttacatcaaacatttgcaaacacccttccaatcctgcgtggccaaaaaaaatacgaagatgcataaatatacatacacacgttgtaaaaagcagaacacagctgactgtccaaacacaagcagacatagcatagcatagcatatacatgctctacaggcactctatgaaacccgatactctcgtctcacaagcagtcattccatgatgttcattttggcatacgcatgcggggcaaaccgtcttctagattttagactgagaccgtctgttatttctcatgctcctcaccgaacagaaacccgagcgacgacgcccctcctggtgcacagcgcaccctcgtcgaaggccggtcagtgataagaagcccggagcttaactggccggtatggtagatgttgcagggaggtttgtgagacgagagtatcgggttggagacctccctcttgggaggagaatgaactgcttcggttccgaccgtcttcttctcgtcgtcgtcctgcttgacgcatccgctgttggtatccggagccttctcggtttcctggttgctcgtgcgagtgcgatacaggacggtttcctccggctcgaagaggtagctgagagagcttcggccaccaccgctgctgcctcctcgactcatctttgttcagacttcagatcagtctgtggcttgcaggtgctgctgcgatgagcttgtggtctggtcctccactctctgctagtgtgcccccggccggaccncnagggtacc

SEQ ID NO: 2816 - DNA, 1386 bp, Zea mays
  unsure (1)..(1386): unsure at all n locations
  Clone ID: ZEAMA-23APR03-CLUSTER5607_3
ggtcgaagaagaagaaggccctcgatctcctgccctccactccaccagancnggtgcgatnccggtcccgaccgacctcagcacagcatgttcgtggtcgaggacaagggcggcgcatcgcgctgatgctggcgtcgctactgttcctgggcacgtggccggccgtgctgacgctgctggagcgccggggccggctgccgcagcacacgtacctggactactccgtcacgaacctcctcgcggccgtgctcatcgcgctcaccttcggccagctcgggggcgccaggcgcggcatgcccaacttcctcacgcagctcggccagcccaactggccctccgtgctgttcgccatggccgggggcgtcgtgctcagcgtcggcaacctctccacccagtacgcttgggcctatgtgggcctctccgtcactgaggtcatcagctccagcatggtggtggtcataggcaccacgctgaactacttcctggacaaccgcatcaacagggcagagattctgttccctggtgtggcgtgcttcctcgtcgccgtcatccttggctccgctgtccattcctccaatgcagctgacaatgagcagaaactcggtgcctccacgaatgcctacaaactcgggacacgtggaaatgtggaaccaagcaaacaagctgtagacagaggtagtataacatgtgaaaactgctgctgatttgttgcagatttttttcccagtaacttatctagtttcaggtgttcattgtctatctgaagaagaaagaacaaatctaatttcagatgctcccaaagacttggaggagagtggagcctctggaatccggcaacctgacaaagctgaggcaggcactgcagagtacctcattgagcttgaagaacggcgatcaattaaggtattcggttcaaacaccttcatcgggctggggatcgtcttcttcgcgggcgtgtgcttctcgctcttctccccggcgttcaacctggccaccaacgaccagtggcacacgctcagggacggcgtgccgcacctggtggtgtacaccnnnnnnnnnnnnnnnnnnnnnnnnnncttcgtcgtcggcgtcggactcaacgtcctgttcctctaccgccccatnnnnnnnnnnnnnnnnnnnnnnntcggngcctacctcagggactgggacggccgccagtgggcgctcctcgccggcctgctctgcggcttcggcaacggcttccagttcatgggcggccaggcagcagggtacgccgccgctgacgctgtccaggccctgccgctcgtcagcaccttctggggcgtactgctcttcggggagtaccgcaagtcgtcgcggaagacctacgtcctgctcggcttcatgctcttcatgttcgtc

SEQ ID NO: 2817 - DNA, 3055 bp, Zea mays
  Clone ID: ZEAMA-23APR03-CLUSTER5622_2
aaaaaccctaccctccctctgctctcagccgccaacgccatgggctccaccgccgctgcctccgtgctcccggtgtccgccggctccggcgagaacctcgtcctcatcctcgactacggctcgcagtacacgcacctcatcacccgccgcgtgcgccagctcggcgtcctctccctctgcgtgtccggcacggcgccgctcgcctccctggagggcctccgcccacgcgccgtcatcctctccggcgggccccactcagtccacgcccccggggcgcccgccttccccgagggattcctgggcttcgcggctgccgcgggcgcgcacgtgctcggcgtctgctatgggatgcagctcctcgtgcagtcccttggaggcgccgttgtgtccggggagcgccaggagtacgggaaaatggacgttgaggtgacggcggcctcctccgcgctctacgggcaggcggagaccgggaagcgccagacggtgtggatgagccatggcgacgaggtggttaggctgccggaagggttcgaggtggttgctcgcagcgtgcagggagccgtcgcggccattgagaaccgggagaatcgcttttatgggctccaataccaccccgaggtggtgttgattcaacggtcgccgccactctcgttcacaaggcgataggagataggcttcactgtgtttttgttgataatggtctattaaggtacaaggagggagagcgagtaatgacaacctttgaaagtgatttgcacctgccagtgacatgtgttgatgcctcagagcaatttctcagcaagttaaagggtgtcgaagacccagagaagaaaagaaagatcattggcagggaattcatagctgtctttgatgactttgctcacaagctggaacagaagataggaaaaaggcccgaatatttagttcaagggactttgtaccctgatgtaattgaatcatgcccacctcctgggagtggaaggacacattcccacaccatcaaaagccatcacaacgtaggtggccttccaaaagatatgaaattaaaacttattgaaccactcaagctcctattcaaggacgaggtgcggaagttggggggtattttgaatgtcccagattcatttttgaagcgacacccatttcctgggcctggtcttgcagtacgtgtcctaggtgatgttacacaaggcaatgctttggaggttcttcgtcaggtggacgagatatttgttcagtctattaaagacgcaggcctgtatgataaaatttggcaagcttttgctgtgttcttgccagtacagacagttggagttcagggtgaccagcgaacccactccaatgccgttgttttaagggcaatcaccagtgaggatggcatgactgcagattggtactattttgagcatgcattcctggtagatgtggtaaacaagatttgcaacaatgtgcgtggcatcaaccgcgtttgccaggacatcacatctaagccgcctgcaacggtggagtgggagtaggaggatgggagggaccctatggtctggtctgtctgtctgtcttgggttaaaacccgctatgtcatgtcactgctctcaacacgttgcatggatgtcacaaatagcaagcagttaagagtgaccattcgtcagtcaatacattaggtttatcatgaattgtttgttacttaatacaaggactgcattgcatggattgtaaagtgtaaccaccagtagctaagccttgtagacaacgacaaagcatgggaggatggccctggggttgaacaccagcagctcctccaggttggagtacaccccggccgaccccgcaaccgagtcgtactccgactcctcggcggcttcggcgacggcctcctcctctggtaccgcttctttgggccgcttcacccttcccgcgatgacccggcacaccagcatcgcccttggagtggtttcctcatccagtccggcgccagcctccgcagcgggcacggcgtcgtgcgcgcggccgctcgtggccatggtcagcaccccgccgctgctgaagccgtcgcggatgatgccgcacgctgcgcaggtccccgcggcgtcgcagaggtgcgtggcgccgttgaggccgagcgagcaggccagggtggcgcagtggaaccggagcagctcgttgccgtcggcggtgcagcgcgggtgcctgttgctgttggccgccgctaccgccagctgctcggcgcccgccctggccttgacagcgtcgcggtactcctcgaagcgggccagcgttctgggcgtgttgttcaccttgaggatgcggtcgaccttgcacacggggctctgcttcttgagccagctggactggaagatgatctcgatgatgttgcggctcgtgtcgtcagtgccaagctcggacactgcgtgcctgatggactggtggagctggaggctctcctgcctgacgaacacctcgccgcagtccgggcaggggcagatggtggtggccctcatggaggcgctgcccgccaccaccatgtggcactcgtagcaccccgaaagccgcctcagctgcatgccggccctgaacgacgacccgcccgacgacgacgacgacccgccacgctgcagctgcttgttgctgccagcgccacattggggcttcttcacgcaccgatcgctgctcccgctcacggacgcgcggcgcttgcagggctcgcctgccgacgccgtgcccgtggtttccttgggcggcacgggcacgctgtcgtccttgagcttgcagatggacggcgcggagcagcccagccccctcttgctcctgttgccggtgtccggcgcccgcggccgcgcgtggctgttcctgcacgagaagaggctcttgaacgctgctaacctgtaggacgggctctccagctcctccttattggtggtcgtcgtcgtcgtcgtcttcaccatggcggcagcggaagtcttattggcctccctgacgcctgccgatctgcccggccgttccaccattgcgatcctattcctctcgctagctagctttcctccaagctctagatgtt

SEQ ID NO: 2818 - DNA, 1302 bp, Zea mays
  Clone ID: ZEAMA-23APR03-CLUSTER5651_2
aactcctactcctccctctatataaatatacgcatctccaccctgttcctgggtcctctcttcttccaccaccacctcctactccgctgcaaccccaaatctctccttcctcgcatacgcgcggaagcagatcgagatgctgaagctgaaggagatcctggacagcgacgccagcgacgtgaactacgagcggatgatgaaagacatccagctggacctcgtccatacgcctagccggcgagccgccgcatcctcacacgggcgccacaggaagaagaactcagtagccgcgacggcgcagtctgacgacaacaagatgctcgcgctgtggagcgtggacagggtgagcagcggcagccggcggcacgacatggacctgcggccgccgcagagcgaggctgccgagaccgagaagggaaagaagcggccatcctccgagccagtgccagttgtgaccgtgaaggacctcagcgtggacaagcaggaggtcctctcacggcccacggtgatggcagtggcggcgacggccaccacgactgagccacaccgggagtggaagaagaaggtgatcgaccggctatcctcggaggcgcagcggctccgtgacctccggaccatcgtccaggagctgcgcgccggcgtggaggcgtcgtcggacgcggagctggacggcgtcaaggcgcagatggccggcgcggagggcgccatcgcggagctggtcgacgcgaacgctaagctcctgaagaaggcggagggttcacgtcggcgggcgacggcggcggcgacgtggacctgcgcagccggagccagcgcaagatcctggagcgcgtgcgcaagatgtcggacaaggccgggcggctggagctggagctgcagcggttccagcacgcgctgctgcggcacgaggaggagcgcgcggcgcggcgcgcggccaaggcggcggcggcgagcaccaccgtgcaggtgcagcggcggtcgcgggtgcagcttgtggagtacctgtacgggcggcggcgcgacagccggcggcccaagcagaaggcccgcggcccgtcctgctgcatgagggccaaggccatcgacgactgacgtgacgtggcgtcctaggtaaataatttaattactggactgatcttagttacgtcggaggttctttttcctaccctaaagtaaagtaaggtcttaagatgtaaatcgtacgtaggcaactcttgtgttcctcgtctgcaaatttttcgcatgtaaaattccagacggtaatcttcggtctcgttgctttccagttcttagaaaaaaatattt

SEQ ID NO: 2819 - DNA, 521 bp, Zea mays
  unsure (1)..(521): unsure at all n locations
  Clone ID: ZEAMA-23APR03-CLUSTER565878_1
aacgtccgtagttccgtctctcgtgtttaacggcagtctctctacaactttactggatttctttgttacagcaagatgttggaatacaaaaacgtcgttgggggacggttgaagctgaagggtaaaacgctggacgttaaagatggtggagtaaagaaaaagaagaagaagtaccagcgtgaggagtcgtctcagactgaatatgataagaatggagatgaagaaaactcacatcttgactatgaccatcttcacaccagcagagcgccgatacatggaacagaagcagaagatcgacatgcagaagatagccaaagtcgccaacaagtcacacaaggaccgcatgcaggacttcaaccagtacctagctaagctcagcgaccactacgacatccccaaagttggtcctggctaacatgaccaatctagctgtgttacgcacaaacaattatatgctgtgtgggtctatctagttntctattagcattttatatatcgttttacagttgttgtaaaacgac

SEQ ID NO: 2820 - DNA, 1338 bp, Zea mays
  Clone ID: ZEAMA-23APR03-CLUSTER565_1
ataacccggttcatattccatctcaaattcagagccgtcgcctccccctccccctcccccctccctctccaaccccgccgcaccctcgccatgacacactctccgttggcggccatcaagccgccgcgtccgttcttccaatctcaccctagccatacggagctcgtcgactcctacctccgtacctgggtcgaggacggcgtcaagaccggcgcgttcatccacgatgccgacgtgtacggttccgaccccgccgacctcctccagcagttcgcgccggtggtggcccacaacggtgagcgggcgtggtacttctacagcctgctgcgctacaagcacagcagcgggaagcggaagaagcgatccaccgggtccgggacctggcatagcgaagccaaaccgaagcccgtgttcatggcgtccaagtcgaactggcaccagattggactccgccagaccttctccttcgtcgtcaggaatgaaaccggcgcgccgttccgcacgggttggctcatgatggagcaccgcctcctcaacgacgacggcgaggagaaacagcaggaggaggagggcttcctcgtatatcgcgtcctgtgcaaggtgtaccgcagcccgcgcaagcccgagccaagcggcaacaaggccgcggcggcggcctcgcccgggcacaagatcgaggccgacgacgacgaatctaacgacgcaacgttggacgaaaacgacgacgacgaatctaacgacgcaacgttggacgaaaacgacgacggctccaatgcggcgccaccggcggcatctggacgcaagaggaaatccgacgacgtcgaacccagcgaagcgaaggcgagcgacgtgatcgccggaggggccgcggcggcgcccgcgcccaagaaaaagtccgacggcagcagctcccctgtcgctacatctcctacgacggaaatgcagtgccctgggtgcggccaccatgtcctcgttacaatgaacagggcggagcccaaatcgcagacggagatcgcgaaggacgagtcggcccccggcgctcgtcagcagggcgaaattcggatgtatgagttcctttgagatcccccccacccaaaaaaaaaaatcctggaaacagaacccattcctcgtgtattccccggaagaagtcattacaaggttttggggggttaatcattagggtagtttggttgcatttttaggttgccggtttagtttactaatgtttttcgttctatctttgagaggaaatgtacgaaacagaatgtgatactgctaccggaccttaaagagggcgaaaatgatgcaacagcctctagtacaaaaaaaaaaaaaaaa

SEQ ID NO: 2821 - DNA, 2021 bp, Zea mays
  Clone ID: ZEAMA-23APR03-CLUSTER5661_2
agtataaaatttcgtttttctcctctcagtctccgacgccgccgcactcatccccccagacgaccaccctcctcctcctcccccacccacctcgccggaaccctagcgccgaccgcctgccgtgcccatcgacggcgatcgcattgctgcgccccgatggcgacccgcgcctccaagaattgcctctgcgcgggcagctcttcgttcgatgaccccgacgtggtcgaggtgtctccggcaaccgccgcggctgcagggtgggcctccggccaccacaagaggaagcggagccaggttgtaccgcaagaagtgattgaaatcgatgatgatgatcctgatggagtcatacttattggtgataaagcacaggtggaaaagaataagcaaactgctgtatgtcccatggattgctcaaagcatgccaagagtggttgggttcaggacatccctggtccaagcacatatgcttcaaaatataccagttcctgggttgacctgaaagtgtttcaagacgaggcagtttacaactattctgatggctacccctttgatggatttgaagaagactatgcttatgatgaagatgagtttgaggatgatggttatgacactccactcattgaaagtgagtatcaatttggtttgtctgccaagtttgataacttcaatgttctacatggtctggaggcttctttaccgtggaagcagaagactgctattgagattgcaaataagaccaaacctagtaaggctgtagatgataaaatcgaagaaaaatacaaggccttcaaacgatttgatactgttgatgatcatagtgatcattattattcaaagccagaatcaagaaaggttcaggcggtaaaaaagccatcaaaagactgggtcaaacgtattcagcatgagtggaaagtcttagagaaagatttgccagatactatatttgtgagggcatatgaggatagaatggacctgcttagagctgtaattatgggaccagctggtactccttaccatgacgggctcttcttctttgacatttacttccctcctcagtatccgaatgtaccgccgatagtgaattaccgtgctggtggtttgcggcttaatccaaacttgtatgcttgcgggaaggtgtgccttagcctcctaaacacctggactggcagtggatgtgagaagtggaacccggccaattcaactatgctgcaggtcctggtctctattcaagctttggttttgaatgcaaagccttatttcaatgagcctggctacgctatgcatgctaacacggcccacggggagaagaaatccctgacatataatgaagacacgttcctgcattcctgcaggacgatgctgtattctcttcgaaatccaccaaagaatttcgaggattttgttgctggccatttccgcgagtatgggcgcaacatcctcgtggcttgcagagcctacctggagggtgcccaggttggatgcctctccggtgacggagtgcaagacgttgatgaaggcgacaagagctgctcggtgaggttcaagcagtcactgaagaggcttcacgaggaacttctggcggagttcaccgcgaagggcgcggactgtggcaagttcctcagcgagaaggcaaggtccggagcttccacatcggcagcggacaccacgttgaggctgtaaggcggagtcgggcttgctgttggaaataaacctgccattcaagctatcctcggtcgatggggagttgggccacaccgatgcaacacaacacagcaagtttgatgcctgagctgccgatcgtctaactgctttctgtaggtagtctatgtatatatccctgtctagatcttctggtaaagacataagcgagacatattgggcgtttagggacaccattataccgtaggtatttacgtgtttataactgctggccgcagccccggcagctgtgtcgggctgtgacctcgtcctcagcttcagcttgtgctgatatgattgggaccacccaccatttggatatc

SEQ ID NO: 2822 - DNA, 644 bp, Zea mays
  Clone ID: ZEAMA-23APR03-CLUSTER5663_4
aaaaaaaccctatcgtccctcccgcggaggtggaggcggaggtggaggcggaggaggggagatggcgcgcggcgtggtgtctggggcgaagggtggcgcggccggcggcggtggcaagaagaagggctctgtcaccttcacgatcgactgcaccaagcccgtcgatgacaagatcatggagatcgccacgctcgagaagttcctgcaggagcgcatcaaggtcgctggaggcaaggccggccagctcggcgagggcgtcaccgtcacccgcgataagtccaaggtcaccgtcacctccgacgggcctttctctaagaggtacctgaagtacttgaccaagaagtacctgaagaagcacaatgtccgtgactggctccgagttgtagcggcaagcaaggaccgcagtgtatatgagctacggtacttcaacattgctgagaacgaggaggaataggaggcttagaccttatagactgcaccaagccttatctgtcttgtgaactttggatggttgggacactcatactgtagccttttaagggatgagttttgatgaaaaaaaaaaaaaaaaaaaaaaaaaaaaaaaaaaaaaaaaaaaaaaaaaaaaaaaaaaaaaaaaaaaaaaaggggcggccggttttaaa

SEQ ID NO: 2823 - DNA, 1386 bp, Zea mays
  Clone ID: ZEAMA-23APR03-CLUSTER5664_1
ggcacgaggctgccccgtcctcgcctgccgcaagaacctcaccgagacctgccccagcgagctgcagctgcgctccccggccggcagcgtcctcgcgtgcaagagcggctgcgaggccttccgcaccgacgagctgtgctgccgccacaagtcccacgaccctcgcttcacttgtcacggactcgcgtccacaaaccacaaccagctcactcaagaacaaagaacccaacccatggcttctcccaagccgctcctcctgctcgccacctcgttcctgagctgcggcctcctggtggccgccgactacgccccaatgaccctgaccgtggtgaacaactgcccctacccggtgtggccgggcatccaggccaactccgggcacgacgtcctggagggcggcggcttcttcctcccgccgctctcccacaagtccttcccggcgccggcccacccctggtccggccgcatctgggcgcgcacgggctgcgcgggcgccggcgcgcagctccactgcgccacgggcgactgcggcgggcggctccagtgcggcgggctcggcggcgcggcgcccgcgacgctggcgcaggtgaacctccaccacggcaacgaccagacctcgtacggcgtgagcgtggtggacggcttcaacgtgggcctgtccgtgaccccgcacgagggccgcggcaactgccccgtcctcgcctgccgcaagaacctcaccgagacctgccccggcgagctgcagctgcgctccccggccggcagcgtcctcgcgtgcaagagcggctgcgaggccttccgcaccgacgagctgtgctgccgcaacatgtacaacagcccgcacacctgccgcgcctccaagtactcggagttcttcaagcgagagtgcccgcaggccttcacctacgcgcacgacagcccctcgctcacccacgagtgcgccgcgccgcgcgagctcaaggtcatcttctgccactagagctcggagggctgggctgggctgggcgcgccgcgcccgcccgtgcgccgccgccgccaacaagtgtcgctagtagaggtagtaggatttgcggtgcgtgtgttgtctagtgtgtgctggaatagctgtgggcctgtgggctgtggctgtgttcccgtcgtgtctgtggcggtgtggcctgtgtaggctgtctgtactctgtagtatactgggttgttggatgcatgcgttctggccgcaagactgatgtcatgctgttgctgcttactacagtttgcagtctgaaataaaaacttgtttgatgagcaaaaaaaaaaaaaaaaaaaaaaaaaaaaaaaaaaatgacaaaaaaaaaaaaatcggcccgtcgacccgggaattaattccggaccggtacctgcgggcca

SEQ ID NO: 2824 - DNA, 2099 bp, Zea mays
  Clone ID: ZEAMA-23APR03-CLUSTER5702_5
ggagagggagtgttttgttagagaagcgctagacagaaatcgtgtgaatttggttcatactattggtttcattccattgtgattactttttttactttagcttcttaatcttcactggacattcttcatgtggatgtagaattgaagaaatcccaattattcttgaggaagataaaatccagttccgtcatctactgtgtggagattggagaaatagaaatcttcttgagatatggctgccagcattagtcccaacacttgatagattgtatttctgggagagcaaagcttatgatgaagccaaggccagcacggacgcgtgggctccgcgcccgccaacgccaccacccactcccgagcgtcacccctccttaaccctagctgccacaacatcacgaaaggaccggatcttggtgagctcgagggtacatgacgcggttcttcctatcgcggcaggtgaccaggacctctatcccctccttgatggaggtcggggactgggatggaggccagggactcgacggcggagggcctggaggtggcggcaaaggcccgtcgcgccgcggcatgctgctcttgaaaatgggggtgtcaccttctaagcttgaagatgacaaggtccttgtgttatgtcaggagagggagtgttttgttagagaagcgctagacagaaatcgtgtgaattttttttcatactattggtttcattccattgtgattactttttttactttagcttcttaatcttcactggacattcttcatgtggatgtagaattgaagaaatcccaattattcttgaggaagataaaatccagttccgtcatctactgtgtggagattggagaaatagatcagtgtcctcaaaactttcaccatctagaaatcttcttgggactaatgctggcagccatatctcaacacttgatagattgtatttctgggagagcaagctttatgatgaagccaaggccagcagtgccatctgcaggaagtacggtgggaaatgtaagaagctaagacttcatgaatcaagaggggtgaatcaaattgataacgattttacccgtgcggcaagggaaagatgtcagtatcactgcatcctccaagatgatcggatatgctcttcaggacccatcaataagagagatggctgagcaaattgcaagtgaccctgtgttcaaccagatggttgaacagcttcagaaaagtgctcagagcatcttgggaatgcccttatgtaggatcctgctatgtccagaatgcttgagaacttgaccattctggctcataaggagtagcttgaggagaggatggcccgtatcaaggatgatccatccttgaagccaattcttgatgagatagataatgggcgtccatctgcaatgagctttccaaaacatttctcccgaagctagatacagtctactatatccacaatttcaagggagctaaaggggaacgccttttcaggtgctaccctgagccttggaaggtcatgagaaaggcatcgtcctacagctacatctgcctgcatcaacaagaggagatgccttcgttgaagagatctcttcagcctggggcagtgagacgcgtcaagctcgacagatgatgggaaattctgcacatacagtatatattaagctcctcgtgcagtacaggttgagacttgagagccccagcgatagaggtgttgtcgtgcaaggcccaaaaaccaatcgacgagcgggaagagatgataataaacatacttatgccagacttgaagagggaagagatgaacacaggcactgtgtttttgttttcttctatgacaactgattgttgacaactgtagatatcctctcatcggacgggcaggctgtagcaacaacactttgtttaatcaccatatattttgctaggacctctcgagagttgttgtgtcaataagagagtttacgcgactagatcttcatttctcacttctttggtttatacctatgctgaccggtgactgctaagttgcatattgccgctatcagaagttttccatgcagctttgttatctatgcaggggtttgtcagtttggaattctaaataataaaagggtgagagc

SEQ ID NO: 2825 - DNA, 2097 bp, Zea mays
  Clone ID: ZEAMA-23APR03-CLUSTER5702_6
cgccaccacccacttcccgacgtcacccctccttaaccctagctgccacaacatcacgaaaggaccggatcttggtgagctcgagggtacatgacgcggttcttcctatcgcggcaggtgaccaggacctctatcccctccttgatggaggtcggggactgggatggaggccagggactcgacggcggtgggcctggaggtggcggcaaaggcctcggcgtcgacggccgcggcggtgcgcatttctcggctcgttcattcttgtgccctccttcgattacttcatttcgtcgcgtcccaaatcggtcgatggaaaatggaatctcgatggcttttgttaaatctggattgctatgcatgtctagcgatgcacttggatttttggtacagtgagattggtagccgcacatggggaatctcgatggcttttgttaaatctggattgctatgcatgtctagcgatacacttggatttctggtaccgtgagattggtagttgcagatggatacagggggccttagtgaagtggcagcagaagacctgaatatgggggtggacacatcttctcatctggacgttgaagcaatgtcttcagttccttggtggtggtcggttaatgcttctttgtaacagcacgccagcaccagacgtggaaaactccgtcatgcaactattgtcaattgcaaattgttggtggatggcctcaaatcggcatgtccttgtattgtctgtgaggctttgagtgttgctgctcttgaaaatgggggtgtcaccttctaagcttgaagatgacaaggtccttgtgttatgtcaggagagggagtgttttgttagagaagcgctagacagaaatcgtgtgaattttttttcatactattggtttcattccattgtgattactttttttactttagcttcttaatcttcactggacattcttcatgtggatgtagaattgaagaaatcccaattattcttgaggaagataaaatccagttccgtcatctactgtgtggagattggagaaatagtgtcctcaaaactttcaccatctagaaatcttcttgggactaatgctggcagccatatctcaacacttgatagattgtatttctgggagagcaagctttatgatgaagccaaggccagcagtgccatctgcaggaagtacggtgggaaatgtaagaagctaagacttcatgaatcaagaggggtgaatcaaattgataacgattttacccgtgcggcaagggaaagatgtcagtatcactgcatcctccaagatgatcggatatgctcttcaggacccatcaataagagagatggctgagcaaattgcaagtgaccctgtgttcaaccagatggttgaacagcttcagaaaagtgctcagagcatcttgggaatgcccttatgatcctgctatgtccagaatgcttgagaacttgaccattctggctcataaggagtagcttgaggagaggatggcccgtatcaaggatgatccatccttgaagccaattcttgatgagatagataatgggcgtccatctgcaatggtgaagtgttgttactgttgtctactattactatccatgagatctgtttggaatatgcatcggacttgtggtgaacatgaatgactttggtcattctgagataatattagctacttacacagggaatatgccgagtttatgcatcttccaagaaattacagattttggtaattcgtcttttttccttttggggctgcatgattcatggctgatgagataagattatatcaaactatattgtcactttccaaaacatttctcccgaagctagatacggggtgctatatccacaatttcaagggagctaaaggggaacgccttttcaggtgctaccctgagccttggaaggtcatgagtaaaggcatcgtcctacagctacatctgcctgcatcaacaagaggagatgccttcgttgaaggaagtgtccctcgacatccttccttctgtttagctcggacctctcgagtgttgttgtgtcaataagagagtttacgcgtcttgatcttcatttctcacttctttggtttattcctatgctg

SEQ ID NO: 2826 - DNA, 1861 bp, Zea mays
  Clone ID: ZEAMA-23APR03-CLUSTER5712_2
aggcgcccaggcccaggaagagagagaaggttctccaagtcaatcgcaatcacgaagagtcatcacgccatacgacacggaggacaccgagccggaggcgaagccggtgcgcagcgcgagagtagcggcgagtcggcgaccatcaagcaactgcatggccgcgttacccgccagcgcccccgcccccgcccccgccccctccgaggcggcggagctcgtgccgacgctctcctcgctggagccggtctacggcgcgggcgcgcagctcgacgacgcgcgcatccgctttgcccgcctcggggaccgcttccacgccgtctacggcgcccgccccgcgctcttcgcccgctccccagggagggtcaatctgatcggggagcacatcgactacgagggctactcggtgttgccgatggccatccgccaggacatgatcgtcgccatccgaagggccaacggcgaccaggtgagggtcgccaacgtcgacgacaagtaccccctctgcgtttaccccgccgacccagacaaggaaattgacgtaaaaaatcacaaatgggggcactatttcatgtgtggatacaagggagtttatgaatactgtagatcaaaagggatagatctgggcaaacctgttgcgcttgacgtcgttgttgatggcacagttcctcaaggctctggactgtcaagctcagcagcgtttgtctgttcagcaacaattgctatcatgggaatccttgacaaaaattttccaaagaaagaagttgctcaattcacttgtctgtctgagcgccacattggaacgcaatctggcggcatggatcaggctatatctatcatggcgaaacctggattcgctgagttgatagattttaatccaatccatgcaactgacgtccaactaccttcaggtggtacatttgtgatcgcccattgtttggccgagtccaagaaagcagagacagctgcaacaaattataataaccgcgttgtggagtgtcgcttagcagcgattgttcttgccatcaaacttgggatggataggaaaaaagctatctcctccgttacaaccctctccgatgttgaggggctatgtgtttcttttgctgggagagaaggttcatctgatcctgcagtagctgtgaagaaacttctgcatgaggacccatatacaggtggagaaatagagaaaattacaggagaaggcctgacatctgtcttccagggctctcagacgtcattggatgttataaaagcggcaaagcactacaagctatttcagcgtgcgacccatgtctactctgaagcaaggagggtttatgctttcagggatactgtctcttcaaaactcagtgaggaaggcaagcttaagaaacttggtgatcttatgaacgagagccattacagctgcagcgtgctatacgaatgcagttgccctgagctggaggagcttgtgaaggtctgcagagacaacggagcactgggagcacgtctgacaggagctgggtggggtggctgcgcggttgctctggtcaaggagcccatcgtccctcagttcattctgaaactaaaggaaatgtactacaaatcaaggattgacaggggagtaatcaagcagggcgatgtgggcctgtacgtgttcgcatccaagccgtcgagcggcgcggccatactgaggttgtaggcaggcaggaaggcagaggcagccgctattcttttcacgagtgtggtggccctgtaaaacatggaataaagttgccatgaacaccgaacccttgtagtagtgttgaattatctcagacgacacacgcattaaattgatatctatctataggagtaacacacgagttcgtggttggcttgc

SEQ ID NO: 2827 - DNA, 1529 bp, Zea mays
  unsure (1)..(1529): unsure at all n locations
  Clone ID: ZEAMA-23APR03-CLUSTER571_16
gggaaggtctttttgaagctattactggttatggccttggtggttcttctatggctcttttcggccgccttggtggtggtatttataccaaggctgctgatgttggtgctgaccttgtggggaaggtagaaagaaacattcctgaggatgatccaagaaacccagctgttattgctgacaatgttggagataatgttggagatattgctggaatgggatcagatctctttggctcatatgctgaatcatcatgtgctgctcttgttgtggcctctatctcgtcttttggaatcaaccatgaatttactccgatggtgtaccctcttctgctcagttctgttggtattatagcatgtctcataacaacgctgtttgcaactgatttcttcgagataaaggctgtggatgaaatagagcctgctctcaagaaacagctcataatttccacaattgtgatgaccattggcattgcactaatcagttggcttggtcttccatacactttcactattttcaactttggagtccagaagacagtgcaaagctggcaattgttcttgtgtgtggcggttggtctctgggctggcctagtcattggttttgttactgagtactacactagcaatgcatacagtcctgtgcaagatgttgcggattcgtgcagaactggtgctgccactaatgtcatttttgggcttgctttgggttacaaatcagtcattatcccaatttttgctattgcgtttagtatcttcctcagcttcagccttgctgccatgtatgntgttgctgtggctgctcttggaatgctgagcaccattgccacaggtcttgctattgatgcatatggtcccatcagtgacaatgctggtggtattgctgagatggctggaatgagccacagaatccgtgagagaactgatgctcttgatgctgctggcaacacaactgctgctattggaaaggggtttgccattggctctgcagccttggtttcccttcgactatttggtgcgtttgtaagccgggctgctatctccactgttgatgttctgacccctgaagtctttattggattgatcgtgggtgcaatgcttccttactggttctctgccatgaccatgaagagtatgggaagtgcagctctgaaaatggttgaggaagttcgcaggcagttcaataccattccaggactcatggaaggcaccacaaagcctgactacgcaacttgtgtcaagatctcaacggatgcatccatcaaggagatgatccccccaggtgctcttgttatgctcacaccactgatcgttgggattctatttggggttgagaccctctctggagtccttgctggtgcccttgtctctggtgttcagattgccatttctgcatccaacactggtggtgcatgggacaacgccaagaagtacattgaggctggagtttcagagcatgcaaggacccttggcccaaaaggttctgaccctcacaaggcggctgtcattggtgacaccattggagatcttaag

SEQ ID NO: 2828 - DNA, 1441 bp, Zea mays
  Clone ID: ZEAMA-23APR03-CLUSTER57207_1
aatatcatgcgcaggggctgaaagcctgaaactgctcaagacgccaccgtcttcctccgcgatcttcagttctctgtctctccctctctctttcctctagctcccaaccaagccaagagtacgtcgtcaagcgcgccgcgcgtgtgtgtgtcagtaggctacagggctcggaggaacgccgtcatgagcttgatcagcatgatggaggcgcggctgccgccggggttccggttccacccgagggacgacgagctcgtgctcgactacctctgccgcaagctctccggcaaaggcggcggcggagcgtacggcggcatcgccatggtcgacgtcgacctcaacaagtgcgagccgtgggatcttccagacgaggcgtgcgtgggcggccgcgagtggtacttcttcagcctgcacgaccgcaagtacgccacggggcagcggaccaaccgcgccacgcgcaccgggtactggaaggccacgggcaaggaccgccccatctccgtctccggccgccgcggggccggcgacaccgccgcgctggtcgggatgcgcaagacgctggtgttctaccagggcagggcgccccgcgggagcaagaccgagtgggtcatgcacgagttccgcgtggacggcccgcccgttgccgaccgccccggctcacctctcctccagctccagctccaggaggattgggtcctgtgcagggtgttctacaagagccgaactgccagcacaagaccagcagcaggccccgacgaggccgggccgctgtccagccagctgatcggcggcctgccgatgccgcgaatggccgcccctgctgacgccgcctacctgtccttcgacgtcacacctgccgctggcggctactaccaccaccaagactccggccccgcggacgcgcgccaccacctgccgccgccgccggcgcagcctttcagcaggagtagcctgtccagcttgcgggacttgctcagcagcatggcctgaaggcagcgacgccgccgccgccgttcgggagacggagctccacctgcagctggagggctggaccgaggcggcctacgcgcagcagcagggcggcgccatgccggcgcacccgcagcagacgtggagcccgtttctgagctcgggatgacggcacgcggctgggggctcacgtgtgcgtggcgccctggcgcctggcgggcatcgcgtgcgtagtgaatagtcaacaatttgcttgtctttcttgcaatgtaacgttgacttggttagtgcatgcgatctctgccgtttgttaggcgtagggtaaaaacccacgcagcggataggtggaatgccttggtgattattggtgcagtaacttttgtacagttgattgttgcagaaaattactctctctttgtctgccttctaaaaaaaaaaaagaaagaaaaaaccaaaaaaaaaaaaaaaaaaa

SEQ ID NO: 2829 - DNA, 2160 bp, Zea mays
  Clone ID: ZEAMA-23APR03-CLUSTER5721_2
aatctttttgctctctcggtttggtgtgcaccgcgtcacgccgatcctcagcctgttggttaccatagctcgatcgggaggttgcttggacttgtagcggaagccatggcgtcggcagcgctaatctgcggcacggagcagtggaaggccctccaggcgcacgtcggcgcgattcagaagacgcacctgcgcgacctgatggccgacgccgaccgatgcaaggcaatgacggctgagtatgaagggatctttctggattactcgagacagcaggcgactggtgaaaccatggagaagctccttaaattggctgacgctgcgaagctcaaggagaagattgagaagatgtttaaaggtgaaaagataaatagcacggagaacaggtcagtgcttcatgtagctctgagggctccaagagatgcagtcataaacagtgatggggtgaatgtggtccctgaggtttggagtgttaaagataaaatcaagcagttttcagagacttttagaagtggatcatgggttggagcaactggaaaaccgttgacaaatgttgtgtcagttggaataggtggtagctttcttggccctctatttgtgcatactgcactccagaccgatccagaagcagcagaatgtgcaaaaggccggcaactgagattccttgcaaatgttgatccagttgacgttgcacgaagcattaaagatttggatcccgaaaccactctggtggtggttgtatcaaagacattcacaacagctgaaacaatgttaaatgctcgaactcttaaggagtggatcgtttcttctcttgggccacaggctgttgccaaacatatgattgctgtcagcactaatcttaagcttgtgaaggagtttggaattgacccaaacaatgcttttgccttttgggactgggttggcggccgttatagtgtttgcagtgctgttggcgttctgccattatctcttcagtatggctttccaattgtccagaaatttttggagggagcttccagtatcgacaaccacttctactcatcttcatttgagaaaaatatacctgtacttcttggtttgctgagtgtgtggaatgtttcatttcttggttatccagctagggcaatattgccatattctcaggcacttgagaagttggcaccacatatacagcagcttagcatggagagtaacgggaagggtgtttccattgatggcgcccaactttcctttgagacaggtgaaattgattttggtgaacctggaactaatggccagcacagcttctatcaattaatccatcagggaagggttatcccttgcgactttattggtgttgttaaaagtcagcagcctgtttacttgaaaggggaaactgtgagtaatcatgatgagcttatgtccaatttctttgcccaacctgatgctcttgcttatggaaagactcctgaacagttgcacagtgagaaagttccagaaaatcttatccctcataagacttttaagggcaaccggccatcactaagtttgcttctgcctacactatctgcatatgaggttggacagcttttatccatctatgagcaccggattgcagttcagggcttcatatggggaattaactcatttgaccagtggggagtggagctagggaagtcactcgcttctcaagtgaggaaacagctgcatggaacccggatggaaggaaagcctgttgagggttttaaccacagcacttcaagtttgcttgcacgatatcttgctgtcaagccatccaccccgtatgatactaccgtgctgccgaaggtgtaattactcagttgtttttgacatgccaattgctgagctctgacttggcaaggttgagcataagtctttcttcattttgggagttatcacagagccagtttggcagtgctgtagttttggttttacctactctttctagaagaaaagtgaagggtggatattatggaacagaatatatacctacggcagcacgcagcatgatgaaacatatttaaaaaagttgggtgctctaccacatgcccgtggaataaaacggatgtaaactcagtgcacttataacaccctaattgtggttttgtttgtggtgcgatagcattatgcatgctgccgctgccgtgatttatgtgcttttac

SEQ ID NO: 2830 - DNA, 1669 bp, Zea mays
  Clone ID: ZEAMA-23APR03-CLUSTER57339_1
atctctcatttcccttgtaactggaagcgaggtctcggcgccatctctcatttcccttgcaactggaagcgagctctctgcctcgtacgtcgtcggcgctgcgggagcgtgcattgttgagcgagtgcggccaagcaacgcgggctcgaggagatgatgctgagcgggcacggcggcgagaggcgcctgttcacggcgtcgcagtggcaggagctcgagcaccaggcgctcatcttcaagtacatggcctcgggcgcgcccgtgccgcacgacctcgtcctaccgctccgcctcgccaccggcgtcgacaccgcgccctccctcgccttcccgccgcagccttcgccgtcgctggcgtactggggctgctacggcgcgggggcgccgttcggccgcaaggcggcggaggacacggagccggggcggtgccggcggacggacggcaagaagtggcggtgctccagggaggcccacggcgactccaagtactgcgagaagcacattcaccgcgggaagagccgttcaagaaagcctgtggaagtgacctcctcccccgccgccggcgccgctgcggcgtaccgaccgtccgcgatctccaccatctcgccgccccgcgcggccgacgcgccgccgccgagcctcgcctacccgcagcagcatctcctccacggcgcctcctcctccgcagcagcccgcgcccccgctggcgctctccagctccacctcgacgcgagcctgcacgcggcggcggcggcggcgtcgccatcgccgccgccgtcctaccacaggtacgcccactacacaccgccagcgtcgtcgctcttcccgggcggcggctacggctacgactacgactacgggcagtccaaggagctccgggacgcggcggagctcaggcgacggcacttccacgcgctcggggccgacctgagcctcgacaagccgctgcccgagcccgacaccggctccgacgagaagcagcccctgcggcgtttcctcgacgagtggccgcgggagagcggcgacatggcggcggacgacgccacgcagctttccatctccatccccgcggcctcgccctccgacctcgctgctgcctccgccgccgccgcgcgattccacaacggggagtgatcggtccatctcctagctgcagccctgcaacatcgtggattgaccgctggctgcaactgcaagcctgcaacagcgagcagtaagccagtgacgtggatgcatctcgtagcggcaaaccctgcttctgcctctgcgctgcgcgggacggctcaggctgaggctcaaaaaagtctgaaccgagtcattgagtcaagcagtactagggactctatgacttggtcttttgttcttttgtagcagtacgttactcgtaccaaatgttgtttattttttgtgtgacatttttcatttcttccggttccagtctgtgatgcaagcccaaaaaaaaaaaaaaaacgctagctctgtggcttttgtgtgctttcagtttgcggtgcgagccttgtcagtttttttccggtgacccacgcctttgattcctttctctgattcctctgcgggctctgtcattttgatcgtttgtcacatccgtggatttttcctcgcgggactactcccgtcccgaaatataaacaaacgcacatggttttttttc

SEQ ID NO: 2831 - DNA, 1378 bp, Zea mays
  Clone ID: ZEAMA-23APR03-CLUSTER57435_1
accgtcaccgtatccttggcggatttcgcccacgcccgcctctgccgaagaccagccgccgctgtcgacggcgaactcccgcggcgagtcgaccgccgtctcagaccctaaggcctaagccctagttccagcccacccagttccttaaccatggaggatgccctcgcgccgccgtctgtggccccgactccctcccccctcgccgccgctgccgtcctcacccgtcgtcggtcacacctcgacagtgcctccttccgcacgctctcccgcctcttctctcactgtctccacatcaacccgtcgccctgtggcatctcgccgcccgtgcccgagcccgtcgccgcggacttcgtcggtggggaccccgacgattccccagaaaggcctaatggcgctgagttcaatcggctaaaggatgtggaaatcgaggcggcggatgcgggaggcccttcgcttcacgggactgtccatcaaccggccgcggcgaactctaccctcgacctggttgaggctgaggctgaggctctgtagctcgagggtgcgggcgcggtaggggtcgtagaaagcacctcgtgtatgaccagagccgaggctggggaatcagcgggacttgtggtagaaagcacctcatgtaagaccactgctgaggtggaggagtcagcggttggagctggactggcgatggtgggtgacgtatctttgaagtcggtggagtctctcttggagacgaaggttgacgattcggtagaggtagcagtgggtgatgatgaaggctgtcttttgtttgaagcgatgctgacaaacttcacagggttgattgatgatgttgatgctggagcaataccaacacagaggtgtgcagtttctggaggtgacctgcagaataataaggcatctgaggatttgaaacaactgggtggtaggattgaaggagaacctcttagaaactgtgataatgggcagaatgatggtggtggtttcgaggaaggagagattgagggcgagtttcaggatttgggttcagaagaatctggaaattccgaacatggagacgaagatggtgaagatgagaaattggaagacaattccattagcagaggctcagggccaaataaatcttgtgattatggcacacaattcgggaatttgcactcaattcctgaaacaggaaatgatcatcttgtactgaacatggatgctattgtcagaggtgatgcacaaatatctgttaccagggctcaagccgtcacttatgatgaagttgtggattggaatgagactccgctgcctgacaatgagagtgtcgaccctgggaagaagagaaaacgcattctgacagaagagagaaaagctaaaaaaacaaaaaaaaaaaaaaaaa

SEQ ID NO: 2832 - DNA, 1669 bp, Zea mays
  Clone ID: ZEAMA-23APR03-CLUSTER5754_2
acccttggtattcttccagcttccaggctctacgccgcttctagcgccccgatacgcggcgccggcgcaggcgtgcagccatggcgatgagctggatccgatcggttgttaggagggccctcatcgctccgaagccgcggggctcccgccagtttactgtcaccgccgccggcggcggcgcgacgcagaccgaaagggtggcggcggagatggtccgctacgccctcggcggcgccgtgcaccggagctcgccaggttcccccttcgccccttctatttgcgctagtgtggaggcgatgcggatactggagcaaggcgcctcgaacctgcagggaggaggcgagggcagtgccgaagctgttgggttgctcatgctcgctatgtccacgctgctttaccggagtggaagacgtcaagacgcagtggaaaagctcaaagcaacccaacaagttgccccttctgcagtttttagagttgcagcgtgggaagcactaatgggattacacatggaggcagggcaggagatgtcatacttgatttccccaaatgattcagttgatctgtcaatcaaatatgatagcaaatggtctgatcaggaccatcttaaatttcgggttaatgctgtcagaggacttgttacacttctgaatggagaaacagaatcagctgcccagctgttcgatggttggtgcagagacttttctagaggcgaaaaccaaacagaaaatgctgccgtttcatacggtgaatatttgcattgtgttggggattttcaaatggcagcacaagtgtatgagaaaattctcgaggcattttgcatggatgatatgtctggaaaccttttagcagctggaaacatggttcccgaggaggcttctcttggggccacttgctcatatggccagcttttatctcactctgggaagtttgctgaggcagaggattatctcacaagagctctacagaaggctgaagaacaatttggtgcaaaccacccaaaggtcggcattatattgacctgtgtagctagaatgtacaaactaaaggcaaaatctgaaggttctacttcaattatggtccaggaggggctgtacaggaaggccctagaagtattgaaagcccctgctattaattctgagggtaaaaacaacgatctcctatcaatgataaggtgagtacgcggagctgttattaattcagtctaataggaaggcggaaggtgaacggatgaagcagtgggcagaagatgcttggaggaaccgtaggctaacgctagcacaagctctagagttttcagaaccttcaaagccgactgtcgttgttgacacccgaatcggcagggtcgtgtagcttcagtcaacaatctcgtgagatgcacaaatgaagcaatccgtggatgcacctcgtgtcgtgtatattttcgaaagtgttgctccttgcgggctgcatccggtttgatccgttcaagtcccagcacactcgcctgcttgtttttcatatcacctttttgaatagggggacattcgaggatcacaaagcttgtgcatgtgatcactttaaacatttaatagcatatgtatatgttattgtacacagaataacaccacttaaagcatctttacattttgattgcgaaaaaaaaaaaaaaaagggcgaccgcatacatata

SEQ ID NO: 2833 - DNA, 849 bp, Zea mays
  Clone ID: ZEAMA-23APR03-CLUSTER5760_2
accatccactgcatgcctggcgcgagaggcaccagccaaagcccacagttccccccatttcatttgtgtggtagcctaggactgggagggagctgctcaaccttttttttgtgtgtgtgtgaaagatcgagagcgccgctcaaccaatagagctgtttctctgccttgtgtctttcctctgtcctgtggtctgcggtggccgcagctgcggcgcgcggtgatggagttcacatctaagaagacggcttcgcttgccctcctctgcctcaagctctcctgcctcctcctccttcttcttcttccccggtcttcctctgctgcgcctctgtccagaagcctgtcgctgacgaggaaccgcctgcagcccgcggatgaccctgctccggaggttcccgctcccgcccagcagggtgcgggtgctggtgctggtgcggtgggagctcgagaccccggcggcgaggtggcggtgaggatggacatcgaggtcaacgactaccctgggtccggtgccaacaaccgccatgaaccgagaagccctgggaggccatgaccatgaggtttgaaggcttgaagctagcgtacgtctcagacaggaatcaggaatgaagaccatggcatggagctgctgctgctgtcttgagagttttataagtagcgaagcgaaggagagtacattgcttgttgttagctatagaggtcaagggagagccttatcgtgtatttaattagcttgttaattattgctgcgtactccttgttaagagtcttcaacttaacggcggatcggatctgcttgagctagctactagcttttgctatctctgatctagaacaaaagcatcagttagt

SEQ ID NO: 2834 - DNA, 1226 bp, Zea mays
  Clone ID: ZEAMA-23APR03-CLUSTER5782_5
ctctacccgccgccacattcatcagtagaaaccacctatcctgcctgctctacctacctccgctccccagccatgacggtgctggacgccgagtcgcggttccatgtcctggcggtggacgacagcatcatcgacaggaagctcatcgagatgctgctcaagagctcgtcttaccaagtgaccacggtggagtccgggaacaaggcgctggagctgctggggctgagggacaacggcgcggaggacgcgtcgccgccgtcatcctcctcctcatcttcgtcgtcgtcctcccctgaccatcaggagatcgacgtgagtctcatcatcactgactactgcatgcccggcatgacaggatacgatctgctcaagcgagtgaaggggtcctcatcgctcaaggacattccggtggtgatcatgtcgtctgagaacgtgcctgcccggatcagcaggtgcttgcaggatggcgcggaggagttcttcctgaagcccgtgaagccggccgacatgaagaagctcaagtcacacctgctgaagcggaagcagcccaagcagaagaacaagcctcaggcgcaggcggtggagtctcctgagcagcagctggacccgcatccgcagccggtgcacgagctggagctggaggaagccgcggcagatcgcaacggcgtgaacaagaggaaggcagcggccatggaggaggggctgaccgtggtggtgacggcgccggagagcaccaagccgaggaggctgtctacgagcagcctgactgtggagacctgatcaaccgtggctacggctacgcacattaatctagcagtggatgcaagccccagtcccagcctcgccgccaagaaacacaaagtcgtgcctgctgcttttggttctgggagctaacggagggaagtgacaaacaattaaattatatgtagcggctgctgcttcggcctgcaaattttgttgcgctaacggtcatggacatggacatggacaccatcccttgtgttcgttaatcgttcggaaggggaaaagaagaagaagctgtagatataaaaaaaaggacaggcggctaattgttaatttccgcatggcttaattctggcaacgacatgctggctcaatcaaaaacctgtgacggacagacggatggatcaactgatgatgatgttgttttggctcggttcttcttccttgtacactgagtattcagatgaacatgttgtaatctg

SEQ ID NO: 2835 - DNA, 1549 bp, Zea mays
  Clone ID: ZEAMA-23APR03-CLUSTER5788_34
atcagcgctagcttagctatccggccgcatccgctgctcgcctcctcacttgagcgtgtgtcgtgtagcatttagtcagctgctcctgcttgctagggttagggtttgcgggcgcgcgcgcgcgtgcccgcgcgcgagctggccgcgggagggatgacgccgcaccggtcgccggcggggaccggaggaagtggcggcggagggccgccggcgctacactacctgagcggcccttacggagacaccaccttcaccaaggttttcgtgggcggcctcgcctgggagacgcggagtgaggggcttcgcgcccactttgaggtctacggggacatcctcgaggccgttgtcatcaccgaccgcgccacaggccgctccaagggctacggattcgtaaccttccaggacccagagtcggcgaggatggcctgcatggacccatatccagtgatcgatggccggccgtgctaattgcaaccttgccatcttagggcgtcctggtccagctgtgcctttcggccatcagcatatggacctgaatacctatatcagcagctttgtagaatgcatatggtccatatgttggacaacagtatattccagtttacggtggcccaaggacagtaggcccagcagtctacccatatgggcagtctggccaacctgtaccaagtgatcatgcttattctcttggttatgccccaagtcgtgttctcccactatcgaatcagaatgttaacgctgcaaatgttgtgcgcataccaccacttcaacaatttcctccaggagctccacgacctcagcaacagcttttggcccctgctcgtgcaccgccattcccacagaacaacgtttctgaacaagcgacaggttgacaaggatgccagaaagtgacgaattttaggtatcctatagtctgcagcaggactaagaaaagttgtaccgctaaattgggcggcatgcttttttcttgcaaattgttttcgtttgctctctaaagtctgcaggttgtccctatccatggttacctgaacttcttataacgtgagtgtctgatctgctccgcgggaaggggcaggcaagctcgagcgactgaagatgaagcccctcttgctcagcttctgtcagtgtctgtacattccccatctgccagacatcctgatagctgatggtctgtgcaggaccaaagtggatgccggaaatggagtccggcctccaacctgtgtataatataggtcatgtagtggtccaaatcgtagaacaggtccattctttgaaaacatctggttgtgtatattaattctcttagcaccttcagtgcatgttttcatgtctcattagagggaataggtatttcaatgtcattgcattgtcagtgagtcatgtacattattatactgaaaatgtaaactatatatgtcatctgtgtcaactgacaactgtaatcaaataatgacatccctatcttgggaaagaacatgatttattgcaagttgcaacggatggggaaaactagggatggatacggatacttagaaaaaaaaaaaaaaaa

SEQ ID NO: 2836 - DNA, 1230 bp, Zea mays
  Clone ID: ZEAMA-23APR03-CLUSTER578_6
cgaccaagttgttcgcactggtcggagacgtgggcttgagccctccgcatcgtgatgtgtttgcgtgttgtcggcctcgtctgtgcggcacgccacggggttttactctttatgtgtttgcgcggatctcgcgtaggtgtttttggaatggtggtcaagcgccgtcacattgtttgcccgcgggcgaatgtcacttttttgtgtccttgtcgtggcctcgatgctgcgttacatgttacgcgcttccttggaagagggattcccagacgcgcctcacacgcccgtgtccgggccggggggtcgggcgttttacccaaccccgaggcggccgccgctgtgtcccggcgcgcgaagccgctgccttgggtcggcgccgtgggccatacgcccagcgcgcgctgtggcgggttccctcattcgaggggggatcacaataacccgactctcggacccacgacgagttaagcccggagggaaaaaggacaaatcacacaaaggcacagggaatcgcgccaccgtgggacgcgtacggcgcaccgcccgcccgccggatctgcgccggcgacgcgcccggacgtcggatctacgccgccgcaggaggggggaggcggcgctgtggccgttctctgcccgcgagcgcccggatccgtcccgccggtgagtccccgcgccagctcctcggcctgtgatgaatgtcgttcgacgggagccgcagcgggcggtgctactccgggctcgctaaatttccgcaccaccgcgaacgagagaaaaagggccaggtccggtcactggatgccaccgctccctccctagcccctgacaacgatctccaggcattcgcttccgcagtccgcaccaccgccatttcacgcacaccgccgctgggtgcgcggacgcgtggtcactcccacagtccaaactccacagtccccgcatctgccgctattgctgtgctcggctcggcacactcagactcggagtgagagcgaccaagaagaggggatgatggagaagtgacacggcgccggaggttgcaccctgctccgcctcctcggcgccacagccgccttagcggttcgacttagtgctacttcatttgtgttcttgattttcttcttctttttaggaaagaacatctctgtgttgagttcaacaataatgctaaaactgggtaaaatcaattgaaataatgtttttcagagatacaaaaaaaaaaaaaaaagcttatcg

SEQ ID NO: 2837 - DNA, 1148 bp, Zea mays
  Clone ID: ZEAMA-23APR03-CLUSTER58764_1
ttttttttttttttttggaaaaattaggtattttgttaggaattactcaaacttaatacattatctgcagtggtcccagcaaaaacaacgggggacttgttcttcacatcacgttacgcatgtacatgcaaaagcctaggcacgtactgtgcacactgtacaccggatcccatgcatggcatgcacaccaagcaatgcaatgacacaccgtgcgttcgtgccgaccgtgtccgcgtggggttgatcctgattcctgatcaagaggatgaggcgacggattcctgctgcatgtagcaggggagcagcgcgtgggtgttctggcggcggagctggtcgtagaagcggcggatgaagtcctccgcgtcggcgtccacggcgtcacagtcgcagcccgctgcttcgtcctcggacgagtagttggacacacgcacagagaactcgccgctggccgcgcccgggagcagcagcgcgggcgacgaggacgacgacgcgaaggcgtacacgtactcctcctcgtcctcaggcgcgaggtcgtcgccgtcgccccggccccgcagcatgagcccgggcgatgatgccgcggcggaggcgtggtagtcgatcctggcgaggggcggcgcgggctcgacggggagggagagggagccgtacccgtcgtactggcgctcgtcctcctcggccgccgcgctgaggcaggggaagtaggggaggcggcgcctgctggatgagaaggacgaggggcccgccgaactgttgctgcaggaggagaactcgtagtcgcggcggcgcagcgcataggcggcggcggcggtgctgccgcggtgagaggagaggaggttggcgacggcgcgcgtggtgccgcggcgcctgttggcgaggaggtgcggcacgctgaggaggagcttgcgcttgttggagagcacgccgttgcgcgccatgaagaaggccgcgcgcacgtagctccacagccgcttccccaccgccgcgtgcacctccatagtactgtagtagcgcaccacagctgcctgtgcgagatttgccgggtcaagctagaggatatctgcaggccgccgatgctggatgggattgggatggaggtcggggctgtggatggaatgatggtatgcttttggagttcccgagggtcc

SEQ ID NO: 2838 - DNA, 914 bp, Zea mays
  Clone ID: ZEAMA-23APR03-CLUSTER5894_5
aatcacccatcacgtatcgctccctccctcggccctcgatcgtacggcgcgagcgttgcgctccacgccttcctcttcctcgtctggcatcgcgaaccgccgcaccccacccacccgcccacaggccacagcccacccccttctccaggtctctccccggcggcggcgggtgcggttctccggccatcaccgtgcgcaccaggaaaaactatgaggaggtacagccccccttatcgcagtccccccaggaggggatatggtggcagaggaagaagcccccctcctcccaggaggggatatggaggacgcaaggagggtagtggaagccttttggtccgcaacatcccattaagctcggcacgaggggatcttcgagttccttttgaaaggtttggccctgttcgggatgtttacattccaaaggactattactctgggtaagttgtactaaatcaccatattctgtgagttatgtattaattcctcaaaaagatagctattgctgtttctataatgtttggagctgtaaatagttggagacctggctagtttttcttggtcataatcaacaacaagaagaacatcaaagctttttatcccaagcaagctgggtatgatagagttaaaaatccaatagaacccacaagtcaaggttcgggcacatggatgggtatatcctatcatctcaagtctcttttcattgcctctttccatgtcaactttggttttcctcttcctctcttctcgttgcttcgtgccttaggatcccactacgtaatggcgcttatagagggtctctgttggacatgaccaaaccatctcaaccatagttattaaggctgtaaggcgaccgaccccctttttacctttcatcgggtaaagtgtaaggtgaggcaacacctcatttatataga

SEQ ID NO: 2839 - DNA, 1243 bp, Zea mays
  Clone ID: ZEAMA-23APR03-CLUSTER59124_1
ttttttttttttttttgtatcatggtattatatgtttatattgtaacgcacgggtatccatctaattattatatatatacatgcgcctaacacaagcgcattatcacttcactgtatccccgcccacctacggtgacagatgccaaaacacggcgccgcgcgtttgctcaaaccaaggtggtgcaggcagccgtgtcgggatcgtacagcgcggggagcaggtacttcctcccgcgcgccccgttggcgttgtagctggcacccgtggccgcgtccacgagcagctggccggcgtagccggggtacgcgccgttgccgtagacgcccgcgcacgccgtggcggcctcaagcggcgcggcgcggtcgccctggtagaacccgtctccgaaggggttggtgaccgcgccggccaccatgctggccacgctgatcatggcgccgtccatgcccgcgtccccgttcggcggcaccagcggcggcgcctgcggcccgtacggcggctggtggaacggccacgcgcactggccggggcactgcgtgcccgggttcccgacccacgcgtacgccgccgccgccacgcggggccgcgcgccgtacgacccgtggtggccgcaccggctcatgcagaagccctccaccagcacgtcctgcgccgtgagcagcagcgcgaggccgcccttcgcggggcgcgccgcggccgccagcgccgggagctgggcgagcgtcaggctcttccccagcgagcacccttcgtcggagacctggccggccaggaccacccgagcgcctttcctgccaccaccgccgccgtgcgcgccgctcttcccgacggcggccgcgtccgccgccttcgataggtagagccggtcgatggtgccccaccactgggagacggaaggcgcaggggacgtcggcgcggcggagagggagaggaggaagtcggtgacgatggccttctgcgcgggcgtgaagcggccgtaccagaggacggagacggggatgtcgccgctcagcacggcgccgtcgtggtaccttaggagatcgctgggcggtggcttgtacagctccatgagcctcctgctcgggctggcctcccccgtggcgtgccgtgccaagctgacaaacgccagcagaaccaagaacagagcgaggcggaagctactggaagcgaaggccattgcctcgactgagaggggagtggactagcaagtggaacactactgggtactggctgtgtgggtgt

SEQ ID NO: 2840 - DNA, 941 bp, Zea mays
  Clone ID: ZEAMA-23APR03-CLUSTER5923_19
cactgcggctgtgcgcttcgttcagttcagttcatccgtgttcttgtttgcgaggtcgagagagactgagagaggatgtcgtgctgcggaggcaactgcgggtgcggctccggctgcaagtgcggcaacggctgcggagggtgcagcaagatgtacccggacatggccgagcaggtgaccaccaccaccacccaggctctcatcatgggtgtcgcaccatccaaggggtatgtgctccctcatccctctctctctcgatcggcgccaaataataggcagcaacacatgtggtgttgagttgttatgagctgtgtactgctgtcggcatatggataggcggtgccagtatggtagagaacagaacgcgccaaagatctctttatgttctctttatggtggtgatggtatggatgcaggcacgccgagggcgggttcgaggcggccgccggagctgagaacggcgggtgcaagtgcggcggcaactgccagtgcgacccctgcaactgcggcaagtgagctaggtgctccaccctgcaggccggccggaggaagctagctaattataaagcttaataaagtatagcggcgtcgctgtgtgtgtttcgagtcagtcagtcagtcagttgcgtgccatggcatgctccgagtctgagatgatgatgatgcctgatggcggcgtcgtgtcctcccctggccccctggggcgcttctggcgagcagtgtgttgtgttgtgttgtgtgggtgccgcacgctagcaggctagccatgtgccctgctgtgttgtgtcaccatccatctataatcttatctataccccaccttttgtgtaccgcgtgtacccctttttcctgatgtctgttcccgagtaccaaggggtgtttggttccctcttctaatttctaatcacatgagatgttttcggtcaaaaaaaaaaaaaaaa

SEQ ID NO: 2841 - DNA, 764 bp, Zea mays
  Clone ID: ZEAMA-23APR03-CLUSTER5977_8
gcacgagaccattacctagaacatcctaatcgaaaaagataagcaactccagtccaagcaggagcaagaacaacaggaagagtcgaagagaggagagggacaagaacagccagaaagaggagaggaggctcatcaatcgcgactaattctcgcagtcgcagagacaagcaatcatcagacatgagaacccaggcgctgttcttcctcgcactcgcacttctcggcgccgtgctcgcgcagtccagcaacaggcaccaccaccactaccaccacgcccatgtccaaagcaaagggcagggtgccggaggaggaggaggggagctggcgagccgggcgaaggcggcgggcgcgcgcgtggccgtgctgtgacagctgcggcgggtgcaccagatcggagccgccgcggtgccagtgcctggacgcggcgccccgcgggtgccacccggcctgcagggactgcgtcaagtccagcctcagcgtcgacccgccggtgtaccagtgcatggaccgcgtccccaacttctgccagcgccgctgcaccgcgcgcgccgccgccgcgcactgaccgaccgcgcggggcagccgacgctggtttctgcttgcagcttggtattattgacccagcaacctttttgcccacccaccccgcccgccggccggcgaatcatggcgtctggagcccagccgtggattaggatttttgtttgtgtgtgtagactgtaactgtaaagagagatgaggaatttgtaatctggtgagcgagc

SEQ ID NO: 2842 - DNA, 1298 bp, Zea mays
  Clone ID: ZEAMA-23APR03-CLUSTER60195_1
ttttttttttttttttagatatatatagcctgatattattgatacatgtataacatgttatacaaagggctgtatgcttatatatacatacaagtaagccttttaatagatacagagcttcacagggatgaagtgattaagattaattacttactcgtgccgctctcgtgccgtttttttttttttttttcacaagtaaaagcctttaatatatataattacagagcttcacacagtagtgattcatcttactatatggttttttcctaagcttgatgtagtaatagaggtgtacctatattatatatatgatgcaatcttaactgcttggtctgatctgggacagtgacctgatgatgatgtcctgatcatatcataatagcttgttgaaccatgcggtttccttcagatgacgaggctgcctgctgcaccctggacctggagcatcatcccatgtgatcccagcagctcctcgatcatctgcagcgcaacactctcctcgtcgtccatcatctcaggtggaggcgagccggccgtgatagtggacgacgtgggcgtggacgtggacgtggtggccgcgccgccgtagctgggcgccggctcctcgccggaggacggtggcggcggcgcgtccttgttgagctcgacggtcatgacccagctggagtcggcgcgcgcgccggcgcgcttctgccagacgccaatgtgggacttctccgggtcgaggcggaggcaggtgagcgacggcgacggcgtcttgcagcacctgcggagcttggcgctgaggatctgcgacaggctggtgccgccgccaccgccaccacgcgcctccccgggcggccggcactgcaggggccagcagctccccggtgccgctccttggcacggggaagttggtcttggcgttgcggccgctcatgaggacggcggcctcgtcgtacgcccgcgccgcctcctctgccgtctcgaaggtgagccagccacaccctcctcttaagcagcgggtgcctgatctcggagacccaggagccccagtggcgctgcctgacgccgcggaacttcttctttgattgcaccatgatgcctgcagatccccgcgctctgcagggccggccggcaagcactgcagattctctgccaggggaaggaaggagtgagcagcagtccagtcagtcagtgatgcgagtgagtgagtaagggaaggaaggacagaggaggcagtcgtctgcagagcggtgggagccggacgcgagcactgagcagcagcagtgagtgaatgcccccgatcagccaggact

SEQ ID NO: 2843 - DNA, 2840 bp, Zea mays
  Clone ID: ZEAMA-23APR03-CLUSTER6025_1
gcacgagaccattacctagaacatcctaatcgaaaaattgtcgcggcgcagacctgggagaggagcagagcggccagtcagcggagcggataggaggcagcaggaggagtcgagtcgcgccgcgccggagatggacacgcccgaccgcgccgccgcgcagtccgcggcctcgcgcaccgaggactcgccggtgttcagcttcctcaacaacctgtcgccgatcgagcctctcaggtcgtcggcctacagcaccaacagcctccaggggttccagtccatcaacatcacgtccatctcctccatcttcacctccccgcacgacaacgtgagcaaggaaccgaggctcccaaagagcccgcttggtgaaatttgtgagaaggaggttcgtgccgacgccaacgccgccggtacgaacgggccacccgagccttcgaacgcggccaggttttgcctgcgctagcaccgtgactcgagaaacgcgcacgggtacatgtacgggcgtggctggtcctcctcccaccaccggggggccatgtgatctggccctgcctcgtcagttcgacaataacggcagtccagaccacaacacgacgccctgccacggtgtcaggtcagaccttaaacaggacaaggctaggaagctgctacaagctgcacagaatgctaaaaacgcgttggagaagaggaagtgcttgttttccaccgaagtccggctcctggacggcggcggcggcggtggcggcgagcccgggagtgacagtgatggagtcttgggatgcgagtggtccgacttagtctccccgacctcagcgaagcttttggccttcgacgccacgatggatgagcatcacagaggagtgcatttggcggctcaaaacgcagagtcgtgtgggtatttgctgtcgaaacttgccggagacggtggcgtatcggacggagcatatcctactgcgtctgctcaggtatactatcaggaacttgtgatgggagacgatcagtcagagaacgccgctcctcaaatggatgctcaggaaaccatctcagccgaagaaatccaggataatatctatgaagcggatgtgtgtgttccattagagtacaaggtagtggagagccaacagcagcgtggcatacggagacgctgcctggtcttcgaggcagctggtgggttttcgaatagcgctgtgaaaagggggactattgaagatcgctcggtctcaacatgtagtaagggcaaaagccctgcggaaagccagccgcgtggactgcgaggcatcgggcttcatctgaatgcgcttgcgttaacaccaaaggggaaaatggcctgtcaggatcctcctcctacggcttctgctctccttccatcgtcagcgtctgaaaaggatgcgcgtggcgagctgctttgtgcaggagagaatttcgcacactcgggcggtgagctgttggagtttcccttggatggttgttcggctggaggagggtttcctgtaaatgaccatcatgtctcaggtcagagcgtcagccctcaaaagaagagacggaaaacggataatggcgatgatggtgaggcatgcaagcgatgcagctgtaagaagtcgaagtgcctgaaactttactgcgagtgtttcgctgctggtgtgtactgctcagaaccttgttcgtgccaaggatgtatgaacaagcccatacacgaggaaaccgtcctctccactcggaagcagatagagtttcgtaacccgctagcgtttgctccgaaagtgatccgcatgtctgatgccggtctggaaacaggggaagatcctaacaacactccggcttcggctcgtcacaagagaggatgcaattgtaagaagtcaagctgtctcaagaaatactgtgaatgctaccagggaggtgttggatgctcgagcaactgcagatgtgagagttgcaaaaatgcttttggcagaagagatgccgagactgaactccctgaagaaatgaaacaagaagaaagtgaccagacagaaaatcctcaacaagaaaaggagaacgatcaacaaaaagcaaatgtacagggcgaggatcacccgctcctggaccttgtcccaataacaccgccttttgatttttgcagttctctgctcaaactgccaaatttctcaagcgcaaaaccgccgagaccgaccaaggctcgcagcgtgacctcccgctcgtctgcttcgaaagccactgcagcagtacagccttgtagatcatccaagcttgctgctagtgctagtgctagtggtatcgatgaggagacgccagatatcctgcacgaacctgactctctcagtaactgtgtcaagactactacttcaccgaacggaaaacgggtctcgccgccacataacgcgctcggcagctccccgaaccgaaaaggtggcaggaagttgatactcaagtcaattcccttgttcccgtcactcacgggagacacaaacagcggctctgcaatgaacagcactgatagcgcattctgcgcgtcacctctcactttaggaccatcttaaagctgtgaagttggtggccatgggaccggagtacgacttgtagtccgaacacgtgtgcctcgtatcctacggcaaggctcgaggtactgtagactgtagtaagttaggctttttaaagttgtagtaatctgtatttgtaaaatatgtagactcaataatctgtatgtaagatgctgcgatgggtgaagctgtttatctttatcaaattgtagcaacattacagatcacctcttgagtaggtttcacagttccaccccctgtctttctttttttttttttggaaaggaatccggtccatgttttccc

SEQ ID NO: 2844 - DNA, 1172 bp, Zea mays
  Clone ID: ZEAMA-23APR03-CLUSTER6027_3
gcacgagggtgaacgtggtgagcctccgcccagaatgcaaccctactagtgctagctttcggccgcgaaaaacgtccccacccccacgtctcaactttatagccgccccctccccaccgccgcggccgccacgcgcagcagcaacccggtagcagcctagcaggagcgcagccagcaagctcagccccccaggccccagccctactgccaccgcgccgaacgacatggccgagccggcggagcaccgtccagctgaggaggaggaggccgcggcggccggcgaggatgaggacaccggcgcccaggtcgcgcccatcgtgaagctggaggaggtcgccgttaccaccggagaggaggacgaggacgcgctcctggacatgaaggcgaagctctaccggttcgacaaggaggggaaccagtggaaagagcgcggcacaggcactgtgaagctgctcaagcacaaagacaccgccaaggtccgcctcgtcatgcgtcaggcgaagacgcttaagatctgcgccaaccatctcgtggtggcgacgactaagatgcaggagcacgcggggagcgacaagtcgtgcgtgtggcacgcgctggacttcccgacggcgagctcaaagaggagatgtttgctatccgttttggatctgtcgagaattgcaagaagttcaaggacactgttgaagagatagctgaacagcaaggaaagagcgaggagaaagaaaatgatgaagtctccactgccgcttctgatttggcacagaagttaacagtggcagagcccagcaaggaggaaaatgcagagaaagaggaggctcctgcatccgatgataagaaggatgctaaagagtgaaggttgaaggcaaacaagggtcaaatggatgccattccattcatttcgtttccaaggttcagcttccccgcaaattttcattgtgttttctccgagatgaatgtttgtgttcggtgaaatcagagtcgtcagtcatctacatagcttttcttggttgatagactgttattttaagtcgcatgtttatctgggatggctggggtcagcatgtttgtacaattatttggagttgcttttggaatggacgcggtttgatgagttgcccaaaaaaaaaaaaaaaaaaaaaaaaaaaaaaaagggcggccgccaccgcggtgga

SEQ ID NO: 2845 - DNA, 1541 bp, Zea mays
  unsure (1)..(1541): unsure at all n locations
  Clone ID: ZEAMA-23APR03-CLUSTER605_1
naatcgaaaaattttcgagctcaagctcaatcacttcggattggcggcgggcacgcgccggacgaaatggaagcggcaccatccgcccgcgccttctccccgtcctcgtctccctccgcgggggctagacccagccttcccctcgcgggcctggcctcgcgctcgcggcgcgcccgggtgctcgcggcgccgcccccgccccgcgccgtcgcctcctcccgcgcgccgctggtggtctccagcccgccaccgccgcaggactccggcacgcacaaccccgcgcacgccaaggtcgaccgctccggccgcttctgcagcccccgcgccgcacgggaactcgcgctgtgagtcccggcgtttccccagcttcagctcctacatacttcggtttctcttcttctgtgctgcgttggagttgggcttcggctgtggttctttgctgctggaggtgaaccgctacttccgcgtctcgtgtcgcaggatgatttcctacgccgcgtgtctggagggaaccgatgtcgtccggctcttcgatcgcaggatcagcgcaagacgagaacccgggtttgttttcaacaaggcatgcctattgagttacaaccatatgagctttggcgggggaccgctcgaggttggaacggaggaggaggctgagaagctggccagtcagaacgataaggattcagccaacgaagcagatgtactttcagctcctccaaaacttgtttacaacaactatgtattacggctgtccagggaacttttagtggctgttgccagtggatgggataagcatgtggttatcatcgacaaaataattccccaggcttggaaggatgaacctgtggcaaggattcttgagctctgcattctacatattgctatggctgagatggcatcaaaaggaacaccccacaaagttgtcattaatgaggcagtagatctggcaaagcgattttgtgatggtggtgcccctcgggtaatcaacggatgccttcgaacatttgtgaaggatcatgttgatgttgcaggcacgagccaggaagctaaatcaaaatcatgattttttgcaaatactcatacaacaaaatggtggctgaagtaaagaagtacggagaaaaccttgctgtcttgagttcaggcgaataccttctgtctccaaggtttagccttcaacctaagggaatctaaaaggtaaacatgatggactcatcaaggagccacaacacgttcattcttttagaatgttcggttattaggtgaagtatacagagctgtaaactggtgatgcacattcatgcttcatctaaaacaaccgaaggttatggcttctgatagcggatagcctactcgacgcagatcgttaaatgatcagatattaagatgaccaggagttgtgtaaaagcttgatgcacatgtaaaatgttatatatacttggcattggctcattgcaatgggagaaggatattctagtttcataagttgatgtaagacatgtacgctcattttaggattattaatcgcatattgtgtttgcttc

SEQ ID NO: 2846 - DNA, 1301 bp, Zea mays
  Clone ID: ZEAMA-23APR03-CLUSTER6066_16
agggagaagaacacagggcgcacrcgcagatacatatagagagaggttagctatagcttgcacatctatttaactaactaactaactggctagctagctcgatccgcagagcaaagcraagcagccaagaagcaaagcaatggagaaccctgcgagtgtgctagttctaccagcgcagttcaccaaactcaccttcggaaacctgtacatccgccgggccgggccgggcagcagggagataaccgaggagggcaggtgcgacctggacaggagatacgtgagtkacttccccgtctacgacgccgcccccgacgccagccttgtggcccgcgtgcaggggatcaccagcgaaatcgggaacgcgcaccaactgttcgtcgttgtgttcgacaccgacagctgttcgtctcgccctgcatatgcgtctctctgcctgccaggctcaagggctccacgctcgtcaccaatggcgtgataacggccgggtctgacgagtgggcgatctacggcggtaccggggtgtttgccatggcgaggggcgtcataaggagaaggtatctcgccgacagggccggcgggaacactgatgagctcaacatggatgtcttctgccggccgtttggctcacagtcacagctgcaagataagatgcaggtgcaggggcaggggcagggctctagcgtcaccaagattggactatggggtggaccgggagggtcggcacaggacatcacggcagagcggccaccgcagcgtcttcacagcgtcaccgttcgtgctggcgttgccgtcgactccatcgagttcacctatactgacagcgctgggcagaggcgcgccgctgggcgttggggtggacttggcggcaatgttcgaacgatcgaccttggcaacgccgaggatgtcagggaagtctcgggaacatacggcgcatttgaaggtgccactacgctgacctcgctcaggctcgtcaccagcagcagaacctggggcccctggggggtcgagaacgggacgcgtttctccgtcacggcgcccatcggcagcagcatcgtgggattctatgcgcgggcgggaacaaggctcgtcgacgctatcggtgtttacttgcgtcagatttaatttgaataatagcaggggagctactgctagctacgtacctgctccatcctccattatcctttatttcaattcgctcatcatcgtcgtgtgtaaattaaataaataaagctcttgtgcccatattatatatagttgtcatggtcgtgccgtgtctatgtgcgtatacagtttggctcata

SEQ ID NO: 2847 - DNA, 1183 bp, Zea mays
  Clone ID: ZEAMA-23APR03-CLUSTER60706_2
gaactgagcctcccatgtatgtagtatatgtgtatgtacgtgtgcgtgtataactatatatacacacgcacacttgcattgcttcctttccacttagatgtactgtgtactcacgccacacctcgagctagcttgctcacatctcgtcgccgtagctaccggtccacagctggtgtccgtggccgtgctcgccgccggcgcctcccgtggcgttcctcaggctgtgccacacgtagacggtgaacccaagcagcacaaccaccgcgaccgccacgctcaccagcatgccttgcctcgcggaggcctgcctgggcttcaggttcgccaacgccatcgtctctgctagcattggctgctgctcctgctgcgtgtccttctcatgcaccatctccttcctgtcctcggccatcttcccctcttcctccctcttcctctcctcctcctcctccttcagcctctgaacagcccccagcgacggctggggctttgtggttgcaggcggttccacttccggcgccggcgccggcacaggatcgtacgtcttcctcggcatcgacgctctggactcggcgggcggcttcacggaaggagcagctggagccagcggcgccggggtcggcgcggcaggcctggccgccggcggaagcccctgcccctggccctgcaacggaggcggcgccgccgtgggcatccttggcggcggctgcatgggcgtcgagggggtcttcttggggagcgtgatggtgagtgtctcgttctcgaacttggcgcggatgccgtcggcgttgcagttggcgggaagctcgaagtcgttctggaagcggatccacctgttgccggtgaggtgccgctcgccgcgcgtccgcaggtggccgtggttgtccaccagcacgcggaggtcctccctcttgaaccctgggagcgagatcttgacggcgtcggcctcggcggcggagcggctccactcgacggcgggggtatgctcctcgtaggtgcggttgttggccatggctgcggtttcctctcgtgtcctggacgaaaggctggaagtagctaatgtgagacgtagtgctttcggaactaacaataacaatgcctctgctgtctgctgctggtggtggggttgatggcaatgggcgtttgtggtagatgtgcatcccggccggcctcgaggtacccaatg

SEQ ID NO: 2848 - DNA, 541 bp, Zea mays
  Clone ID: ZEAMA-23APR03-CLUSTER608_10
aggacaggttgcatttgcatctgagttcctgatcgttgtattccagtttcttccgtgagttttgtgggatcgcgaggaagaaggatgtcgtgctgcggaggcaactgcgggtgcggcgccggggcgcaggccggcgggcagtgcctgccgcagctgaaccgcctcctggcgtgccgcgcgtacctggtgcccggcgcgccggaccccagcgcggactgctgcagcgcgctgagcgccgtgtcgcacgagtgcgcctgcarcaccatgggcatcatcaacagcctgcccggccggtgccacctcgcccaagccaactgctccgcttgaagcagggacctggcaccgtgctgcaatggatggcaggaggggagaggaataagaagtgtttccatttcacagtgagagcagtcgagctccaacgttgtcgtcgtcgtcgtcttcttcttttgatattcagactctgtcttgcggtctatatcatcagcataataataataaaataagtaaaaccaaaccatgcatgacaaaaaaaaaaaaaaaa

SEQ ID NO: 2849 - DNA, 1260 bp, Zea mays
  Clone ID: ZEAMA-23APR03-CLUSTER61378_1
ttttttttttttttttgaacaaaatgttcctttactttgaatcagcattaacggtaaacatagaaaccaacaaccagagaaatgaaaacaaagaaaagttaacaagataacagcaaaagaaacagaataacagacgcaaatctaaggggttgaagttctgtctatttgacctttgggttgtaacatgaacaaaaatataccacctgcaactgaaacattcagagattcaaaagtaccttccattggaatgtttacaagctcacatgcctggagggtctctgcagagagaccattgccctcacttcctaacactaagcacagagactcattcaacagtgaatcagctagttcgttggacagcgagtaggtttctttggatgcatcactgctactttctggatgccctgccatcatcttcatacgatactttgtcaccaatgcatgcaggtcatgccacgtaccagagacaataggaagctgcaaagaggctccacgagctgctcgaatagccttttcattgaaaggatcacaacaagccggaagaaggaatactccatcccatttgaatgcacaagctgatcttatcagtgttccaaggttgccaggatcctgaatcccatcaaggactagaatcctctttggataactgaacaaaccatcaagagcatccccatcctgatggctcccgagatcgcggaaaaggttaggcatgtgcatgacagcaaccgcctcggtggaatcaaccgactgcatcccggacaccttcttcatcaccgcggcgctgacatacaatatatcaccagagaactcgcgcagcgcctctggggcctctacgccgtccaggagaagcaagtaatcgatggcttcgagctcaaaactacacacctccaggataggcgcgaggccgacgaggaggaggcggcggcaggagcgtcggtacgcggcggagagccggagcttgacgcagtgcttcaccagcgggttcgccacgctcgtcacctgcttgcgcttttgcccgcccagggaggaagccgccggcttcgccgtggcagtggccgtagtaacgccggcacgggaagaggacagaccgcgaaggcgaagggggcgctccagatcagccgggaaattggccgccgccgagagcggcgcgggagacggcggggcgcgcaccagtagcatcggggtggcgactggcgagtgctgcgtttgataacttcggctcgtgggcttggcgcccatcttatctgctccgaacagatt

SEQ ID NO: 2850 - DNA, 684 bp, Zea mays
  Clone ID: ZEAMA-23APR03-CLUSTER6145_3
acacgcgcctggattctcctcgcccctcgcctccctccacctgcagagagcgccacaagcagcggacgagggagacaagaggaggaagagatggcaggccgtgatggagccaagtcatcggcgtccatggaggaagaggcatgcggggagaagaagtacggaggaatcgcacccaagaagaagcctttgatatccaaggaccacgagcgcgcctacttcgactctgcagactgggtgctgggcaagcaggctgcgaacagtagcacgagggccaccgtcgagtctctgaagcccaagctgaagagaacgcctcaccaccagctgccccctcgcaagcccacctgcgcttccggttgagacgaccggacccatggtaagcttgaagctgcacctgaaacctgcacagctcaacggcatcagcagagctatgtgcaagtgcaaaagacgccgcaccgacatgaccgtgtccgtccttgcgtgtaataaacgtgtgcaggctacgcgttgcagctgctcggaggtgagggagggaggacgccgaggccgagctcacataaatgtctagctggtcggaaaccgtggtagggacgaatccgagatgcaatctggcttgttggccgttgcattgcagcacctattgtgtctttatcagttcgttatcaattatctggctttaagtttggc

SEQ ID NO: 2851 - DNA, 1338 bp, Zea mays
  Clone ID: ZEAMA-23APR03-CLUSTER6196_2
cactgccggcgctctatcttccgctctctctcctactcgcgctcggcaaggcggcggcgccgctcaggctcgggctacggcgtcagcggcatcccctccgcctctcgccagtcgcctcgcgccctcgcctccggtcacaccggccggtgactctgctaaaaatggtgttcctttcaaatgaagacgcctggatccatgatgaagacatcatggatgatgttgattcagatgttgaagaatcagactcagaaggtgattcaggtgaagaagctcaggctaagcctgcagacaaagcgatatacaacaaggaggctattcttgaaaaacttgaagacatagcctggcccaagaatgtggactggatgcacaaactcactgttgagcatgatcaaggggagaaagttgatgtgaacgatgatcttgcccgcgaacttgcgttttacacccaagctttggatggcacaaggcaggcctttgagaagctgcagtcgatgaaggtccggttcctcagaccaacagattactacgctgagatggtgaagactgatgcacacatgcacaagatcaaggggaggttgttgtcagagaagaagaggattgaggaagctgaggagcggaggaaggctagggagtccaggaagaaagcaaaggaggttcaggctgagaagaagaaggagagggctaagcagaagaaggagcagattgagtcagtcaagaagtggagaaagcagagacaacaagggggattcacgaagggaaatgatgatgtgccagaccttaattttgaaggagaagaaggatttaaacaatcaaagaaaaagaggcccggtgtttctcctggtgacaggtctggtggtcttgctaagcgaggtaaaggaggaaagaacgggagggcaagggattccaagtttgggcatggtggtcgtaaagggctgaagaagcaaaacactgctgagaccacaaatgatttcagaggctttaaccaggggggtgagcctcaaaacaagaagagaaagaggttttgaaccttttgatggatattgtaacttgtaagaatttggatgtgtgccaaaaccagaattaaaagatgttcgaacttttgctgttattactattcttggttgcagcattattttgttatggcgtttgctagaagcaaaaaatatctaatgttagtctagggaatcagtcaaacacaagacttgatgatttgctttatctggttatggttttcttttatcgtggattgcagataaatcttacccccactgcaagtatactcgaagttgctgctgttcttcctgttgttattccttctgttctgcatttgtttgggtt

SEQ ID NO: 2852 - DNA, 1826 bp, Zea mays
  Clone ID: ZEAMA-23APR03-CLUSTER619_4
gtgggacaggcatcatttggcgtcgggccggtacggtattggcggcgggccagctgacgagaaggaacggccgcagcccatcctgattcctgtcctcccagcaccggtgtctcatcaggaacaggaagcgaacaccggcggttgtcccgttccaattccaaccaacctacctaggctccgcgcgcacctaccccgtctctgctccggggagcgtcaccagtcagtcacggcggctctaaaatctcagataccaccagaccagaccagatccgtcccgcgaatctaaagtcaaaccaaccgcgatccgcgaatcagcgggagaggaggggaggggaggggcgcgggggcatggagttcctgcagggccagaggctggagaccacgctggccgtcgcggccgctgtcgttgccgtcgcagccggctccgcctacctcttcctccgcagtaggaagcccaggggatgcctagaccccgagaacttcaaggagttcaaacttgttgagaagaagcagctgagtcataatgttgccaagttcaagtttgcgctcccaacacctacttctgtattgggtcttccaatcggacagcatataagctgcagaggacaggatgcttctggcgaggaagtgatcaagccttatactccaactactctggactctgatattggatcttttgagcttgttataaagatgtatccccaaggaagaatgtctcatcatttccgtgagacgaaagttggtgattatatgtctgtgaagggacctaagggccgtttcaagtacctacctggacaagtgagagcatttggaatggtagctggaggatcaggcattactccaatgttccaagtgacaagggcaattcttgagaacccaaaggacaacacgaaagtacacttaatctatgcaaatgtcacgtatgaggatattcttctgaaggaagaacttgacggcatggccaaaaactatcccgatcgtttcaagatctactatgtcttgaatcagcctcctgaagtctgggacggtggcgtcgggttcgtgtcgaaggaaacgatccagactcattgcccagcgcctgccgccgacattcaggtattgcgatgtggacctcctcccatgaacaaagccatggccgcgcacctggacggccttggctacacgaaggagatgcagtttcagttctaagcgttgcattctctctaccagtaccagaataaacggcggtggaacaaagttctaagctccaaacagacgctcttttgtacccaccaaatttgtatcggtgtcgggacattgtaccatgccgttattttgtatcggtttgtcactcaccaaaaaaaaaaaaaaaaaaaaaaaaaaagaactctgcgtagttacctctgcgtcatacaaatactcttctgaaggcgtgacttgacggcatggccaaaaactatcctgatcgtttcaagatctactatgtcttgaatcagcctccttaagtctgggacggtggcgtcgggttcgtgtccaaggaaatgatccagactcattgcccagcgcctgccgccgacattcaggtattgcgatgtggacctcctcccatgaacaaagccatggccgcgcacctggacggccttggctacacgaaggagatgcagttccagttctaagcgttacattctctctaccagtaccagaataaacggcggtggaacaaagtctcagtcacagagcgtcgtacttactctacctggatgaaagcagcagtacagtacccacctaatttgtatcggtgtcgggaacattgtaccgtgccgttcttttgtatcggtttgtcactc

SEQ ID NO: 2853 - DNA, 1326 bp, Zea mays
  Clone ID: ZEAMA-23APR03-CLUSTER6211_2
gcacgagaccattacctagaacatcctaatcaaaagcaaacaaagaaatcagcaagcagccagcagccagcatcagtttagacgactgacatcgatccgcatgacgatgctgcccccggcgccgcggataaaatcatcagccacaccctggcaggcgcgatgctctcaggcctcggcctatggcacctcttcaaccacatgaggctcttggtctccctcgccccgacggccccgtcggcctcatcgtcgcgcgtcgccgtcctcgcgccggcagcatggttcccggcgccacgggtgcgccgcctcgagcccatcgccatgctggccgcgggagcgtacgggctggccacccagatgctcgcctactcgccgatgccgttccgcgccgacggctccatcccgccggagcgcctgccgaaccacgagcacgccatcatctacgcatcgctcctcgtctacgccggctccgccatatacctggacgaccgccgtcgccagcgccacgcggcgccggcgccgccgacgctctgcatgctcctcctggcggcgctcttcgcgcaggagctgttcgtgttccacgtccactcctccaccgacgaccacgccggcgtcgaggcccgcctgcactggttcctgcaggcctccgccgccgcgtgcctcgccgccgcgctgctcggcgccgcccgcctccccgcggacctccagctcgccgccggcctcgtccgctccgcgtccctcgcgttccagggcctctggtgcgtcgtcatcggcgtcgcgtgggtccccgggatgcttcccgccggatgctacctcgacggcggcggcggcgtccacctgcgctgccgcggcgaggacagcctgcgccacgccattgccgtcgtcaacctgcagttcggatggtgcatggtcctcgtcacgctgctcgtcgtcgggatttacgtgtacgtgtgcaaaaggtatccggctggagcttggtctcatggggaggtatacggacggctgccggaagcagaagctgcagacgaggacgacgacagccaccaccacgacatggagacgccaaactgtaagcagctggcggcgcacgatgacgtgcatgagttcacgtcactggagatcgacgtctaaattaagggtccataaacatgattgctcacggcctaggagcatacaccgcgcgttgttgcgcgaattgcggattaatggattgtgtagtatgatgatgtgtagactatacttatttgtcttgttgacgtgaagactacagttgtcatgtatgctattggattttaattgtatatgtggtggtgcattgcatgttgagat

SEQ ID NO: 2854 - DNA, 1435 bp, Zea mays
  Clone ID: ZEAMA-23APR03-CLUSTER621_24
ataaagggcgggggccgctagggttagcgcatcggaatcaatcgtgtttctcgcctccacgccgagaccaatccagccaccgccaactctttgcctcgcctctccgattcgagggaacgatggagtgcgtcaccgatatgcccctcgcgacgctggacagccgaccgcgcaagcggcagcggctcgggtgggacgtcgttcccgccgagatgtatcaggttacgctgccgcggcttggttgggacgtcggccccgccgagatgaatcagtttgcactttgtggacaagaagttgtgaatgccttcagtgctgcagtgttgggcctatcttcaggttgtgtttcttctcaagtcaaccaagagcagcctcatgatggttcccctcctctgagagaagatgacaagaatgggcattatgtttttgctgttggagataatctcacatctcgctataagatcaatgcaaaaatgggagaaggtacctttggtcaggtgttggagtgttgggataaggaaacaaaagaaatggtggccataaagatcatcaggggcattaagaagtacagggatgctgcaatgatcgaaattggcatgcttgagaagcttggtaaatatggtgaaagcagatccagttatgcatgaattgcgcctcatacacactgatttaaagcctgagaacattctccttgtttctccggagtacattaaagtgcctgattacaaagtctcatcccaatccccaaaggaggggtcctattacaagcagttgcccaagtctagtgctatcaaggtgattgatttcggtagcactacttatgatcaacatgatcagagttatgtggtatcgacgaggcactatcgggctccagaagttatattgggacatggatggagttacccatgtgatatctggagtgttggttgtattcttgttgagctttgcacgggtgaggcgttattccagactcacgaaaacttggaacatctggctatgatggagagagttcttggacctttgccgtaccatatgcttaagagggcagatcggcactctgacaaatacatcagaaaaggacgcctgaattggcctgagggttgcacctcgcgggagagcatgaaagctgtgatgaaattgtccaggcttcagaatctggtgatgcaaaatgtggaccaggctgcgggagatttcattggtcttttgcaagggctcctgaagtatgacccagcaagccgtttaacagcacgagaagcactgaggcatcctttcttcaccgaagggtttgggcgaagaagatgatacgtccttgaagcagaccttgtttgtcctctgtctctgaccaaactgtatataaagctgaaatggagctgtttcaatcttgtttgaaacgtcgtgtaactatagttgtatcacaagggaagtcagacggatacttttt

SEQ ID NO: 2855 - DNA, 1404 bp, Zea mays
  Clone ID: ZEAMA-23APR03-CLUSTER623_1
actactgcactgcactagccgcgcctcgcaggtcgcgtcaagcaagcgcaggttcagtcctcatcgcgaaggggccagatatgctgctatctgcgtttctcggcaattgcctgttcagctacccgccgccgcctcttctacccgcaacaacggctgccccgagaccgagcacgcgtctcccggttccctttcctgctcgcctcaggcccgcgtccctcgtcgcccgacggctgacggcggaggcgggggaggcgctgagcgcgttatccgccgcggagggcgacgacgaatacgaagcggagctccaggaggaagggtttccgagctgggcgggcggcggcgaggaggaggactacgaccacgaccccgaaatcggagacattatgggggactacttcgacgaccccaagaagggccaaacccgcatggaggataggataagaaagaaacgccacaagatcgtgcaaaccaagaccggctctccaaaccccatgaaggtcgtcttcaacaaatttgacttctccaattcctatatatggttcgagttctacaatgttttgttgccaaaagatgttacgttgatttctgattctctgcgatcatggcatatagttggccgtcttggtggctgcaattctatgaatatgcaggagctaacgtcactccgacgtccttttacaacattggtgatcttgagattcaagataatctagcacgagtatgggtagacattggtattcatgagccattgcttctggacatcctgcttaatgccttaacaacaataagttcagatcatgttggtattaagcaagtacagtttggagggtcagagtttttgaactggagcgaggacttgaagacagaagaagttggatatagtgtgtgcaaaatctaaatagcacaatcccgagatttgcagaagcagctacctttttagctaaacgcaaatgcaacatctggttcgaagctagggttttaaccaccttgatcctgcaaacgagaagaagaaaatggtgacaacacgatgaaaaattgacgtccaaacatattaacttctgcttgaaaagaggttgccgtccttacaggactctgctagctacacatcaacacatcattggtaatccttctgcatacatgtaataatataatataactagattatctgatgtccaacgtgtattgactctacttagggctgaacataatacttatggctcgttagttcgcttggctcgacttagtttatttcaattttgttacgagctaagttagtattttagctcggtttgttaacgagccatctcgttagctcaaacgagctatcatttatcaacaaaataaagtcttcacttatattggatgaagtaataagtgattagttatatttcgaccgagctatca

SEQ ID NO: 2856 - DNA, 1055 bp, Zea mays
  Clone ID: ZEAMA-23APR03-CLUSTER62414_1
ttttttttttttttttgcacggtataagaacacaacttcaatgctcatttctttttgtttctcacttctcagccgtgcatgcacgttaggggcctacgaggctacgaccggtcctgaacatgtacattaggggccgcaaattaagagccgattgccttggcccgctatgagaaagagagacgagataggaatgtcaaatgtctgcgcgcctagctcagtagctctaccactgccaccgacatgctgttcgcatatgcaatgcagtacaacatctgacaacggtagtactagcaaaaagcaaaacagaccagatagaacggccgaggaagtcataacaacatcgatcgaagtatcgaacggatcatttcaccactcccagaaacagcaggatctggaggaagatgtaggacgcgcccccgatggtggcgtactgcagcttgctctccccctccacgcctgcgaagtcgccgtccgcgcacttgctgaacccgccggcgagccacgccaggttcctgtacccgtcatcgtgcagcatcctcaccgcgatcaacgacctgaggccttcgccacaagcgacgagaagcttggcgtccttgctgccgtcgacggcggcggcgacgtcgtcgacgaagcggtcgttcatcttggtgaaggcctggccggtccagagcccgatgtagcccaagtggacccacttcttcagcagcgtcacggggcccatgtcgtcgtcccccacgaacagcggcacgtgcaccgagccccgcacgctggcgcgggcgcgctcccactccggccggacgtccagcaggcggaacccctcgccgcccagcgcctccgccgcgtccctcggccgcacggccctcaccgcgcccgaccgcaccagcgcctcggcgcctccggcccacgacgacgtcgcctgcgccctgacgcgacgtcgggccaggccaggggacgcgggcctggtgcaggtggatgcggccgccgcagcacccatagccatgcccacttccacttgctgcttgtcaattgaggcctcgctcagtcgcgttcgtttc

SEQ ID NO: 2857 - DNA, 1754 bp, Zea mays
  Clone ID: ZEAMA-23APR03-CLUSTER626_3
atatgttcatccattgtattcttccgatttaaactgaaaagcttaggtgacgtacgttgtcccttcgtttgaaggtcaagatcatcagatacgcgccttgcggggagatcgtcaagcacgcatcgcggctggagcaggagatagaggagaaccctgcttctatccctttccaagagataatatactgcaacctcgggaacccccaggtccttggtcagccgccactaactttctttcgtgaggttctctccctgtgcgacaacccagccctcatggacagagatgaagctcgtgccttattcagcccttgtagcataagaagggccaggaggatcctaaactcgatccccagcaaagacactggtggatatactgattgccggggaatcaaatgcctgcgtcaagtagtagcagatgggattaccgcaagagacggttttccatcgacagcggacgatatctttctgacagatggagccacctcagcgatcaacttgatgatgcagatactcatcaggtctcacgaagacggcatcttgagccctctacccgaataccccttgtactcggcctccatcatactgcacggtggaacgatggtgccgtacaatctcactgaagataacggttggggcctagagatctttgaagtcaagaggtgcttggaagaggctcgttcggctggcctcactgttagagctatggtggtaataaatcccggcaaccctactggacaggtgctatccgtcacaaaccaggaggagatagtagagttttgtcggaaggaaggtctggttatacttgctgatgaggtataccaggaaaatatctacgcagagaacaagaagttccattccttcaagaaagtggccagatcacttgcttacgacgaaaatgacctcaccctagtatcacttcattccgtttcaatgagctatggggagagtggcagaagaggaggctacatggaggtgtctggtgttgcagctaatgtgaaggatcagatttacaaggtggcttctttaacactctgccccaacattgctggccagattctcgtcagccttgcaatggatccaccgaagaacttcccttgtgacctgtacgcagctaggagatgaatctttcgagtcatttgataaggagaaggaacagatccgttcatccttctgcaagcgagccaagaccctggagaaagctttcagcggcctggagggcgtgacttgcaacaagttagagggtgcgctgtacttgttcccacggctccacctcccctccgctgcgatcagggccgccgatttcgagggagtttcacctgacatattctacgctcaccgcctgcttgatgccaccgggattgccgttgtgccgggctctgggttccaccaggcctctgggacgatccatatccgatgcacgatccttcctgacgaaagaaaaatcgaggcgatggtcgcacgcttgagggcgttccataaggcgttcatgaacgagttccggggctctcagcaggtcatgaacgatctccgtcgctgatggtgtcgatgcatggcacggttaggcctgtgcgtgtgcccatgggcaatcaagacaacttctgagctctggagttgttgtttgttgttctgtgttcttgcttcctcgttgagctgtgcccgtttgtcctcacttatgcagtcagtggtctgtctgtagtctgtactgcttaaagataagctgtgctttcaggaataaaaagtctgcagcttgtgcat

SEQ ID NO: 2858 - DNA, 1702 bp, Zea mays
  Clone ID: ZEAMA-23APR03-CLUSTER6292_2
attgggggtgttaaaccgcatcgcatcgtcttctagggtttcctcctcccgccgccacttgctgccccacgagcccattcccctcagcccttcaccatctccggcggtcgcagtggcatcagcagctccggctcacgcgcagcaaaggaacgacaatatggcgaccatcgtaaacacgacggaggaggagccgatgctggccgtggtccgcttcaccgctgagctcgcctgggccgacgcgggcccggaagtcgccgaccccgaggtcgcccgcctatgtctcgaggcgcaggagcatatcctcgcggggcggtggctcgacatggcctcccttatgctcgcctccgccgacctcctcctcacctccccgtcgcgcgtctcggacaaagacctggagtgcgttctctccgtcatctgcagcctcgtcaccaaggccggatccgaggaccaggcgctgcagatcaccgaactcatctgcgctaagctcacccagcaacacggtgacaagccagcgctgcgcctcaaagttcttttcagcttgtacaatctgctcccgagcccgtacggcaaggcatttgtttacaagaaggctcttgagctcgccacggctggaaaggctgctgagtacatcatcccatctttcaagaacattgacagttttgtcagtgagtggggaattgacaatttggagaagagggagctataccttgctatcactaccatcctcaaagaccacaagggcatggctaaggagtactttaactttctcaataagtaccttgccacattcaaagggtcagatgatgaatcaggtataattggtgatgcgaaggaagaggctgttgcggcaatcatcgagtttgttaaatcgcctaatctctttcagtgtgatttgctcaacatgccagctgtttcacagcttgagaaggacggaaagtatcagttggtgtatgaactactaaagatattccttactaagaagcttgattcctacttggagtttcaaagtgcaaactctgacttgctgaaagattatggtctcgttcatgaggaatgtgtaaccaaaatgcgcctcatgtctttgctcgatctgagcagccgatgctctggtgaaatcccttattctgcaatcactgttgaactcaggatcaatgatgacgaggtggagcaatggattgtgaaggcaattgcatccaagatattggattgcaaggttgaccagcttaaccagactgtcattgtcagtcggcacacagagaggatctttgggatggaacattggcatgctctgcgcacaaagctcggagcttggaggggaaacattgccagagctatcaacacaatacaagctaacaaagtcaccgaagagggggcacaagggatgcaaggcttggcgatccactgattcggggcgggtcagcgggttcgtgaattgagattatagcgtgggagattagaagggcaaccttttttgtatgagacaagttgtaatggtttatttacttagatcccgtaaccatgcctggttattccttgtatttggtcagacacgccgcgcagtgcaaggcagttgttacacatcccaagtttttaccctcgacgtggtctgtcctgataaatttccttccctgatattttttttttttgcccaaaacccacgcgtccgcccacgcgtccgcccacgcgtccggttctagatcgc

SEQ ID NO: 2859 - DNA, 795 bp, Zea mays
  unsure (1)..(795): unsure at all n locations
  Clone ID: ZEAMA-23APR03-CLUSTER62931_3
cttgtctcccacgggccacgacagacccttcctgaagcccaatcggcccgcacgcaaaaaaccctcacgcgtattaagtcatccccctcaccanctagggttccctttacagccgccgccgccgacgccgacngcgacaccgacgcatctcccagcctccccgcactcgcttccgtcgccgcagccgccgccgccgccgccgcttcgcagccatgggtaaggtgcacggatcgctggccccgcgccgggaaggtccgcgggcagacgcccaaggtggcgaagcaggacaagaagaagaagccccgcggccgcgcgtacaagaggatgcagtacaaccgccgcttcgtcaccgccgtcgtcggcttcggcaagaagcgcgggcccaactcgtccgagaagtaggcgcgacgccgttgggctcgcatgcctatgcctatgctcttgctcaaggttcagctaggcgctaggcggaatctaggcggtgacccattgcctagcgcctagtcgggagtactcggtcttaggcgcttctaggcgtttttctaggcgttttggcaatatagccataaattatatatatattatgtatataactaattaactactatatatgacgatatgagtcacagtaagtataaaaagaaggccagtaaaaaaaaaaaaaaaaaaaaaaaaaaaaaaaaaagggcggcgctcgcgatctagaactagcggacgcgtgggcggacgcgtgggcggacgcgtgggcggacgcgtgggcggacgcgggggggacgcggggcggacgcgggtggg

SEQ ID NO: 2860 - DNA, 1939 bp, Zea mays
  Clone ID: ZEAMA-23APR03-CLUSTER62_1
aacgaatcagctctggtccacggcaacaacgtctgggcaccgttccaccccggccgtagacacatgccatgcgcctgagggaaggcggcgccgcgcaccgccacctcgagtagttcatgcccccgcaccaactgcaagaaccaggcaccgacctcaaggcccagcaatcgtcggccaggtgcaggagtagctcgccgtgtgcaggcgcagctcgtccacttagccgccggtcacctggcagcgtatgcgagtgtcatgcagaggaccacgccgccggcgtcttctttcccttcctggagcccttacgccgggactacggcggcgctcctcggcgccagctcggcctttatttccaccgacgccgccggcgccgactcgtcgtcgcccggcatgcgccttctgccagcgggggagcacggcggcggccatgcatacggcgaacaaagcaacatcgcatgctacaaggagaacttcctcgacctgctcgcgtcgaagaacgtgacacaggagatgttcgacgacgtccccgccggtcactacaccgcgcaggcgctgcctgtcaggaaggttcgcggcaggctctgatgttgcaccgccggtcaagtacgaggtcaccggcggctcgccgctgttcttcgggagtgctgcagcagctgcaggtggtatgcaccagcaggggatggacatggcgggttgcacgacgccgcggtacacctacggcgccgaccaccaccagatgaaggaaggcggtgaccagcagcaagagcttgcgtccccggccatggcttcctttcttcagcagctgagttcaaacgctggtggtggtggtggtgttggcatgcatgctgctagcatggactactcaggcacaggaggaggactcgacaggatttgccatgagagtcgggcattggaagctggacctttcggcatgaggagcttgccggatctcagctcttttggtggctacagcagatcaacgaccgcagaatcgacatcgtcggcgcagccatacctgcagagatccagcagtctcgctgaaagcagtaggcaacaagagccggatattgtgtcggcaaggagcagcagcagtggcagtggagcagcgagcgagcagcgaaagaagcgggcgtccgaggaaaggacgagcaccgtgaagaagtccaagcaagagggctctaaaccatctcctcccaagcagcaacaggtgcctaaagtgaagatcggagagaagatcacagcattgcaacagatcgtttcgccatttgggaagactgatacagcgtcagtgctgtttgaaacgatcaagtacatcaagttcctgcatgaacaagtacagctactcagcgagccgtacacgaactcgagcaggagcaagggtaataaccacttcccatggggagatcatcgtgctgctgcagagacgagcaagcagggagatgaggcagagcacgacctgagtgacagagggctctgcctggtccctgtctcgtggaccccgcaagtctaccgggacgggactgccatggactactggacgccggcgtacaggggctgcctgtaccgatgagatgacaactccctcgtctgactagttgctcaaacattccttactgtcagtgactggtctgcacaggacggcagcgcagttgatctccttaactatgttgcatgtggtccctagctagtttgtagtgctggtttgtattattgtttaatttgcagtgtcgtgtttgctgatttgtgctagctaatgagtactgaagggattatctggataaaaccacctttagcctctcatatctgtaacgtacgagatgctgcaccacagcataagaatgtgtttgcctgtttaaatgagctgctagtgattattacagaacaaaaaaaaaaaaaaaatggtgtcggtcatctggactaatatatacgtttgtgcatg

SEQ ID NO: 2861 - DNA, 1783 bp, Zea mays
  Clone ID: ZEAMA-23APR03-CLUSTER63612_1
ttttttttttttttttatttttttttagtcgcaatcccaccaccaaatccccctttgattagttcgttggataacgacttgccttgttgaggcgacaatccctccttctgtcctaagattcaatctcacccatgcatgcatatccttccattccaaatgttgctatctccagtctaccacttgctatctgaacattcagatgttcagatattcagatgtctgaacaaataagtcgtcagcaattcctatcaagctgcgacggcgtccatcacaacatggacagctcaaactaagctaaaatatattgatcacaacatggccggacgatcaagtacatgtaatgcggagggagggagggctctacagacagacgactagtgtgggtgtggtagtacaacagcaacgtagaagcacaggtttacttgcactgccttgggtggaacttctcctccgacagcaacgacgtgaccagccgctgcagccgcgcggctccacggccaggcacaacaagcccggtgtctccgaccaccgagcaagggtcgctcccgttctcccgcgtcccagcgcaccagcccccgggagtcggcacgtccgcgccgcggcccaggatctcctcgtctatcctgtccagcaccgggtcgtcctcgtggaacttgcgggcgaacggcgcgtcgctggcgaccatgcggtccaggtcctccgccgtcaagtagtgcgggtgctgcttcggagggttgtcccacgagatgtagtgcaggtcgtggttcaccgtcgtgttcttgaactcctccgcgttgcacacaacggtgtggaagtatccttccggcgacgagatgaagtttgagtagtacatgagcactgtgcgaggtaggttgtcccagccccatatgcagtattccacaaagggcctggacagtgccatccaggcagaaccagtgaagagcttgaatgctgtaggcacactccgcctctgcggaatccagaacacatcggctttcttcttcatgtagagccctggatcaatgatgaccggctttgccctttgaaactccttccatccaatgtcgctggtgtggtcgatgaagttgagatcgcgcggcagcttggagaatacgtgtatcagatccatcctgcgtgacgagcgggtaatcggaggcggagaggttgatgaaccaatcccagtgcgaggcgccgtcgccccacaagaaggcggcggcggcgtggagcgtgttggcgaccatggtgggcccgcggtaggtgacgaggttggcgcggtcgacgacgcgcacgttggccgcggcggcgatggcggggtgggaggcgaggtcggcggcgaggttgctgcggtcggagtcgggcgcctcggcatcgaggtgcaggatgtagcggttcctcgggtggtagagcgcgaggaggacgcggcggagcgcggaggcgtcccccgcggatccggagatgaggaaggcgatgcggggcagcgaggcggcgggggacggcggggagggggcgagcttgtgctccacgaagagcgctgaggaggaggagggcgcggagggcgaggggaaggtggtgagggcgacgaggaggaggagcgagagcgcggagccaacggccagagggagcagccagcggcggtcgacggcggcgtggagtgagtgggcgatgggcttcatcgcctcgccggaggtggatgtggtgggggccccaggtggcagcttgttgtgccgggcggctcttttgatttggagtactttgggatgcaggctgcggtcgaggtacccaa

SEQ ID NO: 2862 - DNA, 1148 bp, Zea mays
  Clone ID: ZEAMA-23APR03-CLUSTER6364_3
gcgctagtcgacactcgacaggctcggtttccgccctcctctcccaccgccgcgcaccgagaagatggggaagcggtggatcccgctggaggccaacccggacgtcctgaaccagttcatatgggggctgggagtccacgaggaggatgtgcagttctgcgacgtctacggccttgacgatgagctgctcgctatggtgccccagcccgttctcgccgtcctcttcctctacccgctcacctccctggacgaggagaaagaagaatcaagtgtttctgctgccacatcgacctcagcgggcaaggaattgagcaagaaagtatactttacgaagcagactgttggtaatgcttgtggaacagttggtgttattcatgcaataggaaatgcaacatctcaaatcaagctagttgaggggtcctattttgagaagttctataagcaaacggctgatatggatccagctcagcgtgctgcctttctcgaggaagatgatgagatggaagatgcacattctgttgctgcatctgctggtgacactgatgctaatgttgatgttaatgaacattttgtatgtttctcctgtgttgatggtgaactttatgagcttgatggacgaaaatcacaacccacatcccatggcccttcatcacctgaaaccttgttgcaggatgctgcaaaagtcatcaaagctagaattgcagagaaccctaactcgatgaacttcaacgtcatggctctttcaaagaagtgaagtgtactgtgatggatggattttctttggcagaatacgggcctctttccctttcgcttccgctgagctgagctgcaccgagtggaaggtttgcattaggcaaacatagggaaaaaaaactttatatgacctgagatctttgtttgatgactcgatgtattctcgtgccttcatggagagagaaatgactgttcaggatttcaactttttggacgagtttcactttgctgtatctgaaccattctagcttcctcggcaggttgatttcataaagctagcatttctatgttttccctgcaaatgcatgtagttttctgtagaatgtaacctattaaacggaattggtgacacctggctaacgaatggaaacgttatttggggattgcgatacgtt

SEQ ID NO: 2863 - DNA, 1053 bp, Zea mays
  unsure (1)..(1053): unsure at all n locations
  Clone ID: ZEAMA-23APR03-CLUSTER63714_1
ccncntatnnntnatacattctcatgtaaagtnannacncgtataatnggttcgnacatncaccnnatttncanatancccannnanntgggaatgnnnganacanntttannaggaanattnnncntaaancnnaatngnanttacccnctaaagannaaantgagnccccnannganggcnnntnaaaanaanggntcccccgggnnnnaantattattgttttttctttgcntcccaatcaaagggattgatcattctatctcttcaatgtacatataccatatcgacatggtacctacgatgtttcaggttacaaatctgtgcgcatcatctcagctccagaatcgcatgctgaagatacctgaatgacttctcgtagctgacaaagcccatgaaccaaaaatcgaagccatcaacagtaactacatcaatgtacttctcgtctggattgtatagatttccccgcaccgacgcactctttatcctcttcgtggggatcaacaccttgtaaggcacccttgtcctgcctcctttgggagacaatagattcaaaggcctatcgctgtggaaagcgatcttcttagttgagatgaaaagcattccggctatcggaccggctgtggtcgaaagatagcactggaaggccttcagtagcttctcatcttcctcgactgtgaagtattctctgaaaactttatcgatgccgccggcttggagaaccttcgcaccgaagctcagtttcccctttatagtttctgaaacttttggtcccagagacaagtgttctttgaacccttgcatgtagttatctgttttgtggctcagtttgttcatccagcaaatgaaggaacccttcttatttttcttatgaaccatggcggaacaggaaggttttcctcgtctttcctcatcggcgtatgcaaatgaagtcaatggaactccaacgacatgcttctggacgaaactctccattgcttggacttggagaaggtctgtgtctacaaatctgctttgacgcctgctgctactgctagtgcgccggcctcgagg

SEQ ID NO: 2864 - DNA, 1854 bp, Zea mays
  Clone ID: ZEAMA-23APR03-CLUSTER6393_2
ccagttccactctcgcttccttccctccctccctcccacgcaaatggtggccgctcgcctccgcctcgcgctgctactctccgtctgcctctgctccgcgtgggcgcgcccacgcctcgagacggccatccgcctgccgtcgcagcgcgcggcggcggccgacgaaacggacgacggcgccgtcgggacccgctgggctgtgctcatcgcaggctccagcggctactacaactaccgccaccaggcggacatctgccatgcataccagatcatgaagaagggcggactcaaggatgagaacatcattgtcttcatgtacgatgacatcgcgcatagcccggagaatccgaggcctggtgtcatcatcaaccatccccagggtggcgacgtctatgctggggtgccaaaggattacacggggcgagatgtcaacgtcgacaatttcttcgctgttctgcttggcaacaaaactgctctcaggggtgggagcggcaaggttgtggacagtggccccgatgatcatatctttgttttctacagtgaccatgggggtcctggtgtccttggaatgcctacgtatccatatctctatggtgatgacctcgtagatgtcctgaagaagaagcatgctgccgggacctacaaaagcctggtcttttaccttgaagcatgcgaatctgggagcatctttgagggcctcctgccgaatgacatcaatgtgtatgcgaccaccgcgtcaaatgcagaggagagcagctgggggacatactgccctggcgagttcccgagccctccaccggagtatgacacctgcttgggtgacctgtacagtgttgcttggatggaagacagtgatttccacaatctgcgaactgaatctctcaagcagcagtacaagttggtcaaggataggacagcggttcatgacacgttcagctatggttcccatgtgatgcaatatggcgcactggagttgaatgttcagcatttgttttcgtacattggcacagaccctgctaacgatggcaacacgtttatagaagataactcactgccatcgttctcaaaagccgtcaatcagcgcgacgctgaccttgtctacttctggcagaagtaccggaaatttgctgatagcccgcctgcgaaaagcgaggctcggaaggaactgcttgaagtgatggcccacaggtctcatgttgacagcagcgttgagctcatcggaagccttctctttggctctgaggacggtccaagggttctgaaagccgtccgtgcacctggtgaacctctggttgatgattggagctgcctcaagtccatagttcgcacttttgaggcgcgatgcgggtccttggcgcagtatgggatgaagcacatgcgatccttcgcgaacatgtgcaacgctggcatccttcctgaagcagtgtcgaaggtggccgctcaggcctgcagcagcattccgtccaacccctggagctctatccacaagggttttagcgcttaagaaccataggcgaggcgaactccctgacgctgcagctctcagggaggtcttagttcttgaacgaccataggtgaagcagacttatgtataccctgccacattgcgtacctatggccagtttccggtgtacatatatagtcggaaatttattcggcaattgtattggtcgttggtgtatatattccctatagtttgttagcagatgtgtttgtttgtaatcccgtaacaaatgaagaatgcatgatgttcatgcgaaactttacctggttcttgttgggcaatgtatgaatggactatccatagtgggattcttgcctccaaaaaaaaaaaaaaaaaaaaaaaaaaaaaaa

SEQ ID NO: 2865 - DNA, 1913 bp, Zea mays
  unsure (1)..(1913): unsure at all n locations
  Clone ID: ZEAMA-23APR03-CLUSTER6397_1
ccccccccccccccccaagctcttcatggactcacagcatgctggaaataaacttgatcgtttttgtctagctgaatgtttgtcatccagtgcaaacttggcatcattanaagaaggcatgcagctacatggtcttagtgtgaaaaacgggctggattgtgatagtcatgttgttaatgccacaatggatatgtatgggaaatgtggaaagatggactgtatgttgaaaacgctgcctgatcctgcccatcggcctacgcagtgctggaacacattgatatcaggttatgcaagatatggctatttcaaggaagctgaggatacattcaagcacatggtctcagtggggcaaaagccagactatgtgacatttgttgctctcctctcagcttgtagtcatgctggtctaatagacaagggcatggattactataactctatggcacctacatttggtgtttctcctggaattaaacattgtgtttgcatagtggatctccttgggcgtttggggaaatttgcagaggcagagaaatttattgatgaaatgccagtcttgccaaatgatctaatatggaggagtttgctgtcatcaagtagaacccacaaaaatctggatattgggaggaaagcggcaaagaatctccttgaactggacccatttgatgactcggcctatgttcttttgtcaaacttatatgctacaaatgcaagatgggtagatgttgacaaattaagaagtcacatgaagactattaagttaaacaaaagacctgcctgcagctggcttaagttgaagaatgaggtgagcacctttggtataggtgaccggagtcatatgcacgcagaaaagatctatgtgaagttggatgaaatcttgctaaagctcagagaagtaggttacgtcgctgatacctcatctgcactacatgatacggatgaagagcaaaaagagcataacctttggaaccacagcgagaagcttgcgttggcatacgggcttcttgtcgtgccagaaggatctacaataaggatattcaagaatctcagggtctgtgcagactgccatttggtatttaagctggttagcatggtttttcatagggagattgttctgagagatccttacaggttccaccaattcaaacacgggtcatgctcgtgttcagatttttggtgagatagtcataaaaccaaatatgaatcggtccctgcctgtcaatttctctacttgttcttctgatgtatcatgtgcgacctgtcgctggccaagcaaggcaaactcttggacgttgtccaggcgagcactggagcagcagcacctcacccaacggtgagggaggtggttgccaactactactcccccaaccgtcatcgccgatggctcccatcatcggtcagaggaagaggagttgctgctgcaaggcagattgtacttcggtcttacgatcatgatgaagcgcactgcgtggcagcggtagctggtgcacggcaatggtagcatggggctcatgcttgacaccgactgtccatgatgcaaagggacgactaatcgaccttccttgacatggctttggctccgcagcctcatgacaggtggagggcatgctcgttatcacttaaacggctacacaacatggtcacctgcttatgcaggatactaaacgggtggcaactctccgttttgtttggtttaaggttaaagtaggatgatacggggtgacactgtccccttgattttttagaatatgctgtcacaaaatttacttcggtatttatctcgttttcacgtgactgtctcaacactatacaaactgtttatgttccctttcatcttttttgtacatccaatcaaacagatgacagatcggagaaatatggttctcaaagtatatgttattgcatcttacaag

SEQ ID NO: 2866 - DNA, 2263 bp, Zea mays
  Clone ID: ZEAMA-23APR03-CLUSTER6398_2
cccagacccagacccagagaggagggcgacgaacacacggtgacggagagccgagtggacaggacaggagcgcggagggaggaggaaacaaagcagaaaagcaacccccgtcttccatctttgcggagcgacgcgcatctgccctgcccatctctttcgtgctcctaccccccgccttcttccgcccgccgcctcagccctcaaggcttttccttctcagaccggggacgggcccgacggggacagggaaaaaaggtggtgcgatcttgttgggcacactccgcctccgcgcgcgggaagagagagagagagagagagagagagagagagagagagagagagagaaggacggagggtggcagggccgccgcgccggtgagccgacccccagccatggcattgccggctccccccgtccgcctggcgctgctgctgctcgtcgcgctgccattctgcgccgcgcatcccgggccgggggccttcaacgctcctcgccacttccagacgcccgcgctccactctgatggatttggcttggtggcaagaaggtcggttgctgaagctcctgctgacatcaacgtcactaccaatagctcctttgtgctggcggcagataggacatatcgaagggaccctttgaatggcttcaggaaatacccgggcggctggaatatcagtgaagtgcactatttcgcttccgtcggatatacagccattccgctgttcgccattgctctcgtgtggtttgtgatctttttcctggttatgcttgggatttgctgccgtcattgctgttgcccgcatcacacctacaagtattcacgaacagcatatgctctatcattgatacttctaatactgttcacatgtgctgcaattgctggatgtgctatgttatacgatggccagggaaaattccacaagagcacaacgactactctgaagtttgttgttagccaggcaaattatactgttgacaaccttaggaacctatctgatagtttgtctgctgcaaagaaggtcgacatagcacagtcctttttgctgcctcctaatgtgcagaacgagatcaatgaaattcaaggaaagctgaactcatcagctactgatcttgctattaaaacaacagataatgccgcgaagatcaaaaaggtgctaaacagagtgcggcttgctttagttgtcattgcggctgtgatgcttcttctggcatttgttggcttcttgttatccatctttggtctggaattccttgtctctgtcttggttattattggatggatattggttactggaacgtttatcctgtgtggtgtatttcttcttctgcacaatgtcgtttcagatacttgcgttgcaatggaagagtgggttgctcatccgacagaacacacagccctggacgaggttatcccctgcgtggagcctgccacggcgaacgaatccctgtacagaagcaggcaggtgacgttcgagctggtgaacgtggtgaaccaggtgatcaccaacgtgtcgaacatgaacttccccccgcagctgacgcctttgtactacaaccagtcggggccactgatgcctctgctctgcaaccccttcacccctgatctgagggaccgcaactgcagcagaggagaggttaccttggacaacgcaacccaggtctggaagaggtacgagtgccagagcaccaccgtctcaggaggagccgagatctgcgcgacgatggggcgcgtcacccccagcatctacgggcagatgaccgcgggcgtgacggtgagccaggggctgtaccagtacgggcctttcctcatccagctgcaggactgcaccttcgtgcgcgacaccttcacgaccatcaaccagggctactgcccggggttggagcgctacagcaagtgggtgtacgtgggcctggtgatggtctcgtcggcggtgatgctgtcgctcatcttctgggtgatctacgccagggagcggcggcaccgcgtgtacagcaagcagcaccagccgtacccggtggaggacaagccggcggcgacggtcccgggcgcttgaattgatatggcccgttccagtgctgctgtgcatactccgcgctagttgggttttacgtggtggtgtaggtggatgatgtaccctggattgttgttcgtttgcttggtgttgctgtatgtttgctgattttaagttgttgtgcattctcgtactgacggtagctgtatgaattgattgtgttgggattggttattattaggtgttcttc

SEQ ID NO: 2867 - DNA, 764 bp, Zea mays
  unsure (1)..(764): unsure at all n locations
  Clone ID: ZEAMA-23APR03-CLUSTER64371_2
ggaatcaaagccccaatttctagggttcatcactcccgcttcgtactgaacacatcggaacattcctacatgttacaagagtacactgtatctataacacgataataattcactaaaagtaagtagctgtatgtcgctcgctcagtagatcgtacaattgcaagagaggagggccaaacaaacaaacaaaccaaaaagagagagacatcgcggagcacgatcttaactctaagcgatgggcggtcaggcggtggccgtggcccgctgcngccgctgggtcctcaccgcggcaggcccggccggcgagggcgggaggcgcgcgttgaagttcctgtaccggaaggccgcggcggggtccgcgtaggcgtcgtcgtcctcgccctcgtcgaagttgagcgcgtagctcagcgggtcgtagcggaactcgcccgcggccgtcgccgccccccgccgccgccgccaccgagccctctccacgccgaagcagcagcacaccgtggtccgcagcttgtcgcgcagcttcgacggggacgacggcgttgaggcctccgcggcagcgtccatcgatctcgccagttttccgggcccaacgagacggtccctgttcctcgctttgcttcgccctagatcactgcgcgcgcgctggtcctgctttgatttgggaagtggaggaagaagtgctgctgcgattttgtaggagaaggaagtgcagatgcgttggagccttggagttggagttccggccggcctcgaggtacccaatg

SEQ ID NO: 2868 - DNA, 1754 bp, Zea mays
  Clone ID: ZEAMA-23APR03-CLUSTER6465_2
gcacgagaccattacctagaacatcctaatcgaaaaatcgagttggtctttggtcgtgcatcgtgctgaactgctgacgcttcgcgcgggtccgaggtcaggcggcagcagcacggagtagcaccagggcgaccgcccaggttatcgtcggccgccggcgacctgtaccccggcgagaagatgcatctgagctcgatctccgcgcctcctcctcctggtcccagcagctcctcgacgccggcgtccgaatcatccaaggggacataagaaagaaggatgatgtgcggaaggctttccgtggagtggactgtgttttccaccttgcttcttatggcatgtcagggaaggagatggtgcagactgggagatcttatgaggttaatataaatgggacctgcaatgtactggacgcttgccatgagcaagatgtcagaaggcttgtgtatgtaagcacatacaatgtggtattcggaggaaagccgattgtcaacggaaatgaggcgttgccttattttccgattgaagaccatgttgatgcttatgggcgcagcaaatcagttgctgaacagctggtactgaagagtaacgggcggccagctaagagtgataaaagtactcgtctttatacatgtgcaattcgccctgctgctatatatggaccaggtgaagagcgtcattttccaagaatcctgtcccttgcaaagttgggattagctttcttcaaaattggggacccaggtgtcaagacagattgggtttatatagataatctagttcttgctctgatattggcaagcatgggacttttagatgacattcctgacaggaagggaactcctgtagcagctggtcaggcgtatttcatatgcgatggatcaccatgcaatacttttgaatttatcatcaagcccctttttcaaagtttgggttattccgttcctcaagtggtgctggatacctccgttgcccttgccgtttcaagaatatttttattcatatctacactgttctacccatggcttgatagtaaatggatgcctcagcctctaattctccccgctgaagtttacaaggttggtgtcacacactacttttcgttcttgaaagctagagaggagctcggctacgtgcccatggtgaggccccacgaaggcttagccgcaacgatctcgtactggcaagagcggaagagaagggagctggatggcccgaccatattcacttggctggccgtaacgatcgggatgctggccgtgttttctgccgcctgcctcccggcagtcggcccgttgaaatgggtgctcgacgtccacatgtttgttttccgctcgatgctcgtgatccggctggtcttggcggtagcgatcgcactgcatgctggcgaagccgtgtacgcctggttcttggcgagaagggttgacccgaggaacgctgccgggtggttctggcagaccttcgctctggggtacttctccctccggtaccttctcaagagaggcagagcgtgaattcgtgtttggttcacatgtacgtacactgcggatcctgtaacagtggttccaacttccaagcttcatgcttggtttttattgaggaggaggcgtcaggcgtatgagcaatccccagatcgtatccctcctgacatctgcctgtggtcggatcggatgtactttgtggtgatactgtgaactggtgaaagtttaacaggtcgctttcttggatgagctgtaatgtaactagccattgttagatcc

SEQ ID NO: 2869 - DNA, 1407 bp, Zea mays
  Clone ID: ZEAMA-23APR03-CLUSTER64707_1
ttttttttttttttttgccaatataacttttgtattctttcttcctcacttcagatcagatgttgcttcgctcacatggtgtgtatacatggcagtacgttgtaaattatacagaaccaagacaaacgttgagaaacatttgcactgacagccctgaggtacaaagttattgccatgttgcaatgggcacacacgactcttaaacaacgttgctcacattgtcaatgttgaattatggcagcccttcaactgtcaatgttgctcacattgtccccccttgacatggcagtcccttcattcagacaagttggatgcgcaagaccttgaggtctgcacccactttgtttgacgaaagcagtaagacaattaagcttctagttactccatcaggtcttataagctccgtccacacgagatgattgaatcaataagaaaggctgtttgttacaggggaacgagtcacgtgttaaaagtcccaattatttggttaccgagacagagcagccaacatctcttctagtaaccttctccccgacttctgagtgaggtagcaaacgctgcacactcctgacatgtgaactgcccagacgctgatagattctctttcaaatttgaatgcctctcgcagtagggacggttgcatgtgcagcattttggaagcttgagccagcaatccatgcacagaaagtcagagcaggctagtccagactcaccgagctcctccaggtcgatgcagccaccacaagtttcacatctagcaacacaaaagaagcaaccgcggcatcgagaccggccatccttcacttccctgcagttcttccttgtacaatcaaacacgagtctcacatttcttgcagataccatgcagtcgaacacgacttagattgcctttgtgctgcccatgcagaaaatgaatgattttcaccagaccatcagctgttaatcctgtgcatctgggcacaaaaagctcggtgacgtcgtggttgcgctcgacgatgcgcagcaggccggcgtcggatacgcgggggcacccgaggaggtggagtgaccggagcctcccctgcgccctgtccgtcaacgcgaggagcgcctcgtccgtgatccggtggctgagcggcggctccacgacgaggcgcagccacaggagcgggtcccccgcgacggcctcgcggaggccgcggcacgtgcgagcgcaggacagcagctcgcgcagccgcatgtaggtcagagccaggaggagcgcggcgtgcggctcgctcggggaggaggcggggccggccgtgggcggcggcggcgcggcggccgtggcggttgtcggcagcatttgagtggtcgaggcggttgccttgattgaggaggcaagtggaaatgacagcagcacgattgcacggccgccgccccgttgcc

SEQ ID NO: 2870 - DNA, 1973 bp, Zea mays
  Clone ID: ZEAMA-23APR03-CLUSTER6515_1
acgtttataaagcggaggcccagcctgtcttctgcccgcacgaattcgaatccgccggaggcggaggagacagcagccgggtgattgggttgggtacgcctctcgtctcggccgatggcgtcgctgttcggcaacggcggctacatctactcctcggggtcggagggggaggacgaggacgagggcacggaggggtaccggaaaggcgggtaccacgccgctcgccccggggatcgcttcgccggtgggcggttcgtcgcgcagcggaagatcggctggggcaacttctccaccgtctggctagcctacgacaccctccacagcagatttgtcgccctgaagatccagaagagcgcaagggattacgcgcacgcggctctccacgaaatcgagctactgtcggctgtggccaaaggagacccgacgaattcaaagtgcgtgcttcggttgttggaccatttcaagcacgctggccccaacgggcagcacgtttgcctggtcaccgagttcctcggtgatagcctgctccggctgatacggtacaatcggaacaagggcattgggctgagcagagtgaaggaaatctgccgatcagtcatggtcggccttgattacctgcacagcgagctcggcatcatccacacggatttgaaaccagagaacgttcttctggaatcaacaattaacccggccaaggacccagtgcgctctgggttcacaccgatcctcgaccggcctgtggggaaccagtacggtggcacagtgatcagtttcagtgagaagatgctcaagatgagagcaaggcgtgcagtggctaagatttcgcagagacgggtttcccttggtggggttggggcagaactggagaaagagaggtgcctggatgggatcagtttgaagtgtaagattgtcgattttgggaatgcctgctgggccgatcagcagcacgctggtgaaatacagacaaggcagtacagagctcctgaggttatcattggttctgggtactcatattccgctgacatctggtcgtttgcttgcattgcctttgagcttgccaccggtgacttgttgtttgctcccatgaatcgccagggatgcagcgaagatgagacagcacgatatttggtgtattcatccactaaactttcaaacactcccttgcaattattcggacatttaaaaattgcactgacacaaatatatatatcaggaccacttggctttgatgatggaaactcttgggaagatgcctcggaagattgctagctcaggaactcgttccaaggattactttgatcggtatggagatttgaaaagggtcaggagactgaagttctggcccctagaccgtgtgctcgtagaaaggtacagtttcagcgaacccgacgccaaagggttcgctgactttcttcggccaatgttagatttcgctccggaggacaggccatctgccgcgcagtgcttgaaacactcttggcttaattgatccaacgcgacacgaaagtctgaccaatagatgtttacatacatcctacgtgcaaattcgctgccgaagactctttgtgactgtgattgcagatatccactgactttgatttgatgtaaccaaggctgagaatcaggagccactttttaggcgcagcctgatgagaacgggacatgagattcagctcggatgtagcaagcgtttcgctggtgtgtttgggggtgcagactgcagagctaatgtgatgttaacctgcatgtgtgttagtagggccaaaatattgatgtattattattttttggtaatgtgatctggccaacaaccttttcctttagctgagaagatgaactgctacagcactgcagtgtagtggttcagctagttatccaatggattgtgtgctgtaacctgtaacatttgtttgaaattgaccttatggatatcggaaaccaaccacttggtggtgctaaaaaaaaaaaaaaaa

SEQ ID NO: 2871 - DNA, 1164 bp, Zea mays
  Clone ID: ZEAMA-23APR03-CLUSTER6527_2
aatctacagatatgaaccaagttagataaggtactcgtacaccgaacatgttcgatagaatgctctagtgacagcgaaaaaaccaaacaacaaaaaccaacgaaatccctgccatttttataggagacgacggtgcggggaggcaagggaagggggcgacgaagaggaaagcgaagaaagcgtcatggggcttggccttggcgtgcgggcggcgcccttcacgtacgcggcgcacgcgctggccgtcgcggcggcggccatggtgttggtctgggccatctacttccgcggtgggctcgccatcgaggccaccaacaagaacctcatcttcaacgttcaccctgttcttatgcttatcggttatattatcatcggcggcgaagctataatggtatacagggtacttccaacatcgaaccacgggacaaataagctgatccatctagttctccacgggattgcacttgtccttggtgcggttggaatatatttcgccttcaaaaatcataatgagagtgggattgccaatctttacagtctgcactcttggattgggatagggacgattactttgtatggtattcagtggatagttggattcgttacattcttcttccctggtgctgcgccaaacgtgaagaagggtgttcttccttggcacatactctttgggctctttgtctacatcttagcactggctaatgcggaactcggctttcttgagaagctcactttcctcgagagctcgggtctcgacaaatacggcacagaggcattcttggtgaacttcacagcgttggttgtcgtgttgtttggtgcctctgttgtggtggctgctatagctccagttcgccttgaagaaccacagggttatgttccaattccagaaaactagtacaaatgaaatgtacatcatatgcagttgccaggattggctgttaccatatggagctaagctattcatctctctttattaaggagaagaagatgatggagttatcacgataagaagatagtgcatcgtcattgtgtgtgtatatgtatatacattccgtgatacttcaaaatttcagtatatgcgaaattgaatatactgcttcataaatgtgggtatttgctttcatgaaaatcctgcttcataatgggctatctctattctctagt

SEQ ID NO: 2872 - DNA, 1188 bp, Zea mays
  Clone ID: ZEAMA-23APR03-CLUSTER6533_6
aaaaaaacaacttctggcccagctgtgaatagttattttctttgcactcatctttgttggctttcatgaggctctaaaagtgagagttggagaaatacaaatcggtggacacgcatgaccaaacattcatagtcgtggctataattttttcttcagacatggcgcttaataatgtctacgtgtagtctacctatatgtgagcagatttggcctctaggagcgagcacgtgtgtttgcatatggcatgtatcgtgtgggttattagagtgaactcgaaccacgtccatcggagttgcacatccatgtgagttggcagaggtgtttgatgtgatgtgggcatttgtgttttatgtaatagatagcatcatcctcgctcgttgtgccgccttcgtccacacaagcgacggagctaaggttacgagaactagcccggtggcaccatgttggtctaccaggatctgctatctgacgacgacctccagtaggactccctcccctacaggcaactcaggaacggcgtcacagacgtcgaggacaagtgcactatcaaatacgcgatctttgccgagtgcatataatcttgccgagagcaaaataaagcaaaaggctatcggtaaggaggcagtattctgagtgtcgtcctctcggcagagatagacacctggtaaaaatgcttttgctgaccgtgagctaccgtaattttgttgagtgttttatcgtggcactcgtcaaagagatagtttgacgagtgcctttttgacactcgctaagatttttatttttgtcctaaaacgtttatattctggaggtaaccggtggtggcacacggtgtgatcgcgaagggtgcatcaaggcgaagcaactccgtgtgaaggatgtggccgtcggatcgaaaacctaggagttgctccatttcgcccccagtggagtggataggctctatgtaaatagtagtagtttaggaagtgagaataaccctctataaatgtatgggagggctgattagttcagcatatcttggctgccatttatttagagcactcattatagagctcctagttttctctctaggtagacaacagttgagccgagggttccacagcgattttgtacttcgactgtgttcttgattttcaagtttaatcaaaggaagggtcaccggtccagcccacagggctatttggcttc

SEQ ID NO: 2873 - DNA, 1244 bp, Zea mays
  Clone ID: ZEAMA-23APR03-CLUSTER6537_1
gcacgagaccattacctagaacatcctaatcgaaaaactcgtccgatccgatcacacgcatcgccggccatggccatgatgagcggcatggacggcggcagcaacgtcgtgaaggtggccgccgtggtggacgcggagaaccctgccgtggggccgccgccgtgcgcggtggactccgacgacctgtcgcagcgcgccaactggctgcgcgcggcggtgcttggcgccaacgacgggctggtgtcgacggcgtcgctgatgctgggcgtgggcgccgtgaaggcggacgctcgcgccatggtgatctccggcttcgcgggcctcctggcgggcgcgtgcagcatggccatcggcgagttcgtgtccgtgtgctcccagcgcgacgtggagctggcgcggctggaccgcggcggcggcgaccgacgagaaggcggcgctgcccagccccgtgcaggccgccgctgcgtccgcgctggctttctccgtgggcgcgctgctgcccctgctggccgccggtttcatcgccgactacaggctgcggattggagtggtggcggccgtggccaccgccacgctggccgcgttcggctgcgtcggcgccgtgatggggcgcgcacccgtggcgcggtcgtgcgcgcgcgtcgtcggcggaggctgggtcgccatggccgtcaccttcggcctcatgagactcttcaaggccagcggtatatgaaggatgggagaggcgtggcagggcgggcctcacgcttctggtgtgtgtgactgctgctcggtcggtgctgcatgctgctagctctgcttccatgcatgtgcctcctgtgcgtgcacctcctagctaaaccatgcataattaataacatatatatacttattagtatattagtaattaccatgatagatatatatgatgcacgcacacgcgtgtgctagctagctacaagcagctcgatggctcaatccccttgctagttttgcatgcatcgactatgcggtcatgtgctgctgttgttgaacaccgatcgaagcttgttaccatgcatgcagatcagctaggttttgagccaattaacgtaatgcttaccttgtactggtctagctatgctagctactcgatctgatcaagagtgatccatgtgcaagactaaggcttgcatgtgttgtaagcattatactttaaaaaatatatgtacaactaagtctaatatataatttatgagtttatctgaaaaaaaaaaaaaaaa

SEQ ID NO: 2874 - DNA, 1462 bp, Zea mays
  Clone ID: ZEAMA-23APR03-CLUSTER65450_2
aggccccagcccccaggcatccagtccagagccgtggccgcaactaacccctacccacacacgcccaccgcatcggagcagaacccacccaccaaaccctacgtcgccgcggcggtcggagcgggcagggaccctgcctggactggaggatggtggcgatctcgatgtaccgcggaaacctccacattggcggtcccgacagcggcgcctctgccccgcgccgatgggaggcgccccggccgaccctcgacgtgaagcggttccgccgcctcctgcgcaaccgcttccgtgctgtcgcgcgcctcgccgggacgccgctggggcaggcctccccgtcctcctcgggcatggatgtcggccgtggcgccgcggaccccgagcgggaggcaccggacgaggagggaggagcgggcgacgggggagaagaggagcaggggcagttgcagcatgaccaggaccaggaccaggaccaggaccagcaacatcaggaggagcaggggaacgtggaggcggaggcggaggatccggaacagcaggaggaagaagaggagggggcggtggaggacgcggacatggaagatgcgggggaggtagtcgttgatggcgatgcggaagaaggtcagggtgaaagtgaaggtgttgacccaaagccggaggaggaggcgagttatcctgatggaattgatgacaagaacagaaaacttaatgaaaagctggacgccctaaataaaaagaagcatggccttgtgcagatgctgaagcaggtcttaaatgctgaagaagaaatccgaaggcgcaacatgcaggcttcattgcgcgctgcaatgccccagccatcagaaaacgcaacagatggaagttctgtttctaggttggcccctagaatgactgttgatgtcaattttggtgatgttgctggcgattcagatgctggttccaaccagggcactcctggacgccccttgcatcacttccacagtatctctccttcaacagcctcttttgcgaggtcaccgtttggttctctacagggccacactccaaggagtccggcaacattctctacggcaagtccatcacgcttcgccacaaatatacacccaggacaacctcctgctctttattcagcatcgttgccaggaagtaactatgtagccacatcaccttccccggccgcatctggtggttcttcctcggtgttcagggaccctcggccacctaactctacataggttctatgctttgctcggagttctaatcattgataatgttgctaaagtctcttcgggcaacactagtggaaaaacaaattcgtgtctctatgtgtgaactgtaaataacgtgatagcagtgaaattcaaaattagtatattcatttctctgataggtggctagggcgccagatcttctggacaatgtgttaggcaatgactcctaaagcgtctcgtatcctatatttagg

SEQ ID NO: 2875 - DNA, 1085 bp, Zea mays
  Clone ID: ZEAMA-23APR03-CLUSTER6549_1
cgaatttcaacgctgatatatgtggctcgaatattctaaatccactgaatctacagaaaaattttgatgtaacatatttctgatgataacaagaggtgctatgatacaactcagatttaccctgatctcaagaggaaacgggctaactccacaggaaaccaattgagagcataaagcctacttgcctggactcctcaaaaatgagggctctgtccggcaatgcctgagcccgccagagaagatgttagcgaaggcctgcaggttctcgtctgaggggctcgtgcgtatctttcttggtaatggtccgacgcagggcccgcagaacacgaccccgcccatccccctcgcgtcttcctcggcctcgtcgctgccgtcgtccaccatctgctgcttcttgggcgtaagaagcctcggggacggtggaggtgtccggtgcgcgcggttgaggacgcggagcacgcggcttggggtcggcgccacggagggcccgctgagggagacggccggcgagaggcggagggcgtggcaggcggccggggacgggggcaccgcgacgaggctcgcggccacgttgaggaggccgtggaccctgccggaggggcggcgcacgccgacggcgaacatggacggggagccgaccgggcgggacaggaggcggtggtcgccaatcaggaagcgcgccgagccgacgagcgagtccccgccgaagtgcccaggagcccgcggcggcggcggcgtagatctcaacggagacggcggcgggcgagtcgtcggcgagcgaggcctcccgcacgcgaaagaggaggcgcgcgtgccacgccgggtcgaggccgcccgtggcgtcggggagggtctggagcttgtgccccgcgtcgacccaggccaccgcgtacgcctgcagccgccgccgcacgccggacgggggcttgagcccctgcgcggagatgagggccacctccagaagccgctcgccctcagggagccccagcccggcctcctcgtccggcgcctccatcgccggcgagcgacggagctaggatttctcgatcttttcgattaggatgttctaggtaatggtctcgtgc

SEQ ID NO: 2876 - DNA, 1831 bp, Zea mays
  Clone ID: ZEAMA-23APR03-CLUSTER6557_18
aaaccctagcccagagcagccgcatcgaactctacctgcctttctctcgtccctggcggcggcggcaggatggcggcttctactgcgaggacggtgaaggatgtgaacccccacgagtttgtcaaggcctactccgcccatctcaaacgctccggcaaggtaacggtgctcgactcgtcgccttcccatctgattcgacgctacagaatgtgaataagccatttttttcgtggtattgcgaactgtatgatggcatgggatgatcctcagcatatatttgagttctgtgaggcagtggtgcagtaaccgaattcacctttatttcttgtgccttctgggtatctgattggtaggtaggagcgtgatttgctcacatgactaacttcttcgactttgttactttgctaggcttaggcataaacaatgctgttcttctgtcctcttggtcttaggcggtttattttctgctgttacaacagatatgatttaatttattttatttatctagatcatctgtgcagaaaacctgtttgtaaagttgtttttattgttcatacatggggtttaggcaatttttttactgagcgtgctgaaaacgctctgagcacacatctatgcaaggccctatacgaggtgtgattttaatttattttcggttgatatctatcaagagagtttatggttagcccttaggtctggagtacattgggcgtggagtgaaccttgggtccattcagaatggagactgtttcaggatcaaaatccttttgattctggaggttgaacattgataattctatttctctgaagctgaatagtgtgctgcttattacatttgtctcacgtgctgttattatgaagcttttatttttaggctattagttcacaatcgtagtttaaagtttttttgcttcaataaacctatctgtgctgtttacgccatcaattagtctggttttgatggtgggcgaatgttctctttattgtattatttgtcgggtatcgataatcactaattttcagtggttgttccaatgactttcatattcctatatgttgctatgtgtaattccttaagtatcctctgtcttttctgttagatggagcttcctgagtgggttgacattgtgaagactgcgaggttcaaggagctccctccttatgaccctgactggtactacatcagggctgcatctgtagcaaggaagatctacttgagacaaggcattggtgttggtggcttccagaagatttatggtggccgccagcaggaatggctcacgcccacctcacttctgcaagagcagtggtgccatttcacgcaacatcctccagcagctgcaggagatgggcatcattgatgtcgatcccaagggtggacggcgcatcacctcccagggaaggcgtgatctggaccaggtggctggaaggcttgctgttgaagcttgagcaatctcatatttggtttctatgatgtcatgtttgattgttgagatggctacactttatttgcactttggattaggatttttgtgttaagagaactcaaggcattctagctatggttcacactgtattttccctgagtacctatttatcaaaacctattcgtatgtttgggaagtgtctaagctgatattcatgacatgtatttggtataggtctatctatgtgacgtgataatatcattggatagattacgatctaaaaaaaaaaaaaaaaaaaaaaaaaaaaaaaaaaaaaaaaaaaaaaaaaaaaaaaaaaaaaaaaaaaaaaaaaaaaaaaaaaaaaaaaaaaaaaaaaaaaaaaaaaggggggggccggttttaaa

SEQ ID NO: 2877 - DNA, 793 bp, Zea mays
  unsure (1)..(793): unsure at all n locations
  Clone ID: ZEAMA-23APR03-CLUSTER655_2
tatccgcaccaccttttctccttcctctattcctctctttctccatcttgcgattgaacctctggcagcatcggcgccatccggtcggcggctgtgtggatccggggcctccaagtgcggatccggtcctacctttcccggatctggtgtcctctcggccgggtgggcttcgatgctcggcccggctttctggcgtcgtgcactggcaggttacccttatgctcgcgcgagccaccttggctaagcagtgagggtggacggtgttactcgtgagacggcggcagctgtttgttgcgatttctgacttgtagcaaacaatgtgatcattgaggaggtgaacaagggcctgaacccaggaatggtggttctgcttgtggttgcaagcttcctgctgctcttctttgtggggaactatgcgctgtatgtgtatgcgcagaagacgctcccgccaaagaagaagaagccggtgtcgaagaagaagctgaagagggaaaagctgaagcagggggtctctgcgccgggagagtaaacggccatgctgccgatccttcccgtccaagagctcctattcacatgattattagaaaaaaaaaattatatatatataccagatggagccgtagtgttggagtaactttgttctgtagatgctctgtctttaatggtacatctgtattggagactttgagaccttgtttcagcaactgatgaatcttagcctgagccgagctagtatgcttcctgtttaaaaaaaaaaaaaaaaaaaaaaaaaaaaaanaagggggcggccgct

SEQ ID NO: 2878 - DNA, 1224 bp, Zea mays
  Clone ID: ZEAMA-23APR03-CLUSTER6561_2
agttaaacctaactgcctctcctctctcccagtctctcgccgctcgcctctcagccgccgcgtgcctcccagtctcccgccctcgcctctctcttcctctcctctctccctgcgcgccgccgccgtgcctcgccttgcccagagactaaggcgccaggacagtataaatttagttcacgtggttgtggacttctcgctttttggattcaacattttctgcttctctgctctggaatacagaagtgccattgtgggctcaagaggataatgtacgggaggcgtgcatcgcaactgctgaaggagatcgactcctctgaggctggccagctcgtgccattcaacagtgacgtgtttgatcaagtgattagagagtgcaatgagcacaactcacaatttcaatcgttgatcaggaaaatggtggagcaaaacttagatatcgagacaactagaaatgaagatcactatggtgcagctatccaccatctttccctgctccgtaacaaaagatgccttatggcttacatgtacaaccgagcagaagttatccagagttttagatggaaaattggccctgtgctccctcatgacatacaagaaaagctccatttctcagaaaaggagtacttcaagaaccactctgcagccattaaatcatacatatcagagatggatatagatttgacagtggacatggttcctcccaaggatccttacattcaggttcgggtgctggaggacattggtgaagtatcgctcggtgaccattctgtgtcattgaccaagaactcactccatttcctaaggcgcacagacgctgaacagtttatatcacagggtcttatggaagaatttctggagtagggatcacatgtatgaatgtatgatggtacaataggatggtgcactgccctcgttctccccagcgctgctgcctgatgccctatttgcaacaatgaaaaggtacatcagtacatgagacgcgttctgtaccaaggagcttcttaactagtcgctggacgatgatttcgaaagttgtgcaggcagtcctatactagattcattgcctctatttacatgtggatgacttttagttagtgtgccatccaagaaagcagatgttgcaaacattgtaacttgtgtattaacattggttttgctggtagatttcatatttgtgtttccaagattccatgtaatcaagaaaaaaaaattgaaatcttggtc

SEQ ID NO: 2879 - DNA, 1510 bp, Zea mays
  unsure (1)..(1510): unsure at all n locations
  Clone ID: ZEAMA-23APR03-CLUSTER6590_2
ggaccgacatgttactttaccctaaacctttgcagtttgcactgccaccgcgaaggcacacagccgccgtatcttttacttgcgctcggcacgcaggcgacggctgcggcgctcaggttggggttctcatcgacggcgtcagcggcttcccctcccgcctctcgtcagtcgcttcgcgccctcgcctccggtcctccgcacactggccggtgaccctgcatagtattatctgattttcctggaggccacattttaaggactgaggttacaatggcagatgccagccctagaacagaaacatcaacagatgatactgacgacaataacgggcttgaaccaggcagaggtggtcttgttgcttctgactccagtgacagatccaaagacaaacatggagatcaaaagacattgcgtcgccttgctcaaaatcgtgaggctgcaaggaagagccgactaaggaagaaggcatatgttcaacagttggagaatagcaggctaaaacttacccaactagagcaagagctgcaaagagctcgtcagcagggcatttttatatctagttcagttgatcagtcacactccatgagtggaaatggggcattggcctttgatatggagtatgcgaggtggttggaagagcacaatcggcaaattagtgaactaagggctggtgtcagtgctcatgcaagtgatactgatcttcgaagtgttgttgataagatcatgtcacactatgatgagatttttaggctcaaaggcaatgcagccaaggcagatgtttttcacgtcttatctggcatgtggaagacaccggcggagaggtgttttttgtggctaggaggtttccgaccatctgaggttttaaagcttctttcgacacaacttgaacctctcaccgaacagcagctgtcagggataagcaaccttcagcaatcttcacagcaggctgaggatgctctttcacaaggaatggaggcccttcagcaatcattggccgaaaccttggctgggtctctttcgtcttctggatcaacaggaaatgtggcaaactacatgggtcaaatggccatggctatgggaaaacttggaacgcttgagaatttccttcgtcagactctacaacagatgcaaaggatcctgaccactagacagtcagctcgggcgctacttgtgataagtgattactcttcacgtctccgtgccctaagctctctctggcttgctcggcccaaggaatagcaagaacatgctatttgactgcaatacttttcacaatttggttttcaatggtcaggagatttgacaaggctgcgacagacttgattcggacatatctgcacatactatgacccaaatggaaggggatgttcatgtagcttaggctgcttagctttgtagttaagtgttgttgatgtattattaccaactgctgtaaaattctcactctgtatgcccctgatttgcagcgaaccattagaatgcacatttatgntcacctgacgattttttg

SEQ ID NO: 2880 - DNA, 907 bp, Zea mays
  Clone ID: ZEAMA-23APR03-CLUSTER6595_3
aacggaaaaggttgaaaggattcgtcgtccatttaagtgccgtggcccagaaccgtcttggacgccaaggaaacagtcacgtctcccagatctaactgccccccgactcacgaatcccaaagcctccatggcgacgcaccgccactgcctcccactcctcctcctcgtggccgccgccctcgccgccgtccctgctcgcagcggcgctgggcggcgggcgcggcccgctgctgggcgggtggaacccgatccctgacgtgagcgactcgcacatccaggagctaggcgggtgggcgctggggcaggcgaagcaccagaagctggccgccgacgggctgcggttccgccgcgtggtgcgcggcgagcagcaggtcgtgtccgggatgaactaccgcctctacgtcgacgccgccgaccccgccggccgcaccgtgccctacgtcgccgtcgtgtacgagcaggtctggacccgcacccgccagctcgcctccttcaacccggtgccccgcgccccctgaaaccatacggacacgggtgggccgaagcgaccacgacgatgttctccgtcaattacgtgtcgagctaatcttattattgtttctattattataataatgcttctccctgttcctatggacctatagtagtatactagtatgttgcgagggagcgagtagaccgtgtgtttcgctatcgtgggactagaataagccatgccaatgaacatgagccgaatagaggctacgtactgttattgtatcagtactagtaccctatatatatgggcgcactacagttctgtgatgtaatggattctgctagtatttgactctaaaaaaaaaaaaaaaaaaaaaaaaaaaaaaaaaaaaaaaaaaaaaaaaaaaaaaaaaaaaaaaagcggccccta

SEQ ID NO: 2881 - DNA, 1544 bp, Zea mays
  Clone ID: ZEAMA-23APR03-CLUSTER6596_1
ctcgtcaacgcaactaccccaagtcgccgctgagccactcgctcagtccgcgaatccgtaaatggaaggggacgaaatgctcagggtgaagctcggcaggcagggccttgaggtgtccaagcttggcttcgggtgcatgggcctcactggagtgtacaacgccccagttcctgaccaagctgggatcgacataatcaagcacgcgtttgaggccggcatcaccaggaaatgactcgtcaacgcaactaccccaagtcgccgctgagccactctctccgtccgcgaatccgtaaatggaaggggacgaaatgctcagggtgaagctcggcaggcagggccttgaggtgtccaagcttggcttcgggtgcatgggcctcactggagtgtacaacgcccctgttcctgaccaagctgggatcgacataatcaagcacgcgtttgaggccggcatcaccttcttcgacaccgctgatgcctatgggccacacaccaacgaggtcctgctcggaaaggcattgaaacattttcctcgtgagaaggtgcaaattgccaccaaatgtggcattgcaggatttgatgcaagtggcatgcgtgtgaagggcactccagattatgttcgagcttgttgtgaagcaagccttcagcgccttgctactgactacattgatatatactaccaacatcgcattgatcagtcagtgcctatagaggaaactatgggagagctcaagaagttggttgaagaagggaaagtgaggtatgttggcttatcagaggctagtgccgataccattcgacgggcacatgctgtccatccaattactgcggtgcagttggagtggtcactatggaccagagatatagaggaagatataattccagtctgcagggagcttggtattggaatagttccatatagcccacttggccgtggcttctttgctggcagggcagctgtagaacgtgttccatcagaaagtctattgtctaaacatccaagatattctggggaaaacttggagaagaataaagttctgtatacacgacttgaaatgttgtccaagaagtatgggtgcacacctgctcaactcgctctctcctgggttcttcatcaaggagaagatgtggtccccatccctggaacaacaaaagccaagaaccttgacgaaaatatcggtgctgtaaaggtaaggctgagcaaggaagacctcgaagaaatctcaggcgcattccctgctggtgaggtggctgggtctagactccttggagtcttggagcctttttcctggaggctcgcaaataccccgcctccaaaatagcgagttcagatgcaaattcttggccatcctaccatttaggtcatgttatgttagatcatatctacatgatgcaaatgattgttcctgtgctcgcgcgtgaaaatgcatgtacctgaaacaaagagatgtaacagttggttctctgtgtggaacgtgctgattgctatagttgatcaaagaaatacgttggaattaagctaaatgtccttcatggtgcactttgat

SEQ ID NO: 2882 - DNA, 718 bp, Zea mays
  Clone ID: ZEAMA-23APR03-CLUSTER6596_2
cgcgaatccgtaaatggaaggggacgaaatgctcagggtgaagctcggcaggcagggccttgaggtgtccaagcttggcttcgggtgcatgggcctcactggagtgtacaacgccccagttcctgaccaagctgggatcgacataatcaagcacgcgtttgaggccggcatcaccttcttcgacaccgctgatgcctatgggccacacaccaacgaggtcctgctcggaaaggtaaccttcagagcaacatattggtgccgcttctggtctcagcttcagcctagaagggaggaccaagagttaataaagtcttcatgtcgtaatgtggagagggtgctactacagttctttagcaattttggatgggggtctgtgttgcgtttaaatatgtagtagctgtggttcggtagctgaagttctttaatttggctagttggggttctctgaagtggtcataggaggagctttggcaatatgcctccgttccttgtaataaatggccgtaacctcatttgaggccaaggtcggatgatttttccattatctaaaaaaaacaaccccttgaactcaaggtggatcaatcacactgagtttagggagatggaatccagcacagcgccgatcgagggcacgcttctgctaaggctatctcgcaccgttcctcctcccaaatctctccattcttactttctattcatatttaaatatcttttattt

SEQ ID NO: 2883 - DNA, 2099 bp, Zea mays
  Clone ID: ZEAMA-23APR03-CLUSTER6601_2
aatcttccttcaggcttcagctgtccgcccgcggcccacccctccgccgtctccaccattccgccgttcccaccacgccactcgccagttcggcactccctcctgtctcccccccttgccgagacggcgcggacgccccgtcgcccaccccgatggctgccactctcctccacgccgccaccgcctcgctccagagctcctcccagcccgcacgcgcgggcgccgccaccgcctttcaccccctcgcgtccaccccatccatacgcctcgcgcgctcctcgttctcgtccaatcgccgcctcgaggtttcactccgggcggtttcggccggtcactgtttcgcggggaggggagcaccccggggccgccgcgtcgtcgccgccctagcaggggagcaaactgagggttcagaggtgggcgatgacaaggataacagcaacgaggagataaagcccgaggaggctcaggaagcttggaaggtaatgctggagcagttcaaggctgaggccctgcggatgcaggccctgtcaatgcaggcatatgatgtctactccaagagggcgagggaggtcttgctggaagcctctgagaagctgaagatacaggcagacaaagcacaaaaggacctcagcgtgatcgctaccgaggttagtcaggagggacaggaatatctggtgatggcagctcggaactccccagactcgatcaaggatattacaacaacgttcagggctcttgggagattgaattggccatcagagtatgaggattatcatgtgggcattccgtttggtacctttcttacagtagggggtttcctcaacttcatgttgactggaagtacctctgctcttcgttttggtattgttcttggccttgcactgttgactctaggtatctcaagtttgagatcacatagagaaggcgaccgtcggcctcgtcttttggtgaaagggcaagctgcaatagctcttgtcatcttcttcagggagttttcagttctactccagaatggttggttcccaaaaatcttcattgttcttctcagtggagtggtggcagcattttacttctatcgcattgcaactggtaaccccaaagatctgagcagcaagaatgattcagcgaattaatgcactgggacgagtcagatggtcagtgggacgtagacccagaagattatggtctcttcctttccattttcttcatcggccttcaattgaggcaaagctcggtcctagcgtctaagatgtctgcgtgatgatacatggattcaaaagaattgtttgcttatctggcccacttcccgcactcctttgttcctttactcgtgtaatatactccgatgtcaggcccgcttaaacaacagtaataaacgaccttcgaaggtcatgtagttatcagttcagtttgtctggtgtttattgcatggggatagaagtgattaagtgaagcgttcaatgtttagtgaaatggctgaaaacaatcagggttagtattatgtaccttctcgcttgctcgtaaacaaacagatgataagttgtaaagggtacctgcagtggtacgatctagttgtttgctctaactctaagttaaccccttcgattgagaaaaaaaaaaaagggagatggtcagtgggacgtagacccagaagattatggtctgttcctttccattttcttcatcggccttcaattgaggcaaagctcggtcctagcgtctaagatgtctgcgtgatgatacatggattcaaaagaattgtttgcttatctggcccacttcccgcactcctttgttcctttactcgtgtaatatactaagatgtcaggcccgcttaaacaacagtaataaacgaccttcgaaggtcatgtagttatcagttcagtttgtctggtgtttattgcatggggatagaagtgattaagtgaagcgttcaatgttcagtgaagtggctgaaaacaatcagggttagtattatgtaccttctcgcttgctcgtaaacaaacagatgataagttgtaaagggtacctgcagtggtacgatctagttgtttgctctaactctaagttaacctcttggatggcacaaacttttagca

SEQ ID NO: 2884 - DNA, 1321 bp, Zea mays
  Clone ID: ZEAMA-23APR03-CLUSTER6602_4
gcacgagaccattacctagaacatcctaacaaaatcttttttttttgttcctgtgatgaactgagagagttggtttttgagttctgcaggctattgaagtttcgaagcgccaaatgaaactaagagaggcgtctggaaatagtgatatggtttcaaggctagaagcagctgagtcaaagctgcaagagttgaaatcgaatatgggggtattgggcaaagaagctgttgcagcaatgactgccgttgaggcccaacagcaaagattgaccttgcagcgtcttattgcattggtacattatttgtctagttgggtgatttgggccacttgactttttgtttgtttgtcttgaagttgtctattgtgtctcataacatttgtggacttaattgaaggttgaatcagagagaaactaccaccaaaaggtcctacaaattcttgatcaacttgagagagaggtctgatggtttcacatccacatcctttccatccttgcccattgtgctaaagaaagtttacaacttcaagaaaaatctggtcggttatgttatcttgattgagctttcttattttttttctagatggtatctgagcgccaaagaatcgaaggagcacctccggtggttgagagttccatgcctccaccgcctgcatatgaagaagtcaatggtatattcatgagaaatacagttgcagaattggtcgagactgtggagtatttcttggctgaggcaatccagtcataccaagccgaaagcgataccgagctcaacctttcaactggtgactacatagtggtccgaaaggtagtgctttcagatttctcttacacgtcatttacgaattgctcatgtagtcatgttatgctgcggccagcttcacacatattggttgcccatttcatgagtatctcaatcacatttcacattgtacccgaacttgattaccgaatttacataaaaaaccctttcctaatcaggtgtcgaacaatggatgggccgaaggtgaatgcagggggaaagctggttggttcccctacgactacatcgagaaacgggagcgtgtgcttgcaagtaaagtcggccaagttttctaagtcttccgctgagccatgtagtatatccccggggttgtacactgtgtgttgtttatgcttgtcatcttcagagaatcagaggagatctgtaattttgctgaaagctgcctgttgggtggtttgtttctgcctggccgccttaattgttcaaattcatgtggcaggaactgaatatattcattcttcagttatcctgtcaatatatataatttttttgtttgaagcac

SEQ ID NO: 2885 - DNA, 530 bp, Zea mays
  Clone ID: ZEAMA-23APR03-CLUSTER6643_23
aaaaaacgcccattccccttcgccctcttcgaccctagcaagaagacggcggcggagatggtgtactacgcgcttttggtgggcgcagagctggacggcctcaccaacctgcagcccagcgycggctgcgacgaccccagcttcccctactacctcaagtgcaagctttgcgggagagatggaacaattgtgatgattcctggtcaggggacgccacttactattgagcagagccagaaagaagagaagacttgtttgatggtgtttgactgcagaggctatgaacctgttgagttttcttttggagctggctggaaggctgaatctgtgcatgggactccttttgaaattgactgccctgaagatgaattttctgagtatgatgagaagggagaatgcccggttgagctaagcaagctgcagtcaacattcaaagtggtgaagaagcatgagaagggtggtaagacaagatttgtccagatccagtggcttggagtctgtcgggtattggaatcgaaggtgtataaatg

SEQ ID NO: 2886 - DNA, 1043 bp, Zea mays
  Clone ID: ZEAMA-23APR03-CLUSTER6679_4
cacgagaccattacctaaaacatcctaatcgaaaaatccccatccgccgccgctgccatggccgacgagattgacacgaggccggcctccgcgggctcccgggccgtcctagcgcacgctaccgaggacgacgacagagaggagggcgagatcgccgccgacgccccctcgcctgccctccccgccgcgcacccgctcgagcactcgtggaccttctggttcgacaacccgcacggcaaaaacaagatggccgcctgggggagctccatccgacccatccacaccttttccaccgcagaagacttctggggcctctacaataatatccatcaccctagcaagttgattggcggagctgacttccattgcttcaagaacaagattgagccaaaatgggaagaccctatttgtgctaatggcggtaaatggaccatcagctgtggaagaggaaaatctgacacgctgtggctgcacaccctgttggctatgatcggcgaacaattcgactatggtgatgaaatttgtggagcagtcgtcagcgtgcgtagcaagcaggaaagaatagctatctggacaaaaaatgctggtaatgaagctgctcagataagcatcgggaagcagtggaaagaatttctggattacaaggactccattggattcattgttcatgggtacagtgcttattgcttaagcccacccctcctctcataagtactctcacttccctctttggctgcaggacgatgcaaagaagatggacaagggactgaagaaccgttacacggtttgatcccaaagagtagtagcatgtagggtggttctatccgattccgtagccccttgcagagtgtgttgaaggttctctatttgctgaggagttgcttaagcataatctaacatgatgtcgaatgtattcctgtatgttccataggtcagtcacctaggtgttgtttttgtctcagctttgtgtgctatatatatatatatatatatatatatatatatatatatatatatatatatatatatatatatatatatat

SEQ ID NO: 2887 - DNA, 1634 bp, Zea mays
  Clone ID: ZEAMA-23APR03-CLUSTER6688_2
cctccctctctcgctcgtggccacgactgggcgactgcctccgccgcatttcgctaggcgccacacggcccttggccggcgacgagcacccacagaaaaagtgttgctcctacgactagttctttttatgtgtaaccttcaatgaaggattctcaggatattcagagcacgacagagttgcagtcaccagtgcaaggtactaatgaagtgcaaagtcagcaaccaaactcaatggccgctgatgctcctgctggaaattcgggttccttgtctgtagctagtaatgacaataagaaggtgtctcgcgaagatattgaacttgttcaaatttgatagagcgttgtctacagctctacatgaacaaaggagaagttgttagaactctttctactcgtgctagaatagaacctggcttcactactttagtatggcagaaacttgaagaagaaaactctgagttctttagggcttactatatacggttgaagttgaaaaggcagatcatcttgttcaatcatttattgcaacaccagtacaatttgatgaaatatccagcacctccgaatattccattggctccaatacaaaatggaattcatcatatgccagttagcaatttaccaatggggtatccagtgcttcagcagcctatcatgcctgctcccggccagcctcacatggatccaatggcctgcggtctgtccagtggtcatgtggttaatggaatacctgcaccaggtggttatcatcccatgcgcatgaactccggaaatgacatggttttggacaatggagtgcctgaagcaccacatgctggtgctaccggtagtgctatgtcatctgagatggctgtgagtccctcgtcggcggcttcaagcaaccatgctccttttacgccgtcagatataccaggcatgaccatggatgtatcggccctagactcggcatttgggtgtgatgtggggaatcctgaatctctgcaattgggaccagatgggtcaagagactctattagatccttagggcagctctggaatttcagcctctctgatctaacagcggatttgacgagtttgggagcagatctggacgtgctggagaactacactggcacccctttcctgccatcggattcggacattttgctggattccccagaccaagatgatatagtcgagtattttgctgacgccatcaacgggtctccgtcagacgaagagaaaccgtagtttttccggggtggcatggcaatggcatgcattcaggttcatcatcaggcagggctgccatctcatctcatgtagtgtaaagcagccaatctaactgtgtattcggctcgcgcgcggtgatccggtaatcgggcctctgccactaaaagaattttgtagcggttaattgaaatcctaattctttggaataagtagctgggactggaatgtccagagagtagcggtcgttgttggcttagggattgctgctggtggatgcaaacctcacagctagctggtgactctgaaaccacaggaactccttttcttttctttttctttttacttgtatttgtatttgctgctacataagtaaacagaagtggggtgtacctagttttctggtttttagtgtcttgaaagatc

SEQ ID NO: 2888 - DNA, 1859 bp, Zea mays
  Clone ID: ZEAMA-23APR03-CLUSTER66903_1
gcacgagaccattacctagaacatcctaatcgaaaaaaaaataaagccgaggcagagcatcgaccgttgcacgcagccctaccccaaccacagagagaatcggaaaagcagggatcgcagccggaaagcgaaaagcttaaaagaggcggcgcatcacgttgggcgcctctctttgctcccccatttttttccccttcttggcttgatcgatggcagcgcagcagcaggtcgcctccgtgctgcagagcttcccgttcagggcggccgtgctcacgctctgcgtcgcgctgctgccgctcctccccacgcaggcgccggacgtcggggccgggggacccggccaggagttcctcgccaaagtgtgggagctgctgcacctgctgttcgtcggcatcgccgtctcgtacggcctcttcagccgcaggaacagcgccgacgatggacgcgccggggccgtcgcagtcgcagctgaaacagagaagcacgctgccgcggggccggaacctgccaaggccgacgcgaggtacgcgtggcggatgttcagggactcgatcccgccgttcgatgacgatgacgaagacgacgtgctggtgccggacagccctcccggcggcggcgggggtggtagggcgcgctcgtggagagcgccgcaccggcccgttgagcccgttgtcgtcgtgtccaccggtggcggcggggatcggatcgggcaggccgcggacgcgcaggcgccgctgtctctgcccgtccggacgctgaaagcgcagcaggaacaggacgccagcgcgggggctgtcgagacgccgcgtgcgcggcggcgtcggagctctcaggacttggcggccggctgcgcccgcgacgagaccgtgctcgcttcgccgatcccgtggcggtcgcggtccgggaagctcgacgcgcgccgacccgcgtcgccgagctccacggcgtcacccaggaggctgtccccggcgtcgtccttgtccggggagacgctggccaaggccagcgaggaggagtactacgccaaggccaagcggagcagcccgtacaggtcatcttccatctcctcaccgccgcctccgcctccacctccgcctccgttccttgtccacggttaccacccggcgaccgagcgccgtgcggcggcagcgaaaagctttaaggaggagctgcagcaccacagcatgagaggccaaggagaagatcactactcgccgaagacgagcagcatcagcatctccgcttacaacagcagcaactcctccccagcgaagccaagaagctcttttgacggcggcttctcctcgtcggtttcggttggcaagtcagtgagaacgttcagggcaagggaggcagcagtttttcaagaccaaaaccaagaactccccgacggcgccggtgatgatcgtgacgtgctggatgtgcacgggtcagaggagccgtacggctacagagcttatcagtccattcacaggttccagtacgagagatcagggagcgaccctatcctaggcggtgtggtagtctcctcggatgagaccgagagcagtgacgacgacgacgatagcggcggcggcgggtattcgacgagggagtcgacgccggaggtggacgaaaacgaggtggacaagaaggcggaggagttcatcgccaggttcagggagcagatcaggcggcagagaatcgagtccattaagaagtccgcggggtcgcgcggcgtcaagcaccacggcaagtagatcgccggccggctggtatgttttgggtcgtttggttcacataacgggctaaatcatgtgtttttaagttcaacactacaaatggatattggtctattcaaaaaaaaaaaaaaaaggggg

SEQ ID NO: 2889 - DNA, 2026 bp, Zea mays
  Clone ID: ZEAMA-23APR03-CLUSTER6703_1
gtaagaatccatcacttggaccatgaccaaaccacagagctctattcgctacgtgcccgacgagagcgtcggcgccgccagggcccctgctgaccgacgcagccagcgtcgccaccgctgtcccacttctcgccgattgtccctgcctccagtaatggttggcgagggttaccatcccccctcttagttgtccgtgtctgtacctttttctcgggttttgctgcggatgcgcgcagtggcggtcgccgcaggagcgcggcgggggatgccggggcccgcagccgcttcatcctcccttcccgacctcgcctgggcaatcccgggcaagctcctgcgtaatcgaggatctcatcagcggtgtctggggcgggatgagttcgggagctactgctagaccttccacagaactgtggggtagggttgagagtggaagcttaccctgtcaaatccttaggcaacattcttggggttgatcgatagcgttcaaaattcaacattggaaattcaaggatgattgtagggaaatttgtacaccagtggtacaaattcctaagattaggtgttaaaaaaaatactcattgatattatcttttgatgttgcgcagatttagaaaagagctctgtcacttgcagatagatttgaaaggtgctccgacaatttccaccttgcaaatagttccctatttaaaccgaccatgactcatgagttcctttctatttcatcatttacttaggccttaaaaatggaacccagcttcacatgttaacaaccaactataaagcaaaatgaaacaggaataaggtggaggttgaacaacaagattagaggtataggatttcaagttttgttctagatgaagtatatttatattgggagactagtgaaaagaatattgatacttgaggaacaactccacttactatggatcagaataaagaagcagagaggaaggagaaggctgagattagaatggcatgattggatttatctgactttatgtcccaaataaggagactgttgcggtcacacaaatggggaaaggaaaaaaatcccgcgtaaaggcaaagacttctccatcaacagttgcatttctatttgatttttatctgaaacagatcgcataatttaatataagattggctgagctcttgtaagtatcaaacaacagagacacacctatcatgggttagggttgatgaaccagaaactgaaggcacaaggctaaacctgaagaaatttaattgtttgaactacataaatagtgttagtatttaattttctttgtgcatcttgtctaaactccagtatggctatgaatattagcacttgactccatgtttggactcaggaggaagttgatgatgacgtattccttttgattcttcctttcccacatttaaagtgctgtattaaacgtagcataaactaaattgagtcatacatcagcgcttaccggagagaaaaaggttcgagagctacttgaaggtcatatcaagaactgcagggtatcatttagaatggaaccttacattttcaaatccttggcgaactatcttagaatggaaggattggttaaagatacaagaatcaaagttgaggaaaaacttggcttcttcctatacatgattagccacaatgcgacatttgaagatctccaagtcttttttggtcatagcaatgatacatttcaccgtgtcatcaaacatttcttcgacattgttatccctggtcttagcatgcggttcctaaagcctcctttcaatcaagttcatcctaaaattcatggagacaaccgattttatccatacttcaagaattgcataggttcaatagatggaacccatgttccagtatcaatgtcacctgatcaagccgcaccattcaggaatagaaaagggacccttagccaaaacgtgatggttgtgtgtgattttaaccttaacataacttatgtgtcagccggatgggaaggatcagcaacagattcaatggttcttagatctccaaaaaaaaaaaaaaaaggaa

SEQ ID NO: 2890 - DNA, 1547 bp, Zea mays
  Clone ID: ZEAMA-23APR03-CLUSTER6703_5
ggtgaccgctccgtgtccgaggagagcggcggcggcgcaaggagtcttcctctccgacgccagcaacgtcgacaccgctggcaagcttctctccgagtagatctatggtgctgaaacatccgagaacacacagctcatacttgcagtacagtgactaaattgtccctgctccagtaagagtaggcgagacgagcctcccccatcttgggtgttggtgcctgacccattttctcaagatatgatgttcacaagaggttctcccaaaattttgatgttatctaaagctgctcaaaagaaggtttctcctaaagcttctacatcaaagaagtgtggaggtggtgttcagagagcagcatggaattctgaattggagaagagcctcgttgatttgttgtttgagcacaatgtacctccatatagggctcaaaatggctggagtccagatgcttggaacaaaattgttactgaattcaacaagaagcatgagtatgtcacattcaacaagattcaaattcaggagaaggagagggaattgaaaagggattacaagatgttgaaagaggctagaaagcaaagtggcgtttcctggaatgagaaacgatgcatgattgttgctgatccaccaatatgggaaaacatcataaaatcatttcctagggccaagaaatttcaaaagaagtctttccctctctttgatgctcttggggaactatatgatgggcacattgctcaagggacctagaacataacatctacacaactaccacaagaatggaacacaatttcaaatgaagaagaacaagtgaacaccacaagaatggatgaggaaggcattattcaacaacaaccacaagaagaggattcaagattggaacaagatgaagatcctatgattgaaaggactgaacagaggtctactgcaacgagaaggtctactgcatcaacaatcaatcaagataaggaagcaaagaggatgaagaaggattctttggaaggacttgttgggagatatctagatctgaaatcaaaacaagttgaggatgagattacacaaatggcgaaaggaaaagaatctgctcaaggtaatgacttctccatcatgagatgcatttctgttcttagatccatgaatgtgacagcagatgagaagataaaagcagctgaggtgttcgacataccaaacaacagagagacatttatcagttttagtgttgatgaaccagaaactgccctcctatggttaagacggaagattgataagctctaagacaggaaatattggtcatatggagacagttctgcacattgttttgagtgctagtatgagctatatatatgttgcatttctccatgtttgggctcagcatgtaatagaactgaaggaaggttgttgcgagacttgtatggcatgtttaaatttctggataaaatctagcatatactaagtctattacatgcttaaatttttgaaaaaatatgtatcgagaattggatggaatgcttaaatttctagagaaatgacatgttctatgtttaaatttctggag

SEQ ID NO: 2891 - DNA, 1493 bp, Zea mays
  Clone ID: ZEAMA-23APR03-CLUSTER6744_1
agagagagagagagagagggaggtgcagagagaggcgcgtgggctgtgggcacacacatggcgagtgaggaggtcgccacagtgtgtgccgacgccgaccaagaagcagcggcggcggcggcggcggcggcggccatgaaggaggaaggaggaaggggcaagatggcggaggaggaggcagccgaggaagggagaggaggaaggcgggaggaagaagtacgcgctggtgagctaccacgagctgcccgagtacatgaaggagaacgagttcatcctcaactactaccgctccgagtggcccgtcctcaacgccgtgctcagcctcttctcctggcacaacgagaccatcaacgtctggacgcacctgctcgggttcatgctcttcttcggcctcaccctggtgcacctcggccagtacttcccccaggtggctgatctgattgggcatctctcctggccaatctcgaaggtcgctgaaaatgtctccagcaatattggagatgtcctatcaggcgcggccatgttcatccagacgaacccgagcctggcctcgcatggcacggcggtggcgtcgcagacgacgcggtggcccttcttcgtgttcctggcgggggccatgttctgcctgctgagcagcagcgcgtgccacctgctgtcgtgccactcgcaccggctgaacctgctgctgatccgcctcgactacacgggcatcgcggtcatgatcgtggtctccttcttcccgcccatctactacatcttccagtgcgagccgcgctggcgggcggcgtacctgtcggcgatcacggcggccggggcgggcacggtgtacgcgctcatgtcgccccgcctgagcgcgccgcgctaccgcgcccgccgcgcgctgctgttcgtcggcatgggcctgtccggggtggtccccgcggcgcacgcggccgccgccaactggcacgagccgcgccgcaacgtcacgctggcgtacgagggcgccatggccgcgtcctacctggtcggcaccgcgttctacctcgcccgggtgcccgagcgctggcgccccggcgccttcgacctcgccggccacagccaccagatcttccacgcgctcgtcatcgccggcgcgctcgcgcactacggcgccgccatcgtgttcctcagggctcgcgacgagatggggtgcccggccagttaggtgctcagacagtacgggcgcgccggccggatgcttgcccgcgacgacattatatttgcgggcggtgtccgtccagtgatcgatacgatatgatgattgggaaagaagaaactaaaccatatttttttttgtttacaccttttccttacagcagcagcagcaagtgtgcgagattcatcgttaatgacagagagttgattggcgtcagtcacagattccttgtcaatttgtacatagacgaagctcatcgagtaatgattgattaatacattctttcgatcggtttaaaatgcaaaaaaaaaaaaaa

SEQ ID NO: 2892 - DNA, 3053 bp, Zea mays
  Clone ID: ZEAMA-23APR03-CLUSTER6746_1
agacgttacaaagctactgttggctaacttggggctgatggtcttgtctctttggacaggaacttacatctacttgcgtcatctgtatcatctagttcgggggcgagtaattatattccagtgcgcagtgagtttctttcctgttgtttaaaactatattatcctgttgaaacacaattatcgcttggagttgattctcgcgcccaccccccgtcaaatagtggttccggtcttaatttctcttctataatttttcgtcagttggaataagagtgggcactacaacttgaaacgcgtcttgaacccattgtttcccggatttaatgccacgttagatgccagcaacccctctcttattgaaactacaatcatggataatgtccatgcgagtgggaggtgacctacttggatttcggtttactccctgctctccagggtaacaatggttgagttccttcaaatcattccccgacttattcgtccgctgtttcggacccgctctcccactcgtaggtgttctccccgtctccgcccgcactcgctcgtccgcgcgcaggaaggttgacctgtcgagggccggcgaacccggtaagtaagagtgaaaatggatggaagtagtaaagggagtgggcattctgaagcattaaggaactacaacctgggaagaactttaggtatcggtacatttggaagtgaagattgcagagcataagcttactggacatagggttgctataaagatcatcaactgccgccaaatgagaaatatggaaatggaagagaaagcaaagagagaattcaagatattgaagttgttcattcacccccatatcattcggctttatgaggtcatatacacacctacagatatatatgttgtgatggaatattgtaagtatggcgagttatttgattacattgttgagaaaggcagattacaggaagatgaagctcgtcgaatcttccagcaggtatttatcacttttcttggctggttacttctagtaacatgctttttttgagtcacaataggtagttatcaaagaacggttttatcttgttgctttgaattttgatatttatggatagtgcattcatattcttcatttgtttctgttgtgtttaatgtgctctcattaagtatctggattagttttgccttgccttatttttatcttctgatctgccaccattttgacttgcaagcatgatgtggtaattgctttgtcttagggtatcactattgcatgtagttcagaatttcaaatcatgatttaaacattacatctttccatggaggatacgacaattaaaatattcctttttcttttatatctaaattccaggtttgttttattagttgttttttcacattggaaaaattcatgaacagatcatatctggcgtcgaatactgccatagaaacatggttgtccaccgtgacctaaagccggaaaacttgttacttgattcaaagtataatgtaaaacttgcggattttggtctgagcaatgtcatgcatgatggccattttctgaagactagctgtgggagtccgaactatgctgctccagaggtaatatctggtaaactatatgctggacctgaggtcgatgtatggagttgtggggtgattctttatgctcttctttgtggaactcttccatttgatgatgagaatattcccaatctgttcaaaaaaaattaagggaggtatctacacagttccaagtcatttgtctgctttggccagggatttgatcccacgaatgcttgttgttgagcctatgaagagaatcacaattagggaaattcgggagcatcaatggttccagattcgccttccacgttacttggcagtgcctccaccagatacgacacaacaagccaaaatgattgatgaagatacacttcgagatgttgttaatatgggatttaacaagaaccatgtgtgtgaatcactgtgcagcagacttcaaaatgaggcaactgttgcatattatttactattggacaatcggtttagagcaactagtggctatcttggggcagattatcaagaatcaatggacaggaatttaaatcagctggcgtcatctgaatcatctagttctggtacgaggaattatgttccaggaagcagtgatcctcatagcagtggtttgcggccatattatcctgttgaaagaaaatgggcgcttggacttcagtctcgggcccaccctcgtgaaataatggttgaggtcttaaaagcacttcaagaattaaacgtcagatggaagaagaatgggcactacaacgtgaaatgcagatggtgcccagggtttcctgaagttaatgacacgttagatgccagcaacagctttcttggtgactctaccatcatggataatgatgatgctaatgggaggctacctactgtgatcaagtttgaattccagctttacaagacgaaggacgacaagtacctcttagatatgcagagagttactggacctcagctgctcttccttgacttctgtgcggccttccttaccaagcttagggttctatagtggtctaccatgtgcaaattttcactgtggtgatgaataaccgaaagcatgtaaataggaaccttgttctcgtcttttggacaacgaaaaaaaaaaaaaaaaaaaaactcgagggggggcccggtacccaatcgccctatagggaggctgtattaaaattccccggccggcgcgtttaaaacgccggggacggggaaaaccctggcggtgcccaacttaatcgcctctcccgatcccacccccgtcgcagctaccccatgtttgagtgcctggtcttgtgttgagcgcgcaaagatcatgaaaaataaggaaaaaaatatttccgtacttaaaaatttgtagtctgctagtgacagttcatttttggactaaaccgttacgaataaaagaagggtagataactgtctgcatacaaaagtgtttcatgaaaattaaaaaaagctattgaaacaaaaaaaaaaaaaaaaaaaaggagggcggccgccgactagtaagctc

SEQ ID NO: 2893 - DNA, 813 bp, Zea mays
  Clone ID: ZEAMA-23APR03-CLUSTER681_2
tcactgcctctccctccctcactcagccaaacctgacatcagcctattacaagcgtcagtagagatcttccagatggccatggccaagcccccacttcagacggccgcgatcatccttttcgtgctcctcgcgaccgcgtcgtgcctccacaccgtcgacaccgccgctttagggttttgctggggcaagtgcagcgctcggtgcgcgcgggcaagcgcgcggcgggcgtgggccgcgtgcatgagctcatgcggcctctgctgcgaggagtgcaactgcgtgccgcgcgacatccatgactgcccctgctacagcaacatgttcaccaccggccccaagaagatgcccaagtgcccctgagactgagactgtgaggccggctcacactgcgacatccatgggactgcgactgctgcctacaactacgatgtgatccatgctggaccagacaaccagttatgcatgttatggatccggatacttatttggttttgttagattttttgttttctttgttcgcttgtgaataagtagaatgctgaatctactatgaatatttgtattttgtttttagcattaagctagttaagattaataaaaattaaatatcaaatttgttctaaaaaaaaaaaaaaaaaaaaaagggcggacgatttaaaaggacacaaattttcattcgcgggcatgcaacggatatacatttttattagggacaccataaattcaattaaggggccgctctttttaaaacttaataaatggaaaaacccgggagttaccaaacttatttttttgggagcacttcccctttt

SEQ ID NO: 2894 - DNA, 2574 bp, Zea mays
  Clone ID: ZEAMA-23APR03-CLUSTER6830_2
gcacgagaccattacctagaacatcctaatcgaaaaagtcgctactagctagatagccatatcaccagcatgtggaggctgacggtggccgagggcggcggcccgtggctgcgctcgacgaacggcttcgtggggcgggcggtgtgggagttcgaccctgacctcggtacgccggaggagcgcgacgaggtagagagggtacgccaggagttctccgaccaccgcttccagaggagagagtcggccgacctcctcatgcgcatgcagtgcgcaaagcagaacagatctcaacgtcgtgatctgccacgcatcaagcttggggaggatgagcacgtcactgaagaaattgtactgagctccttgaggtcggctctggaccagttctcttcactgcaagccagcgatgggcactggcctggtgatttcagcgggattatgttcatcatgcctggtttgatatttgccttgtatgtcactggatcactgaatgttgtcatatcaccagaacatcggcatgagatttgccgctacatctacaaccaccagaacgaagatggtggatgtggcacacttatcttgggttcgagcaccatgtttggcacatgctcaaactacatcaccttgaggcttctcggtgaggagccatacgccaacaacagtgtgttggctaaagggcgtgcttggattctatcccatggtggtgcaaccttgattcctcagtggggaaaaatatggctttcggtacttggattgtttgattggtcaggaaataatccaattttccctgaactatggtccattccccagtttcttccatttcatccagggaaattctggtgctttgcccgtatggtatatctaccaatggcttatctttatggcaagaaatttgttggaccaattacaccaactatattggcactaagagaggaaatctatgacactccttatggaaagattgactggagtgatgctcgtagtaaatgcgcaaaggaggacctcatctgtccacgcacactgttgcagaatgttatttggacttcactttataggtgtgtggaaccagtattgagcagttggcctatcaacaagctgagagagagagctctgggaaacatcatggagcatatccattatgaagatgagaacacacaatacctatgcatatgtcctgtgaataaggctctaaacatggtctgctgctgggtagaagatccaaattcagatgcattcaagcgtcaccttgcaaggataccagacttcttgtggatttcagaagatggcatgaaggcacaagtatatgatggctgccagagctgggagacatcattcataattcaagcattttgcgctacagatcttgttaatgactatggttcaactcttcagagagcctatgagtttatgaaaaattcacaggtcatgaggaaccatcctggtgaccaacgttattggcatcgccatagatcgaagggttcatggacactttcatctgcagacaatggatgggctgtatctgacactacaggagaagcacttaaggctgtactgttgctgtcaaagatctcaaacaaaaacaaccttgttggggatccaatagaaagagaaaggttgcatgacgctattgattgccttctatcttttgcgaacaaagatggcaccttttctacatatgagtgcaaaagaacttattcttggttagagattctaagtccttgtgagactttcccaaacattgttgtcgattatccttacccagaatgcacttcatcagtgctccaagctctgatattgttcaaagacttatatcctggttaccgcacagaagagatagaagcattagttagaagtgcagcaacgtttattgagaccaaacaacaagaagacggttcatggttaggtaattggggtatatgtttcacctacggggccttcttttcgattaaaggtttagtcgcttctggaagaacgtacaagaacagcccttgcatacggaaagcatgccacttcatattgtcgaagcagctcagtactggtggatggggagaaagccatatcgctattgaaactcaggtgtatgtaaatctcaaaggtgaccgtgctcacgctgtgaataccgcctgggcaatgctcgctttaatttatgctggacagtttgaacgagatccaacgccattacattgtgctgcaaaggaattgatcaacatgcaactggagacaggagagtttcctcagcaagagcatgtaggatgcttcaactgcagcctctacttcaattacccaagctaccgcaacttgttccccatctgggctctcggtgagtaccatcgtggccttcgtgcaaagaaagacaattgagtccgtgtgtgtatatatatagtacgtatagcattgtgaggaataaaacaggttgcgtcggtggtgagtgcgcaaaaacaagatgtacttttatgtaggtgtaccacagtgtacaatgttggtcgttgttagactgtaaggctatcatgacgtgtatattgtaatatatatactacgtgattggtgcccaattatatacggcgttttatcttctct

SEQ ID NO: 2895 - DNA, 2206 bp, Zea mays
  Clone ID: ZEAMA-23APR03-CLUSTER6856_2
cttccgctttctcccttactcgcgctcagcacgcaggcgacggcgtcggcgctcaggtcgggctctgggcgacggcgtcatcggcttctcctcccgcctctctccagtcgcctcgcgccctcgcctccggtcctccgcacaccggccggtgaccctgctcacactgatgtggaggcctcaaaagagaaccgtggagcatgcagtttgaacaatgatcgtgctgatgctctagaagaagaggccaatgtttccacagctaggataggtcatgttgagagtgctgaccctggtggctctgtgggtgtagaaaaggaaattttcatggctgttaatgaggagtctgagggggagcaagctggggcaacactggaggatctgtttttctttaatggtgaagaggatgatgacagtgattgggaacctgctagtcgccttgttgtgaatagatggttttgcttgaactgcacaatgccaaatgtggacaagattacatattgcatgaattgccgtgagcttccaggatctgttgtagatggatatgatgtcttcaaaaagcaaattgcacaaacagctttgttatctgctgacacagggttgctgccagtgtctacggcgattggttttgatgaaagaatgctgctccacagtgagctagaagttaaaccaaatccacatccagaaagaccggatcgccttcgcgccattgctgcaagtcttgctgctgcagggatctttccctcaaaatgtgctttggtacctcctcgagaaatcacgaaggaggaacttcttatggttcatagtccagaccacattgaaagtgtcgagcagacaaagaacatgctttacagttacttcacttcggatacttacgcaaatggacattcagcatgtgctgccaaacttgcagctggattatgtgctgatcttgctagtttgatagtatctgggcgtgttcgcaatggctttgcgctggtaagacctcctgggcatcatgcaggggtgaagcaagcaatggggttttgtcttcacaacaatgcagcagtagctgcgttagctgcaaaaagagcaggtgccaagaaagtcctcatagttgactgggatgtgcaccatggaaatggcacacaagagatattcgacggggacaaaacagtcttgtacatatcattacatcgtcatgaggatggaaacttttaccctggaactggagctgctcatgaggtgggagttcttgatggtcaaggattctcagttaatataccttggagccgtggtggtgttggagatgatgactacatctttgcttttcagactgtggtgcttccaatagcttcagagtttgccgcagacatcactataatatctgcaggattcgatgcagctagaggtgaccctctgggttgttgtgacgtcactccaactggatactcttggatgacatccctgctagctggttcctcaaatggaagattgttggtgatacttgagggaggatacaatctccggtcgatatcctcatcagctactgaagttgttaaggtcctacttggggagggtcccaatcgtgcttcatttgtagtttcaccatcaaaagaggccttgagtactgtttctcaagtcctgaagattcaacaacagttttggccagttttaggtccaacatacgcatcactacaggcgcagcaggggtcggtttcttccaatcatagtaatgagctgaagaaaaggaagcgtccaggaggaggaccagggcccttctggtggaagatgggaagcaaaaggcttctatacgaagcgcttattgagcctcgcagccgtccgaggaaactcaaggggtcaactggttcagcagcgccttagacttagatgggcagtttgctggccgttgatcttctagacatgaacagggtagctcgctgaccgcgtttcctcaagcagagtaggctgcgtttacctagaaaacctagttttggctggttacttgcatgatggtcgaccgtttcagatggagtttgacagcaaacccgttgtgttaaccatgcgtggcgtatcagccgatgtttcatgcatgctactgtctttttctttggttggtttcgtaccatagatagacgtgtgtagcgaccatcgatgaagggcgaccttgcacatctggaacggcatgcatctcagttattagccgaaaaaaaaaaaaaaaaaacccgcggcc

SEQ ID NO: 2896 - DNA, 1825 bp, Zea mays
  Clone ID: ZEAMA-23APR03-CLUSTER685_1
gcttttttttttttttagttgcaaaatcggacgcaaatgctaatgccgtaatgcgccgaataaaaatttatccccacttgtaatcattaaagtctttaggtctcagagtcttggctttcgttgtcaaaactacaaatgccagaactccgggtggtctattgatgttatttataaacgcgaatggccaaacagaactgcctggcgcctgccacagatcgaggaaatcccaaggtcaaagtagattcccaaatcctaaccagtcgtgcgcgactgcgcggtgcgcccgtgcctcagagatggatgacgtatccgtgaagcagatcgccgttctgtaccccgtcggcggcgtcgggcacgtcgggcccatgacgcagctcgccaaggtcttcctccaccacggctacgacgtcaccatggtgctcatcgagccgcccatcaagtcgaccgactccggcgccggcttcatcgagcgcgtggccgcctccaacccgtccatcaccttccacgtcctgccgccgaccccggcacctgacgtggccagctccaccaagcaccctttcctcctcatactggagctgatgcgccagtacaacgacaagctcgagagcttcctccgctccatcccccgggagcgcctgcactccctcgtcatcgacctgttctgcacccacgccatcgatgtggcgacgaggctgggcgtccccgtattcaagttcttcgcctcaggcgcggggactctggcgatcttcacccagctgccggcgctgcttgccggtaggctgacgggcctgaaggaacttggggacaagccgcttcagttcctcggggtgccgcccatggccggcgtcccatctcgccacgtcgctgctggagagtccggaggacgagctgtgcaggacctcgatggagatcttggagcgcaacgcgggcacccacggcgtactggtcaacacgttcgagtcgctggagcagcgggccctccaggcgctgagggatcccctgtgcgttcccggacaggcactgcctccagtctaccccatcgggccgttggttgggactgggacgggcagacaggaaggcgacggcggccctcagcacgaatgcctcgcgtggctggacgcgcagccggagcgcagcgtcgcgttcctctgctgggggagcaagggcgccctacccaaggagcagctcaaggagaccgccgttggcctggaaagatgtgggcaacggttcctgtgggtcgtgcgcacgccggcaggcagggacgggcccggaagatactgggagcaacgtgccgaggcggatctggacgcgctcttgccggagggcttcgtggagcggaccaaggaccgtggcctcgtcgtcacgtcgtgggcgccgcaggtggatgtgctcaaccaccccgctacaggcgtattcgtcacccactgcgggtggaactcgacgctggaggcgatcgcggcgggggtgccgatgctgtgttggccactggcgggcgcggagcagaggatgaacaaggtgtttataaccgaggacatgggcgtcgggatggagatggagggctacatgacaggtctcatcaaagctgaagaaattgagggaaaactgaggctagcgttggagtccgaggaggggacgaggcttaagaaacgagcgctgcaactgaagaaagagacggaggaagcgatggaggacggtggctcgtcggaggcggcatttctccgattcttgtcagatgttgcaaatgttagaggctgattggttacccgcatcagtctagtatgattgtatcggtgagccaggctagataaaatttgttttgttttat

SEQ ID NO: 2897 - DNA, 1054 bp, Zea mays
  Clone ID: ZEAMA-23APR03-CLUSTER688_30
tgctctcatttcttttgtacattattcttctgatcatatatgtcttgttaaaatccatgatgctcagttctgtgttctctcatttcatggaagaggctaatgctatatagtcttgcctgatgtttagcagatctcctcatttaaaacggttggttatgccagcatggaaccgcatcaccaaagtgggaatatgtaatgctatccaaaggtggcaggcgctggagtccttgacaatgcctaccatcggacatcctccatatattatggaagagatagcaaggagctgcaagaatttcacagaacttaagatcatgggctcatttgatcaacaatttgcctcggcaattttgcagttccttccaaagctgaaagtgctgagccttcgttgctcgaaggtgtccatggatgcactgcaatgtttgctgaactcgatggagtatcttgaggttctgaatatttcacactgcctgctgttggttgtcgcggcgaatgggcggaagcaagtggttcatgaactggacagccaaattctcgagagagcttcacggctgcgtgaattccactactgccaaagtaggttgtgcgtcgcgtgccagcggatggtggtggatgaaggcatcatgcgctggtacaggtacgaggattggttttggcgtcgggatgaggtgaggtcccttgatctgcaggattatgggaagctgtttgatgttggttgcgagaggttgacgtctgtggattagatgctaataataggggagcaaaacccgccctcctcagtctagaaacttgtttattggcattcataaaacatagcaagtgatgaggggtaacagtagattaataatatcgataacaatgtgcgtgaatggtgtgcgcgtgtttagctactgtaaatccatgaatagttcgtgttgtttggaggagtttgttatagccagtatggtgtcaagagtaaaaaaaaaaaaaaaaaaaaaaaaaaaaaaaaaaaaatttttttttaagaaaaaaaaaaaaaaaaaaaaaaaaaaaaaaattaaaaaaaaaaaaaaaaagg

SEQ ID NO: 2898 - DNA, 1280 bp, Zea mays
  Clone ID: ZEAMA-23APR03-CLUSTER6896_1
tcgagtcagctaatcggagcctcccctccaagcgcagctccgtatgccgtatccaccaaagcgtggagaaagcaaagcggccgcgctctgccgcaggcttcgattcgagcggtcagtactcagcaccctctcacgccgccgccgccgcggcgcgaacatgaaggccatagggaacggcggagagtggtggtggaacctcccgtctctccgccgcaagtctgactcccgtcgacgcggccgccgcaacactgacccccgcggccgccgccgcggtcccccacgggagccgctctcgtcctcctcctcctcggagtccatcgagcagggtggcggctggcccatcgaattccccttcaggcaggctgtcacggccgcctctctcaccttcaccggcgacacaatcgcgcaagtccgcagccgcatcgtcgaccgccgaagatgctgccccgactccaacaccaaggaactcataccagacatattgctgaaccatgattggattcgtgcacttcgtatggcttcctatggatttcttctttatggtccaggttcatatgaatggtatcagctccttgatcgatgcatgcccaagcagacatttgtaaatttgtctgctaaggtcatcctgaaccagatcgtgcttggtccttgtgttattgctgtaatttttgcttggaacaacttatggttggggaaactttcagaactcccatccaaatatcagaatgatgcccttcctactcttctatacgggtttaagttttggattcccgtatcgattgtcaactttggggtgattcctttgcctgctcgtgtcgccttcatgtcctcttgttccattttttggaacttttatctgtcgaccacaatgagcaaatgaaacctccagttagttgtcagttgccaacctatctggaacgaacaatctcatatggaccctgatactctgcaattttgctcagtttggttgggttcattacacagaggagcatctgaagaagttagtttcagcaggcataacagtgttaggtctatctttggacagtccttgtggtgtagtgacattaaactgtgaggccttactcagatgttgatgagcgtaaaggtcaattcagcaggcataacagtgttaggtctatctttggacagtccttgttgtgtaatcatgcatggagcatttgtctctattttgaattcaaaaaaatgtagttgagtttattatgtgcgatgtgtattgaatcaaaaaaaaaaaaaaagggcggccactcgcgatctagaac

SEQ ID NO: 2899 - DNA, 2472 bp, Zea mays
  Clone ID: ZEAMA-23APR03-CLUSTER6905_4
gttcgaaagccgcgcacgcacgtcggtcgtcccgagcaggacctcgatcggccgaggatggcgacgccgaacgggcttgcgcggatcgagacgaccgggaagaagaagcaggacaacggcgtgtggtacgacgacagctcggcgccggtgcgcgcgcagaccatcgacgagctgcactcgctgcagcggaagcggtcggcgcccaccacgcccaatcggtcggcgcccaccacgcccatcaagggcggcgcccactcgcccttcgccgtcgcgatctccgaggaggagcgccacacgcagcagatgcagtccatcagtgcgtcgttggcgtctctgacgcgtgaaaccgggccgaaagtggtcaagggcgacccggccgcgaagggagaggccgccgcgcagggcgcgccatcgacgccgagggcgcaccagcagcaccgccaccccgccgcccccgccatcgccgtcagcgacagctccctcaagttcactcatgtgctcaacaacctctcgcctgctgagctgtacgagcaggccatcaagtacgagaaggggtcgttcatcacgtccaccggcgcgctggcgacgctgtctggtgccaagaccgggcggtctcccagggacaagcgcgtcgtcaaggacgaggtcaccgcgcaggacctgtggtggggcaagggctcgcccaacatcgagatggacgagaagacgttcctgatcaacagggagagggccgtcgactacctcaactccctgaaggtagttcgtcaacgacagctactcaactgggaccccgagaaccggatcaaggtccgcatcatctccgccagggcgtaccactccctcttcatgcacaacatgtgcatccgccccacggacgaggagctggaggactttggcacgccggacttcaccatctacaacgcagggcagttcccctgcaaccgctacacccactacatgacgtcgtccacgagcatagacctcaacctcgccaggagggagatggtgatcatgggcacgcagtacgccggcgagatgaagaaggggctcttcggcgtcatgcactacctcatgcccaagcgcggcatcctctcgctgcactccggctgcaatatgggcaaggacggcgacgtcgccctcttctttggcctctcaggtaccgggaaaacgacgctgtcgacggatcacaacgggcttctgatcggcgacgacgagcactgctggagcgacaatggcgtgtccaacatcgagggaggctgctacgccaagtgcatcgacctggcgcaggagaaagagcctgatatttggaacgccatcaagtttggaactgtgctggagaacgtggtctttgatgagcatactcgtgaagtcgactacgccgactactctgtcaccgagaacactcgggctgcctacccgatcgagtacatccccatcgccaagataccatgcgtcgggccgcaccccaagaacgtgatcctcctggcgtgcgacgccttcggcgtgctcccgccggtgagcaagctgatactggcgcagaccatgtaccacttcatcagcggctacaccgctctggtcgccggcacggaggacggcatcaaggagccgcaggccaccttctccgcctgcttcggcgcggccttcatcatgctccacccgaccaagtacgccgccatgctcgccgagaagatgcagaagtacggcgccaccgggtggctcgtcaacaccggctggtcgggtggcaggtacggcgtgggcaagaggatcaggcttccctacaccagaaagatcatcgacgccatccactccggcgagctcctcaccgccaactaccagaagaccgaggtgtttggcctggagatccccactgagatcaacggcgtgccgtcggaaatcctcgacccgatcaacacctggacggacaaggccgcgtacaaggagaatctcctgaggctcggcgggctcttcaagaagaacttcgaggtgttcgccagctacaagatcggggacgacagcagcctgactgacgagatcctcgcagcaggccccaacttctgaactaaagcaatggatccggatgaataaaacgatggtgtgtgtgcgtgggtgcgtgtgaagatgattacgacgacgacgaaaaaaaaggtgttggatcgatgagccaacatagtaatagattagctgggtatattgtcatgggtgcgtctggtctctggtcttgttatctataaagctgtctcaagcagctatcatattctatttcaaattctattctgtaagcgtgtagttcaaaacaatgctttacacaaccatatgcacagtctatctaaggttggtctgttctatcagcttgttgggaaaagtttgcgtgtgcttgtatcttgccccctgtactctctctggtttctgaatttgaatacggaacagcttgatcgcgatcaaaaaaaaaaaaaaagcggcccctcgagctca

SEQ ID NO: 2900 - DNA, 2358 bp, Zea mays
  Clone ID: ZEAMA-23APR03-CLUSTER69288_1
acgccacgccacagccccgccctcgccgccgtttcccgaatcccccaagggcaagcggagccatccaggatggcccattcgccggcgcccagcggcggcggcggcggggggccgctgccgctactggtgtcgctcaactgcctcgacgacctctcgctggagcaggaggggctggcgggcgtggccgcggtggagcacgtgccgctctccgccgtcgcctgcggccgcatcgaggccgcctccgcggtgctgctcccctccctcgccttcctcccgcgcgccgcgcagcgccggctgcggccctggcagctgctgctctgtctcggctccgcggaccgcgcggccgacgcggcggcggccgccgacctgggcctccgcctcgtccacgtcgacgccaaccgcgccgaggaggtcgccgacaccgtcatggcgctcatcctcggcctgctccgccggacccacctcctctcgtgccacgcctcgtcggtcccggccgccggctggctcggctccgtccagcccatgtgccgcggcatgcggcgctgccgcggtctcgtgctcggtatcattggccggtccgcggccgcccgctgcctcgccactcgtagtctcgcgtttcggatgagcgtgctctacttcgatccgcgctacgtggcaagtgggaaaacaaagcggccttctattgttttcccttctgcagcaaggagaatggacactctcaatgatttattagcagcgagtgaccttatttcgctgcattgcggattaacaaatgaaaccatgcatatacttaatgctgactgcctgcagcacataaaacctggagctttcatagtcaatactggtagttgccagcttatagatgactgtgctctcaaacagctcttgattgatggtaccatagctggttgcgcattggatggtgctgaaggtccacagtggatggaagcatgggtgcgggagatgccaaatgttttaattcttccgcggagtgcagactacagcgaagaagtgtggatggaaataagagagaaagcaataactatgttacagtcctttttcttcgatggtgttcttccaagtagtgcaatttctgatgaagatgaggaaataagtgaagctaaaaatgaagatgactatctaggcccacaggcaaaggatagccagtcacagatttttgatactgaaatagatgaaagccacataacgctggagtctgaaaagaaaagagccatatcccaccataaagagcctcaggcgtctggaaagtctgtaaacattggctcccgatctgaagggaggcgtagtcgttctggaaagaaagggaaaaagaggcctgcccatcgcagacctcaacagaaaccagatgacttatctgctgttgagagtgacagtaactattcctcccggagagatgatgacactgcaatgagtagcagggaccaggttgtaagttccagttcacgatttgcctctcctgaggacccaaaatacaagcataaatctctttctgaatccccgatggaaataacatccgagaagaaggtgcctgtactactcagtagaaagtaccctgataaactaaaagatggatttattgtagctttgagagcaagagataattcagggtaccatgttgcaagacagagagtagttggtggtggtggctggattcttgatgttgtctcaaatgctacaaacagggaccccgctgctcagttccttgttactttcaaaaacaaggatactatggggctccgatcctttgttgctggcggtaagctactacagattaataggaagatggagtttgtgtttgcaagccattcttttgatgtttgggagagctggatgctggacggttccttgctggagggtagcaagcttatcaattgcagaaatccttcggctgtattggacatctgcattgagatcctcgcagcaccaagtgaagaagacggagtcactaggtggctagattccccacgctggggactgtaaaaatgatctgagccatcattgttgttcggttcggtttgcttccttcttttttgaaaaaaaaaatagcttccagtttttctattcctctgcttaagttcccaattttgtcctttctgatgtagggaccatgtagagttgtagacatttatatcaatacatcatgtgtaacgtgttttttccgattccaaaaaaaaaatttgccgattgggggccgctagggcatagagcccaaccaaaaacgtgttttactgtgtgtttcgttcccctcccccttaaaaaaaggagttgtgtgaaagctgaaacctgattggcccaccaattgtaaaacacccctgtgtaacgtggttttcagtttcc

SEQ ID NO: 2901 - DNA, 895 bp, Zea mays
  Clone ID: ZEAMA-23APR03-CLUSTER6933_10
tttctctcctctcccgtcccactctcctgggcaatcccggcccggcatggcgagcccgtcctcgtccccctcgcggaaggttcctttctccgcacacatgggtgcgcgcgtgcaggctctgagcaagatcgcctgcagccgcctgcagaaggagctcgcggagtggcaggtcaacccgcccgcgggcttcaagcacagggtcaccgacgacctccagaggtgggtcatcgatgtagcgggggcagcaggcacgctctacactggcgaaacctacaagttgcaggtggatttccccgagcattatccgatggaggcacctcaggttatatttctgcatccagcaccgatgcatccacacatttacagcaatggacacatctgtttagattggtccactggctatgccaagaaattcctagaaatattactaactaaccatgattccatgagatggcaactatcactggccccttaagatatactgtatgactcgtggtccccagcgatgactgtcagttctatctgtatcagcatattatctatgctgtccagctcgccagaaaagcaacgcccagctgataatgatcgctatgtcaagaactgtcgcaatgggaggtctccgaaagagaccaggtggtggttccatgatgacaccgtgtgatcggtgttccgattattgttgtcctgtatgcatttagttgccagactatgggagatggacttatttcgaacgacccatttgaccagggattaacatgctcttgtggtttgtagatgaatgtgcatcagcgtcaggcctgtcctttctgttcttaccccgtggatgatatataggataatgtttgtatcttgtctattttcggaacagacatgaaattcaatgcaggtcactggt

SEQ ID NO: 2902 - DNA, 1726 bp, Zea mays
  Clone ID: ZEAMA-23APR03-CLUSTER6944_3
cataaaagcaattcggcacgagaccattacctagaacatcctaatcgaaaaatcttaaaaactaaaacctatccactagaaaagcagtactataggaatctaggtgaggtctacgatggttccggcgtgcgcgagaacatcgacgttcctgaagaagcgatgcagcattagcaggaggacgtcggtggtgagcaggctgtcggagccggcgcagtgcgcgcggccggcggcgcgcttcacgccgagcgcggtggccacctgctccagccccccgcgcatggcgcagcatctggcgaggtgcttcacgtcgaacacactgtgcccgaacaaccgacggaccagggcgaggaagccgtccaccgtgtccggcagcggctggccgccggtgagcgccttggcgaggtacccgaagtcgtaggagcccgagaaggcggtccaggtgagccgcccgcaggcgaggccgctgcagcggaacccggcggcgaagtcttccgggtcgatgccgaactcgttcagcatggcgaagtccatcccctgctcgcggagcatggcaatggaggccggcgcgtgcgggtgaagcgcggggtcgaagccccggatgttgaattgccacgcgatggggaaccggccggcggggcccgaaagcgcgatcccgacctgcagcagcttgaggtcgtctacgttccgcttcaccagctcatagctctcgcgcggaccgcgcatgtaccgcggcaagtccgagtcgtgaaccgcgccggggaactcggtgtccacgcaaacgcaggggtagcgcggcagcaccgccgataggttggagagctcttcgtcgaagttgctggcccacacgtcgcgcacggcggccttcaacaacgcgccgctgggcgtgaagaccagcaggggccgcgccatgacgtaacatggacgggggacgaatctgcatggcggcggcggcggcgcgcggaccgactgggagtacatcgtcattactaccggtggccgtgtattagcgagacgttttgatcatggaacgtggacgtggtgccctggttttatatatgggctcattccttgtatgccactggaaaatatactcattccttgtatgccactgaccccacatgtcatagacaccaaaaaatatacctatatgccactcagtggcacacaaggaatgagtataaaatttgatggcataccaggaattttctcaatatagtactacttaattacatagtaacagacccatttataacccataaggaccagatgaacaacctgcaactgcaagctgcccagaagtggcggccatttcaatcctcgcgggcagctttgcggtgcgacgacgtcgcggcgggcgacaacgatggagaggcgtcgtcggtgccgacggggacgtcggagagcggcgccagcacgcgcctgacgctcatggagcgcatggggcggaagctgagggacctgagccggccgtccttggagaagacgtcggaggagctgcggaggatgaggtagaccagcccctggacgagcacgaacacggccaccttggcgagcgcgtcgcggagctccggcgacagcgacgggaacgccgacccgtccatggcgtacgtggagagacgctggcaaggtagagaactggagactggagagggagatgcgtgtggattcgcggcgtatgggtgtgtggctgtgtgatcgatgagatgatggcgggcggttccggtac

SEQ ID NO: 2903 - DNA, 908 bp, Zea mays
  Clone ID: ZEAMA-23APR03-CLUSTER696_82
ctaatcgaaaaacctcagcactagtctcctcttcgcacgagcgcaacaccatccacccaccagttcgaagcggaggcgaccggcaacctgcggcggagatgtcaggcaggggcaagggcggcaaggggctcgggaagggcggcgcgaagcgtcaccggaaggtgctgcgcgacaacatccaggggatcacgaagccggcgatccggaggccgaggaggggtggcgtgaagcgcatctccgggctgatctacgaggagacccgcggcgtgctcaagatctttctcgagaatgtcatccgcgacgctgtgacctacacggagcacgcccgtcgcaaaaccgtcaccgctatggacgtcgtgtacgccctcaaacgccagggccgcactctctatggcttcggcggctaggttaggtgtgggtaattgcctgtccaggtgtctcggatctgtggtactagtttggctgccttcctgtgttcgtattgtagtagttgtggtagctggttgctttgtcgtcctgtagtcgtgcttctttgggtctgtaagaaccgctggttcgatgggattggattggacggtgaagtaggaatgttggcatgttaaaaaaaaaaaaaaaaaaaaaaaaaaaaaaaaaaaaaaaaaaaaaaaaaaaaaaaaaaaaaaaaaaaaaaaaaaaaaaaaaaaaaaaaaaaaaaacccttcgttgcgccgccgcctccaaaatcgttttttcgtccccacaagaaaccaataatccgccggcgttgaaatgttggtttatcaaaacctcctatctggggacgagctcctgtcggtttctttcccctacaaggagctcaaaaacggcgtcctggggaaggccaaggaaaagtggttcacccaaggccctgttgatgtaaactttggggc

SEQ ID NO: 2904 - DNA, 874 bp, Zea mays
  Clone ID: ZEAMA-23APR03-CLUSTER7015_2
actgctccagcgaaggcactagccgccgccgtttccatctccccggcgctccatcgctgggcacgcaggcgacggcgacggcgctcaggctcgtgctctcagggacggcgtcagctgcttcctttcccgcctcttgccagtagcctcgcgccctcctttgctcctccgcacggctgacatacatagactgatggcaacactgaaagatgcagcagcaaggaagtctatactggcaacaatccgtcttgttgtcccagccggtgcagcccgtcctgcacctccagttggtccagcacttggtttctatcggctcaatttgatggccttttgcaaggatttcaatgccaggacccaaaaatacaaggcagaaactccaatgcaagtcaccctaactgcctacaaggatagcaccttcgagttcgtggtcaagtcgccctcggtatcatggttcctcaagaaggcagcaggaatcgaaaccgccagcactcgcccaagccacgtgaatgtatcgtccctcaccctccgccacgtatacgagattgcaaagttgaagcaggctgaccccttttgcaagcacatctctcttgaggcgctgtgcaagtccatcattggcacagccaactctatgggtattgcgattgttaaggatctatgagcagcaatgccagccttttagtcatgaagaaatctgtgacattttgtatgtgacatttctatgttcctagtttgtagttggtgatggagaggatacaactattctgtctcacagagccttcagcgcagcctttttctcttcctttgttcattttgggacttaactgatactgtgtggttttacgttggtgctttaaataataaattgtagttttggttt

SEQ ID NO: 2905 - DNA, 1396 bp, Zea mays
  Clone ID: ZEAMA-23APR03-CLUSTER7067_2
gcacgagaccattacctagaacatcctaatcgaaaaactcgcatcgcagcgcactcgcgccacagtcggcatcacagaccagatccctgcgggtgcggcggccatggccgagaacttccagctgcagggccggcacggcaagtcccgcgtccgcgtctcccgcgtctggcgccgcccggccgcggcggggggcgacgtcatcgttgagtggaacgtcgccgtcagtatcgtctccgactgcctcccctcctacacctccagcgacaactccgccatcgtcgccacagattccatcaagaacaccgtgtatgtcaaggcgaaagagtgcacggaagtggttgtccatggaggaattcgccgtgattcttggaaggcatttcacctcgctgtaccctcaggttacagaggccacggtgactatcgtggagcgcccatgggagcgtgtgactgtcgacggaaagcctcattcgcatgggttcaaagttggtgttgagaagcacagcacagaggtcattgtaaaaaaatctggaagcctgcttataaattctggaattcaaggatactcgctgctaaagacaactcagtctgggtttgaagggttcgtgacggatcgctataggcttcttcctgatacaagggaaaggatagtagcaacagaagtaactgcttggtggaggtatccctttgaacatgtttcgcagctcccatcgaagccattctgcttcacgcagagataccaggacgtaaagaaagtccttgcagagacgttctttggtcctccggatgttggtgtgtatagtccatccgtacaaaatacgctatacctcatggccaaggaagtccttacaaggttcccagatatatcgtcagtccagcttagaatgccgaaccttcactttctgcctgtcaacttggggaccaaagaagctccgctggtgaagtttgctgatgatgtgtacctgccgacggacgaaccacacgggaccattgaagcaaccttgagccgtcccatgtcaaagctgtaaaaaaatttgtagtcgtcaggctgatattagactcctgcttcgtctccccagcattcccaggctaaaatggacagtaagctgtaagggaaagataaactatcataaatcgtagcccctatgctttacgtggtggtggtaataagtgcacaaacttgtattggatgttgtcagctgtagcctgtaggcgtccagcttgtgacgtttcgccactgtaatcgtgtacattgctcgtcttgtgtggaaaccagttaatatctttggaagctttgctcagttttacttcgtcgtctgtagtcttttagctcgttattaggccaccagcttcagtagatctgattgtttctccatatatttgaacatattacgtctcc

SEQ ID NO: 2906 - DNA, 834 bp, Zea mays
  Clone ID: ZEAMA-23APR03-CLUSTER712_22
ctaaacttcccattcaatacaagagcaaaagccaaccactcaaagacacattcgaagcattcaatccactccaagtttccaaaatcaactctagtgcttagagacttgagagagtatcatttgtgttcatttgcgctcttgtcagttggattgcctttcttccttcctcattctttttctaagtgcttgtaaagctagcaagagacacctaagtgtgtggtggtccttgcggggtcttagtgacccgattgattaaggagaaggctcatatggtctaagtgaccgtttgagagagggaaagggttggaatagaactggctgtcggtgggagaattctactggccgggtggcggaacgcacccgccctaatcctaagatgaggaggggcctaagcggtttgcctgtctgttggaaggtggatgaacacgagaggatacaagagttagagtggttcaggccgccggagcataataccctacctccactgtgtgtaagctgtattgagagtgtgattgagtcttggtggttgggggctataaataccccccaaccagcacacttcaaggcattcaagttttcagcaaacacattcaatacaagagctagtgcattcaatacaagccacaaaaagattgaatcaaaatctttccaagtcccaattccactcaaagcaattagtgactagaagagaaagttttgtcgtgttcttttgagctcttgcgcttggatcgcttttttttttccccattttttgttcccaagtcatttgtaatcaaagcaaaagaccccaattgtgtggtggtccttatggggactaagcccccgtttgttttt

SEQ ID NO: 2907 - DNA, 1204 bp, Zea mays
  Clone ID: ZEAMA-23APR03-CLUSTER7172_7
aggacacaactgctctatctctcttgtagtgcttagcgaggccgctacaggggcagcacgctggcaggctgtgccgcggcggggtggccggctaggcatagtgacagtctgtcagtcaggggcggcgatacagagacatccactgatgcgagacgaagccgttagaaccgatgcggcgagacatcgaacaaccttggggaggagcggaccacaggcttccggcggcaaccatgcagggttgtaggtggggatgatctcctgaagggcatattctttgaggtaaagaagaagtttgagacagctcttggtgttcttaaaaaggaaaagatcactattgatccagatgacccagcggcagtttctcgttatgcccaagtcatgaagactgtaagggaaaaggcggatcttctctctgattctcaaaggattaaatataccattgagaccttcaccaagggcatccctgatgcacggacttacttgaatactcttcaacagctcagaataaagagtggtcttatagatcatcttggaattgagcctttgatgatggaagctcttgagaagattgagaaggacattaagaaaccacttttgaggagcgacaagaagaacatggccaccctcttggcagagtttgacaagattaacaaaaagcttggctttcggaaggaggatcttcccaagatcgaggaagagcttgaattggaaattgccaaaagtgagctgactgaacttaagaaggaatgcgttgaagcaatggagactcaactcaagagggaggagtttcaagatgaggagatgcctgatgtcaggaaattggacatcagaaacttcctgtaggcctgatcgacgataatctttgaggcccaacgcacctctggttttggtttcaagttgatcggtgctccacacctatgaatgctgctgcttccctttttgtaataaaagaaactgcacggttgggtatgagttggattaaatcttgcctttctgttgctctggactcttgtggctgcagcaacaatgggatgtccttgtgttatagcatatgaactcgttacgaggcattcaggaaaatggtgatacctggtatttaacctttattttggtactcagtttggagagcaaagatccatttgttttattatgtcatttatttttgcaccttgcaaaaaaaaaaaaaaaaaaggcccctagggcc

SEQ ID NO: 2908 - DNA, 1977 bp, Zea mays
  Clone ID: ZEAMA-23APR03-CLUSTER71826_1
tgaacaatatagtctacactacaagcagtgttttaggttaacatatagataaattgctatacacggtattaaaatgacttttgataacttatttttgcggcttttttcggagaaatttaattacataatagtttctcccaattctgtaatgataaattatgtacagccgcatttccaaaagatcgatgaccttgaactagagctagaaggatttcccaaaaattgcagctgtttcaccattagttaaggagagccgtagtactcatgggtcaggaccactaaaaattatggggaccagctatttgtcagtcaggattcaagatgcggcactggcaaaatagtctcgaatcgttctccgtttcaacgacgacggcgggctcagaacagaagaggggctgttcgtctgtgcttccgggctcttccttgaatcaagtgcctcctcctcgaacaatgccaaggccctcttctttgaagattcaggagtgccgaagtgcagtgctctaggttgaaggggagagtggcaaccgctttgcaattcgccatcaccgctagtgcagacaactccgtctcttgatgtagtagcaggctcatgggtaatggaccttcggtactcggtgcttggtgctgttatccgcttacggatcactgttggcgagcttacatttgtacagtccattttcatggtactccacacacgtaccgtggaatcatcagaagatgttgctatctttccaacctctgatgcacaccagtcaaccgatgttgcttcaccttcatggcctttcagaactataggagcactttcaggttgatccacctgccacaagtatacacttccgtcacttgatccaccaaggatgtgagttccatcaggactgatagcagacttaacaaagaaagactctattttactgccagtgtaaacctttatgggacctttgttcacatgaagcacactgtacaagtagattctgttatccatacatgacgcagcaatgtatgcaccatacgaatcttgagacaggcaagagatgccatgtttcaccccctccaaaggttgggcccctgcttgagagtttttgttggagaacggcactttcaggtttcgtgtatcccatattttcacaacattgtctgcagctccagaagtagcaatggagacaccatctttcagataaagaactgatgtgatacttgttgaagccgcctttgctcgagaccgtgttcggctccttagtatgggactgtgggcttctctgacaacagcagaagacgtgagacacgtttcaccatggctgtttggagatttagggtcacatcttaaatcccaaagagcaaatgaaccatcccttgaaccggaaacaatgagctcaggattggaagaatgacaagacagcgacttcacgctcccagtatgccctgacaagacaccaatgcatttcctgttacctacactccatattttgacagtttgatcgccggatgcagtcagtatttgggatccctccttgatccagcacacgtcaaagactgcattgttgtgagcaacccagtcgcacaccctcgtttcagctgacttctctagtgacgaggaggcggaagggaggcgccggcgggtgtcgtagaggccaacgtacccgtcttcgtcggcgaccgccaggaggttacaggtttgtgcagtcttgccgaaggagatggcgaaggggatggcggggtcaccggagtgctcgacggctatgaccccgccgccgcggccgccggggtcggaggagaggtcagcgagatacgggagccccgccgtggcgcgggaggagacactggcgccgccgagctcacgggcccggagcccgccgaagaaagtcggagagaggcgccgccgcgtcgccatgacagtcagagagatatgggcacaggcgcgggctgagggagggaaaggaaaatttttcgattaggatgttctaggtaatggtctcgtgc

SEQ ID NO: 2909 - DNA, 1540 bp, Zea mays
  Clone ID: ZEAMA-23APR03-CLUSTER7182_1
gcagctccgcacaggtccctggcacagggcgaggcactgtcacgcacggaatcgagcaatcgatcacacagagacacaggtcaggagcaggagctcgaggtgtcgccgcgcggcagcagcttgggactcgggacagccatggggaagggccgggcaccgcgctgcgccaaggtggggctcaacaagggctcctggacgccggaggaggacatgcgccgcgtcggctacatgcagaagtacggccacgccaaccgacgcgccctgcccaagcaagcaggtctgctgcggtgcgggaaaagctcgcgtctgcggtggctcaactacctccgcccggacctcaagcgccgcgacctccccgcgcaggaggagcagaccgccatcgagctccacgcatgccccgccacaacatggtccaggatcccggcgtgcatcgcgggccggacggacaacgagatcaagaacgtatggaacacgcacctgcagaagcgggtaccgccggccggcggggaggaggagcactgcgccgccgggtccaacaagaacaagaagaagaaggagaaagccgctggcggcgccgaggagccgctcccgtcaccgactccgtctccgtcgccgtcctcgtccaccaccacgacggccaactgctccagcggcgactccggcgagcagcagagcaacaccagcaaggaggcggacgacgagcagctggacctggagaacctcgagatgatgcccatgctggacgacgacccaataaccttcggcttcgacatgctggtggaccccgtgccagcgccgtacggcccggccgtgtccgcgtccgcgtccagacccacgtcgccctgcgcctcgttcacgtccccacctccgcccgcgggctgcggcccgctcggcgtggacgacctgctggtgctgccagagatcgacatcgaccaggagctgtggagcatcatcgacggcgacggcggcggcgacggaggaggctccgcttgcgccgtgtctgccgagacatcggcgccgtgctgccagagcaatgcgccggagccgacgacgaacggcgcctgcgcgaccagccaccacggagcggcggaggaggagggaaaggagtggtggttggaggacctggagagggagttgggcctgtggggccccgtggacgtggaggactaccagtaccagtacccaacgggcccacatggtctggtggctgaccacacggacccgcttcctgccatggtggacgacccggtgtcctgctacttccaagcgggccccgcctccgcagtgctccaggaacccgggtactcggtgactagtggtagcaacctgatggggttgtgagatttatcgtcgtcgtcgtcgtcgtttttttttgtgatttttttttagatagcagaacagaaatcctgaacaaacggatcgtactatgcctggcaaaccatcggcgccagcatactacttgcttgcacaaaaaaaaaaaaagtgcatagctcagaggagcagaaactcaatactaaaccgccgccggcgtattattata

SEQ ID NO: 2910 - DNA, 702 bp, Zea mays
  Clone ID: ZEAMA-23APR03-CLUSTER7190_17
acctagggttttcgcgccgccgccgcagccgcaacaatggtaactgcctcgccgtcgccctagttctcgttttccatggagttggcctgtgccgccttggtttcggtgtttctctgacgtggttgatgtcgtgcttccttgtttgcgcascgtcgcacaagaccttccggatcaagaagaagctggcgaagaagatgcgccagaaccgccccatcccctactggatccgcatgcgcactgacaataccatcaggtgacggccgcgacctcactatctcctgctcgtctggtctggattcggccgtcgctgaccccgccgctccattccgtgccgtttcaggtacaacgccaagcgcaggcactggcgccgcaccaagctcggcttctgagcgtcgggattggccggctgctgcgtcggaaggctagggtctaagagctatcttctgttttatcattgtctctgtttctgtaagctagcaagtgatgctgtgatgcttttattaagattctgatgagtggtgacgttaagagaaaattggcagtactgtgttgtaccccaagattccttgcagcattgctatgctaagtaacgaaccctttatcttaaaaaaaaaaaaaaaaaaaaaaaaaaaaaaaaaaaaaaaaaaaaaaaaaaaaaaaaaaaaaaaaaaaaaagaaaaaaaaaaaaaaaaaaggccccta

SEQ ID NO: 2911 - DNA, 634 bp, Zea mays
  Clone ID: ZEAMA-23APR03-CLUSTER71_65
gtccttgctttcgtaattgcttatmcaaagtctraaataccccctaacttgttagattmcaattgttcgtccgcgcaaggacagtttggycatttgtcctctctgttgggggccttcgtcctccgaaggtcctcaaaaacatgatttgacaatgttttccaagtggattatgtgaacaggtaccttcggactcagaattacgaacatgaagtgcggtcaggacgaagcctgaaccagacgaaggacgggctgattaccaagctccacgaaggatggtgcacagccgaagctgtgcgcagggaagcttcgtcgcgatagcagagaggggaaccgacttaaagatgaaaagactacgtgggccttgtcagatttccataagtcattgacaaatgtaatggacataaatgtaattttacgtgggctgcgtcccgcgtctataaatagatgaacagtactcccgtactgttcacgctgacttggcatttgcttttgcgtcacgcttgtactttttaccttctctcagggccgaaggtacatctgtaatttgaaatcatttctatttttccatattaataaaatagaaatgattctaaaaaaaaaacaaaaaaaaaaaaaaaaaaaaaaaaaaccttag

SEQ ID NO: 2912 - DNA, 690 bp, Zea mays
  Clone ID: ZEAMA-23APR03-CLUSTER71_75
caaaccccacaggttacgcgyygtcgcgccccactccgcgtctccgctgcccggctggccgttttatcggcggcgccgccgttgcagcgatattaggctgtccactcatgaatttttatattatattttattctagtcagcaaatcctctactctacctcacaatcttcaacattaatatttgttggcggccttcggcttccgaaggtcctcaaaaacatgatttaacaatgttttccaagtgaaatgtgtgagcaggtatcttcggaattggattacgagtatataagattaaggccaagacgaagcttgagtgggacggaaggtgattgtgacgaaggaaaagatcattacgaagctatgcacagaagagcttcgacataacggcggaaagggaaaccgacttaaagatgaaaaaccagattagacctcgaagaattactatagagttatttataaacgtaaagggcattaatgtaatcttgcatgggctgcgacccgcgcctataaatagatgaacagtactcccgtactgttcacgctgactcggcatttgcttttggcgccatacttgtattttcactccttcaagccgaaggtacatttgtaatttaatattgtttgtacaaataagataaatggaaatagattaataataatgttcacaaaagattaaaaaaaaaaaaaaaaa

SEQ ID NO: 2913 - DNA, 1015 bp, Zea mays
  Clone ID: ZEAMA-23APR03-CLUSTER71_79
agattcaccattgccctagcacacgtacgcgcagatccgtccgctccaatccgccccggtcacccaacccacgttttcccccacgcccccatcctttcgattcaccattgccctaccacacgtacgcgcagatccgtccgctccaatcccccttccccatcgtctcgcgacgccctcgccgccgcctcgcccccaacgatccactcgcccccacaacgattcgcttcgtggtgaagaagccacccgcgcctcgccggaaacggaagcagcaacccctagccacgctgaccctccacggcgccggcgatggggctgaagcggcctacggcgggagcgggggaggcagcagcgcagaccatcacgttgtccatgtcggccatgtgggacacggtgcgcgccgccatgagggaggccgaagcagcagcactggagccaactcaaagctgtgtatcggctgtagctcagtcgacatcttctgctacagccctcccatctctgcagaagatggaaccgtggatggagggagcattcctgcggcggatggagcagcgggcctaactgcaggtatcttcggactcagattatgaacatgaagtacgatcaggacgaagcttaagctagacgaaggaggattgagatgaaggacgggctgatcaccaagctgtacgaaggatggtgcatagccgaagctatgcgcaggggagcttcggcatggtggcagaaaggggaaccgacttaaagatgaaaagactacttaggccttgacagatccccataagtctttagcaaatgtagtggacatgaatgtaattttacatgggctgcgtcccacgtctataaatagatgaacagtactcccgtactgttcacgctgacttggcatttgcttttgcgtcacacttgtattttcatctccttccaagtcgaaggtacatttgtaattcgatattgtctctatttttctatgatgatataataaagttaaattgatgatgttataaaaaaaaaaaaaaaa

SEQ ID NO: 2914 - DNA, 1469 bp, Zea mays
  Clone ID: ZEAMA-23APR03-CLUSTER71_83
agccgttctccctgattttttccaccgcccatgggcctggatattttttttctcagctctatcctttgccgtgcgtgcctggccagctcgtggaaaaatctcgccgccgcctccattctcctttttctcgcagcgccgcggcttccctccccctgagctccctcagccatgacgcgtcttcctccctgcacacgtccttctgctcgatcccaagcttcctgtgcgcgcgctactcttccttcccatgttactgcgcgctctaccttccctcccatggcgtccatctccctatgcttgccccttcccctgcttctcctccgtggagctccatctccttgcgcggcactccctccagctccttcctctccctctcggttctctgttggccggtgctctactcctcccatccacgacgtgggttctgctccctctgctcggagtctcctacgcgcagctcgccaggctctccctctctcatggcgagcgcctgtgctccctccaccctgctcgcatggccgcgccggctccctccagtcggccgcgcgcccagccaaagtcccctgcgcgcagctcgcgccctgctcgcccctcttctcgccgagtactttccccataaaatttgctcgaccacggtctcgtcaaaccgtgaagcttcctcgccgtgtgctctggcatcggctgtcgccaattttgccataaagttcacgagcactccttgctcagtttgtttcgcagtgggctatttctccacatttcaattccgtgctgcttgccccgtgtgcgctcgctccagactcgatctcgtcgtcattccgtgtgtcatcaagaaatcccaagaatcgggcggattcgtgtcagttgttggaacggtacgtgaattaaccacgtgatgcggagaaccagaattgagttgaccacaagatggtgctgatgaacggaattgaagatggacagacgaaacaagtatcagaacaaaggatggtcgtcaagtgatcgacgtctaacaaacactaacgtactgtttatcccaggtaccttcggactcagaattacgaacatgaagtgcggtcaggacgaagcctgaaccagacgaaggacgggctgattaccaagctccacgaaggatggtgcacagccgaagctgtgcgcagggaagcttcgtcgcgatagcagagaggggaaccgacttaaagatgaaaagactacgtggaccttgtcagatttccataagtcattgacaaatgtaatggacataaatgtaattttacgtgggctgcgtcccgcgtctataaatagatgaacagtactcccgtactgttcacgctgacttggcatttgcttttgcgtcacgcttgtactttttatcttctctcaggaccgaaggtacatttgtaatttgaaatcatttctatttttccatgttaataaaatagaaatgattctatgatgatgcaaaaaaaaaaaaaaaa

SEQ ID NO: 2915 - DNA, 1012 bp, Zea mays
  Clone ID: ZEAMA-23APR03-CLUSTER71_98
atatatatcttattattgctccagcctattgtttagggacatccatgcatacatgtctccatcacagctgtttgttcctatccagtattaggatcaacagagcaagcaatcaaccagaaactaacttagaaaaaccagcgttttggatgagcaatcttgttaatttggtttggttgcagtcgctctgcaacgcgtgtgggatccggtacaggaagaagcggaggcaagagctaggtctcgatagcgccaagaaaccacaacaaaaccagcggccgccgccgccacagcagcagcagcagcaagaggatcactgtccggcaacaagtgcagtcgctgtcagagacaacaccaaaagcagcaggctccaagtggtgaagaaacggagggtcctgatgggagtggaggaggccgcagtcctggtcatggccttgtcctcctcatccagatccacgctgctacatggctaggaactcggcacatcacccaaaaaagggctgctcgttgtgtacatacatatacaggacgcacaaacacaaacaggccacccaggggttccaagccagcgatgtatctgttgggtccatgcttcgtcgccgaaggtcttcaagggagaagcggcttaaaatgtgtgagcaggtattttcggactcgtaccagaaagggaaaagctacaaaggttgacacagcgccgaagctgtgaagcaggaaagcttcggcatgttcgcagaaaagggaaccgacttaaagatgaaaaggccatttagacctcgatagagtgctatagaattatcaccaaatgtaaagggcatgtatgtaattttgtatgggttgtaccccgtgcctataaataggtgaacagtacccccgtactgttcacgttgacttggcatttgcttttgcgtcacacttgtattttcatctccttccaaaccgaaggtacatttataatttgatattgtctctatttctctataatgatataataaagttaaatgaatgatgttatatgatt

SEQ ID NO: 2916 - DNA, 1878 bp, Zea mays
  Clone ID: ZEAMA-23APR03-CLUSTER720_3
ctaatcactagtataaagcaggcggagacagccggcccctctggcctcgctgctcccccttcctccccgtccccacccacatgccctgcctccgccccgccccgccctgcccaaggtgattgattgattggttgcttggttgcttgcttcgtttcacgctttccccttcctttgctgagatccaaaagctgagactcagcttgtcgatccatctgttctgtgcgcctactcgtatcttaggatccatctgtatgttgtttacttgttttcctgattgaatcgcgcattggatgcctggtggttggccttgctcctagtcttttcatttacacgagctttcgacgaagccgcgtctggtctgtctgctccatcacaagagcacgcaaatggttcgatctgccgtgccagatgattgctgcattcagtgggacgtcatgcacatccacgatggattgtagcgtcagcactctgatctttccttgtcgatttgtttgtcgcagctgagttcccccaccccccaacaaacaattactagagtagctgcattggcggggaaattaaagcgctagaagctcagcagcaatggcggagcaggcgggcgccggaaggtactggtgccacatgtgcgccgcggccgttagccccgcggagggcgaggtggagatgaagtgcccgttctgccacagcggcttcctcgaggagatggagaccgcccgcggggccgcgaccgacgacggtgacggcgacggcgcggtggctcaggtgcaccccggcgccgaccgcccgagctccatctgggcgcacgctatcctcagcacggtcgacagctccgcccgtcgccgccgcaaccggcggcagcaggaggccgccagcgacgtctacgactggaacgaccccgagttctcgctgcgccggcggcgcgtcaccgcgttcctgcggctcctgcacgagctccgggaccgccagctgcagcggctggagtccgctgccggcgtcgccctcgaaggcgaccagctgaccccgttcggccggagcctcttcatcggcgcagctggcggcgagcatggcgtggcgctgggcgactacttcctcggccccagcctcgacgccttggtacagcagctcgccgagaacgatgcggcgcggcacggaacgccgccggccaagaaggaggccgtggaggcaatgccgaccgtggaaatcgccggcggcaacgatggcgacgacgcggccagctgcccggtctgcctggaggactacgcggccggcgagcgcgcccgcgagatgccctgcaggcacaggttccacgccaattgcatcgtgccgtggctcgagatgcacagctcctgccctgtctgccggttccagctgccggccaccgacgacaagagctcatgcaacggcggcgacggtggtttcgtcagtgtcgatgcggatcgtgaaggcagtgacaacggcgggggtgatggtagggcaagctctcggggcaatgccgagctagctgaagctgaagagagtggcaggcggttgccgccatccttgcagtggctcaacagcctgttctcgccgtcggcgcagtcctccggtagcggcggcagcagttcgcatcattgggagaactaagcaatattgccatggttgctgccgcttgaaagcttggcccgttggttggtcccaatgtacataggaaggagcaggagcgcatgccgggttggtgccatggaaaaatctggacccttttttctctgatatgtatcatggctgtaaaaaagaacagaaatgggcaaatgtatgaacttgccgcgctcttgcgtgaactgggtgctaatcatcgtcttactactcaattttggtttttattaacaaaactatagtatt

SEQ ID NO: 2917 - DNA, 679 bp, Zea mays
  Clone ID: ZEAMA-23APR03-CLUSTER7210_27
gaaacgcgttgttttcctcttttccccaaggcaaccaaaccatctcgactcgtggggaagattcgctctcgccggcgtcgacgcctagggttcgaggaacgtccgtccgtccgtccggtgaaggagcggtagggaggkyggagatgatcgaggtggtgctcaacgaccgcctggggaagaaggtgcgggtcaagtgcamgggacgacaccatcggcgacctcaagaagctggtggcggcgcagacgggggacgcgccccgagaagatccgcatccagaagtggtacaacatctacaaggaccacatcaccctcaaggactacgaggtccacgacggcatgggcctcgagctctactacaactgagccgccgcccctctctccctctcgtcaggttggtctgaattctgaagtcatgggtgcaattcgcttcgcggtgatctcttaagctcatcacatatataaaagcaacctcagttggctatgtaagacatggcgtgccaaactatcagtgaccactgccagctttgcaatacgttgttgtatggtcaacctgcaaacttggtgtactgctactcgtactataaataacatagggttttaaccttaaaaaaaaaaaaaaaaaaaaaaaaaaaaaaaaaaaaaaaaaaaaattaaaaaaaaaaaaaaaaaaggccccta

SEQ ID NO: 2918 - DNA, 819 bp, Zea mays
  unsure (1)..(819): unsure at all n locations
  Clone ID: ZEAMA-23APR03-CLUSTER7210_29
atcgcttggcgtccgcnttttccccccganaggagagaatcggatgctcttctttgttttgtagccggctcggtcggttcgtcgaagatcccggatctgctctgtcacgaggtctttcggcgggtgttgtctcgcgaggtgtagcgagccaaggtctggtcgcctgttcaggagagtttcgagaagctgaaatggctcctaaagctgctcctgccaagaagggtgatgccaagacccaggccttgaaggttgccaaggctgtgaagtctggggcagccaagaagaagaccaagaagatccgcacgtctgtgacatttcaccgccccacgaccctgaagaaggctagggaccccaagtacccacgaatcagcactaccggaaggaacaagcttgatcagtaccaaattctcaagtacccccttaccacagaatcagcgatgaagaagattgaagataacaacactctggtcttcattgttgacctcaaggcagacaagaagaagatcaaggctgccgtcaagaagatgtatgacatccaggcaaagaaggtcaacaccttgatcaggcctgatgggaagaagaaggcttacgtgaagctgactcccgactatgatgctcttgatgttgccaacaaaatcggcatcatctaagtgctgcattaggcatcctaattcatctgttgtgtcctagttctatgtgaaaccagagttttctagctatggctctcaatcgctccattaccatgtgttatgcacacttctgaatttgatatcatccaagtgaccttttgaacgaaaaaaaaaaaaaaaaaaagcggcc

SEQ ID NO: 2919 - DNA, 1011 bp, Zea mays
  Clone ID: ZEAMA-23APR03-CLUSTER7210_51
taggcttagttttagttaaaatattagtggtgaattatctaggcatacatccagtccacaccctcaacctaccgagttaggctcagttttagttaaacagcgtctcggttgcttgtgcctactgatggcttttcttaaaattatatcaacgacatcttaggttttagaaggtggtgcagttgtcatgactcttagagatcatagtattccttctaatggggatatcaatgaaagtaaagtttcttatttgttattattatattcttgttggtgcagcctgaaaatgaaaagccaattactgaaagcggagatgaaatctcttatgaaagagcaaaggcaaaaagtccaatatctttattatcgggactacgaaggagatcaatagcccatgctaagtttggatcaagtcattacgagagaaaggaatttattggagcacctataaaattggatgtggaagctcatgctcgcattcagaagcatagtgactgcatctaaactgtgagatgtgtgcaagattgggtttgttgtatttggagttcctcatagaaaaatcatacatatgctctagagttcctcatagatttggtgctcgcgatctgccatggatttgatttaagatttgggagatcggtcgtgttcgcgctgcgagattcgattttttatgcatgttttattcacgagattgcaagaacgggactgctaggcaagatgagtatacctgaaatttaggtctagaaattcactgctatcagtctcagaataggctaggttgaacttatacatgagatctccacaggtccaggtgcattgtttgaatttgattagaagtgtgtaatgttagttcttataaaaaagcaactcaaaaagggccaaagtttggatgtaccttctgggttattgacgcagatatctttatcactatatgtgcttggtttgctcagtggcacatttaatctagagaatttcagtctccctctataaaatggtggagcaaaaaaagaaaaaaaa

SEQ ID NO: 2920 - DNA, 1748 bp, Zea mays
  unsure (1)..(1748): unsure at all n locations
  Clone ID: ZEAMA-23APR03-CLUSTER7210_58
gaaaaaaaaaaaaaaaaaagcttctcgggccggtttttttttttttttttattttttttttttttttttttttttttttttgactgattcataatttcacgtgtacatctatatttacaaggattcagtcaaggttctgatgaaaagcagtaggtcaaatcgatagacgacagattttgagaaatcatcggctaatctgacggatggatggcattccaattgccaactctaaaggctaaaccaacaagtctctcctacccgntacggcgtcgcatcccacggcgcagtgacgaacggattcaagtaaccttcgaaattcctcggcctggcgccggcggcggcgttgtcgtcgtcgtcgaacaccacccactccgttgtgaccactgtcttcgaggccggtggggtttcctccacggcgaccaacgccttcatttgtttgtcctcgcggctttcctcaacgacgtggttcatgatgatcttctcgagatccctgatgtcatcgtccgcgacgcgctccacggccggaaattcggcggcgttgagcacgcccaagctctggcacaactcaaagtacgatgacagctgcgcgctctgctccgcggcatttttcagtacccgcatcccctgcactgccctccgccgcctcgctgccgccaacgtctctcccggccgtggccgtggcgtcatcggggccgagccgagaacggcgacgaggaaccgggcaatgcccgtgcatatctcgctgtagacctcgaagatctcgataacgacgcagtccatcgcctcgaagatgaggcccagctccatgccgtccccgtacggtcggatttgcaggagcaggtgcagcaggtgctgctgcttggtcacgtgatccagcctcgcgtcctcgccgtcggtctcgcccgtgtcggcgacggcatctagatcctgggcgatgaagagggagcgggtgtcgaggaagcggaagtaggcgcgcacgaaggcggagaagcccgacgatttggacggcggcgacgagcggtcgcggaagtcagcgaggtcgaagggaatgcggccgaggcgcaccgagcgtggcgcgaggtcgggccgcagaagtaggccgtgcgcaagcatgagcgccttgagcgccacggcccagcaccgggtccgcccggcgcggcgtgccagcgcccacatgagcggctgcaccgacaccggcgacgcgcgcgccagggcgaagacccgcgccgcattcccgtagtctacagaccgctcgtcatggctagtcgcgcggatcacggccgcctccagctcggggctccacagcaccgccgcggccaccccggaggccggccgtggtcgcagtgccgccacgcgtctcaggtacaagctcctcctgtccttgactgccgccgtggcgcgccgccaccactgccgcgcggtcgtcatctcctgaccgtggacgctggcgtcaccaccttccctggcgccggcgagctcgaggcgccccgggaagatcaaatccacgacggttgccagctccgagccacgccggaagcgttcgtggccgctcgagcttttggcagaggatgaaagctccaagaaacaatgttatcaggccaacggaactaactggacggcatgggatgggacgaagagaaacgaagcgccaagaacgtggcaggcagtaacgtgggggtcggaggggagagaaaggaggtgagagtagacgtgggagggacagaggtggaggactggaggtggacggt

SEQ ID NO: 2921 - DNA, 1829 bp, Zea mays
  Clone ID: ZEAMA-23APR03-CLUSTER7210_62
agccgtcatcgcttcacgtccgctacagaccggcgaggagacgaaaggtaagccacccactgccgccgctctcgtttcaccccatttcgtccggccgtctaattcgttggccggcccgttctgttcgtggaagcgctcggatctgctctgtatatgcttgttctcgttcggttttgccggtcggagttgtctcgcgaggcgtagcttgtgcgtcaggctctcttttgccttgtagatttcctgcatctgctcttactgatagcttttgctgttaatcttgagagagttatgccacgagtctctttgatattctattggggtaatgatatgtggggatactgtaatgtttctgatattcttgctatggttggtttgggcatgaagtagaatttgtaatggtgcttttaggatcctgtttttggtgctaactctgtcaacactagactgagaattgttgttaacaagtagctttcatgttgcacgacaagatccttctgtgtttcattccagttctcatgattttatttcttttttgcatcttcatccgcctgacataatggtctttatctacttgcaattcaggagggagttttgagaagctcaaatggctcctaaaggtacatgcctgatgttgcatatctatttctatgtttgccacacttgatcagtacatgcactgtgccagcctttaaattgctgtaaattgagtgctcagtgttaggtagttcctacttcctttgcaggtgtgtcgccattgttgaattgtatcaggtattaattggtaattggtacatttttagcactctgatataaccactacctgtcctttgcactcgttccttgacccatgggagtcgtcccaaaagggagagtatataattggctgactctaattaccatattgtctcatgaatactgctaggatctctaatgcaatcatatcaatttattggtaggctgtatattgttgggcataaccagtaatcaccatgctaaacttcatgaactatttgatttgataggcttactgtaagtatgcatgacctgactattttgttgtttgattagccgctcctgccaagaagggtgatgccaaggcccaggccttgaaggtggccaaggctgtgaagtctggggcaggcaagaagaagaccaagaagattcgcacatctgtaacatttcaccagcccaagaccctgaagaaggccagggacccgaagtacccaagaatcagcactactggaagaaacaagcttgatcagtaccaaattctcaagtaccccctcaccacagaatctgcaatgaagaagattgaagataacaacactctggtctttattgttgacctcaaggcagacaagaaaaagatcaaggctgcggtcaagaagatgtatgacattcaagcaaagaaggtcaacaccctgatcaggttagcgctttgctccagtgttattttttgtgcataatttgttattttgtgcaactgagtgattcttgatgtgtccatgcaggcctgatgggaagaagaaggcttatgtgaaactgacacccgactacgatgcccttgatgtggccaacaaaattggcatcatctaagttaataggcaactggattcgacatctgtgtcctactagttctgagcataccaacagatttttctatgttactagtaattttgtttgtcatatttggtttttttgcaactaagtcttgttcgcagttgcagactacatatgcctgtattgagatcctggttgccaaattaaccatcttgaactggcattattccactttacgtataatggctgaatctgttgtggcgttgtgc

SEQ ID NO: 2922 - DNA, 1592 bp, Zea mays
  Clone ID: ZEAMA-23APR03-CLUSTER7210_69
aatacaaagtagtaggtcaaatccatagacgacaaatttcgagtaatttttggctaaaagtccgacggatcagatggcgctccaatttccatctcagctaccaaacacacgctaaaccaataagtctctgctacacgctacggtgtcccaaggcgcggccatgaacggattcatgtaactacctaaagacctcggcctggcgccggcggcgtcattgtcgtcgtcgtcgaacaccacccactcttttgtcaccactgtcttggaagctagtcgggtttcctccacggcgacaagcgccttcgtttctttctccacgtccttgccgcgttcttcgacgacgtggttcatgatgatcttctcgaggtccctgatgtcatcgtccgagacacgctccacggccggaaactcggcggcgttgagtacgcccaggtcccggcacagctccaagtacgacgacagctgcgcgctctgctctgcggccttcctcagcacccgcatcccctgcactcccctgcgccgcctcgctgccgccagcgtctctcccggccgtgcccgtggcgtcgtcggggccgacccgagaacggcgacgaggaaccgggcaatgcccgtgcatatttggctgttgacctcgaagatctcgatgacgacgcagtccatcgcctccagaatgaggccctgctgcacgccgtccccgtacggccggatctgcatgagcaagtccagcaggtgctgcagcttggtcacgctgtccagccgcgcgtcctcgccgtcggcctcgccgctgttggcggcgtctagctcctgggcggtgaagagggagcgagtgtcgaggaagcgaaagtaggcgcgcacgaaggcggagaagcccgacgatttggacggcggcgacgagcggtcgcggaagtcggcgaggtcaaaggggacgcggccgaggcgcgccgcgcgtggcgcaacgtcggaccgcaggagcaggccatgcgcgagcacgagcgctttaagcgccacggcccagcaccgggtccgccgtgcgcggcgcgctagcgcccacatgagcggctgaagcgacggcggcgacgcgcgcgccagtgcgaacacccgtgccgcgctcccgtggtccacggatcgctcgtcgtggctggtcgcgcggatcacggccgcctccagcttcgggctcctcagcgcgggcgtggccaccccggagactggccgtggccgcaacgccaccacacgcgtcaggtacaggctcctcctgtccttgacggccgccgctgcgcgccgccaccactgccgcgccgtcgtcatcttctgaccgccggcgcagcgccaccacctggcgtcaccgccttccccggcgccgctatgctcgaggcgcccagggaagatcaaatccacgacggttgccagctccacgccacgccacaagcgttcttggccgctggaacttctggcagagatgaaatctcgaagaaacaaagttgtcaggccaaggaaattaacagctgaacggcatgggatggcaggaagagaaacgatgcgccaagaacgtgtgaggcagtttttcgattaggatgttctaggtaatggtctcgtgc

SEQ ID NO: 2923 - DNA, 1520 bp, Zea mays
  Clone ID: ZEAMA-23APR03-CLUSTER7210_70
agtcgtcatcgcttggcgtccgcctcagcccgccgccaggagaggtaagctacccacagccgccgccgctgcctactcccgccccatctctcccccgtcctgccgtcgtgctcttagccttcagaatcggatgctcttctttgttttgtagccggctcggtcggttcgtcgaagatcccggatctgctctgtcacgaggtctttcggcgggtgttgtctcgcgaggtgtagcgagccaaggtctggtcgcctggtagatttcctgtatctgctcatatcggtagcttttgcttttaatcgtgagaatgttttgtggggagtcttttcgaccttagtacgctgatcccatcggggtaatgatatgtatggaatacggatgctgcctaggtttctaatattcttgctatggttgatttgggcatgacgttgatttagtaatggtatttctatgattatgttttttgttctaactttgggttaacgttagacagtgaactctaatctgcacatacggttagagctagaccgagagctgttgttaatcagtagctattcatgtagatgacatcattcttctttggttccctgcatttttcatgattttctattttcttctttgcttcttcacccatctgacattgtggtcttcattctctgtttccagttcaggagagtttcgagaagctgaaatggctcctaaagctgctcctgccaagaagggtgatgccaagacccaggccttgaaggttgccaaggctgtgaagtctgggtcagtaaaaaagaccaagaagatccgcacgtccgtgacatttcaccgccccaagaccctgaagaaggctagggaccccaagtacccaagaatcagcactaccggaaggaacaagcttgatcagtaccaaattctcaagtatcccctcaccacagaatcggcgatgaagaagattgaagataacaacactctggtcttcattgtcgacctcaaggcagacaagaagaagatcaaggctgctgtcaagaagatgtatgacattcaggccaagaaggtcaacaccctgatcagacctgatggaaagaagaaggcttacgtgaagcttacgcctgactatgatgctcttgatgtggccaacaaaatcggcatcatctaaagttactgcgtcaggcatctgctgtgctctatttccatgtgaaaccagagtttttgtagctatggctcagtggctccatgaccatgtcttatgcacacttacgaatttgatatcatccaagtcacaggttgtgctcatcaatacttggataccatcacttattcgtattgggttggtctttggctctcacatttcttcgtattgggttggtctttggaaattgggcctgatagctgtttggagtatagtgtatggatctgcgttcataatgcgagcagcagcgcatggaaattggttaaaaaaaaaaaaaaaaaaaaaaaaaaaaaaaaaaaaaaaaaaaaaaaaaaaaaaaaaaaarggaaaaaaaaaaaaaaa

SEQ ID NO: 2924 - DNA, 1831 bp, Zea mays
  unsure (1)..(1831): unsure at all n locations
  Clone ID: ZEAMA-23APR03-CLUSTER7210_82
ttttttttttttttttagcaagcaacaccacgatcgcattcacagccagccgtcatcgtttcgcgtccgcctcagcccgccgcaaggggaggtaagttcatgagacaccttcgagaagctgaaatggctcctaaagctgctcctgccaagaagggtgatgccaagacccaggccttgaaggttgccaaggctgtgaagtctggggcagccaagaagaccaagaagatccgcacatctgtgacatttcaccgccccacgaccctgaagaaggctagggaccccaagtacccacgaatcagcactaccggaaggaacaagcttgatcagtaccaaattctcaagtacccccttaccacagaatcagcgatgaagaagattgaagataacaacactcgtcttcattgttgacctcaaggcagacaagaagaagatcaaggctgccgtcaagaagatgtatgacatccaggcaaagaaagtcaacaccttgatcaggcctgatgggaagaagaaggcttacgtgaagctgactcccgactatgatgctcttgatgtggccaacaaaattggcatcatctaagtgctggcattaggcatctgttgtttcctagttcatctgttgtgtcctagttctatgtgaaaccagagttttgtagctatggctctcaatcgttccattaccatgtgttatgcacacttctgaatttgatatcatccaagtgaccggttgaactataaaaaaaaaaaaaaaacggcacgagaagcgcttctcgtgccgttttttttttttttttttattttttttttttttttttttttttttttttttttttttttttttttngattctgtacaatggaaacgtttttattgtagctgctcaacagtagggtgcagtttgaactcataaataacgttacaacagcgcatttggtgatctaatggtagcttagcagacaacagttacacatacatggttgcaagtgcagcaagaaacacagcgacgaatacagtgcctgcagccacgtctctggagcttgtcgcgcctgctgcatgcagtagttccggtagcttcgatgcggtgcctgccggtgccattgcagtggcagaatcatctgatgttggtgccggcggtgctcctgacgcgtctggaacagcagcggcaggcgcgcccgtcgacggttcagctgccggagtcgtcgtcgtagacacaggcgaagtgtctcccgccggcggcttggagccctcgccggcggcgccggcatcgcatgggctgggcaggtcgcagacgttggggatcatgccctgcgcctggccgaggaacacgccgatggggctgggcgcgagcttggatgcggcgcagatgcacggcgcctgggcctggaggaagccccggagctgggagcagcaggaggcgagcgtcgccgagccgacgccgaagacgtagccgatgcacggggacaggctgagcggcgccggcgggcagctgggcatggccgggaacgatgctgccgtctgctgggctgaggacagcgtcgttgccgccgccgtgacgacgacgagggcgagagtcacctggagccaccgcccggccatggccgatgaatagtggtgactggcggtggggttttcggcgattacacgtacgagacgaggacgaagaggcgaccgtagtttataccgcaggttgttgggaattttttttgggggcgtggggcggtatcagtatggagcgaaagatttgtgtgcctcaccccaggtggatgggccggtctatctaaactcgctttggtactgtgtctgaggcgaatgcgaccttgtgtgtgttcttttt

SEQ ID NO: 2925 - DNA, 1394 bp, Zea mays
  Clone ID: ZEAMA-23APR03-CLUSTER7211_3
aaacgagcgagcatcctccatgtccaggccgctctcttccttctgcctccaccggatcaggtccggcggcaccgcgtccaccgccgcgcctccatcgatatgcgccaacaaggacgacggcggcggcggcggcggcggagagagcaggtccctaaaggatggcaagcaaaaggacgagtgggaggaggctaacgagaagggcagcgcagaggcccgtcgtccgtgggtaggaacggagatggtggatgcggcggaccggacaggcggcgaggcagacggcccgctacggcgctcgcagtgggcgctgtcgcacgccgtccggtcctattgcgaacgacggatggttcctgctcgacgtcgccagcggcaaaaaccgtacgtgcgtaaactacgagtgaccaaacaccatgcagactaagtcgtgccggttacgggacaggctgcggcgcctacatggagccagacggagctggctcgccccggtgtttgtcgcgtggtagtctctacccctgaccgcgcagccgagcatgtctgggctccacttgggagccggagagggaggagctgccatgccttgccccccccgctctgcgtgtcacttttggctgcccagagggctcctacactgatcccaaggtgcggggacatactttgtggtcggcgggcgaggtaaacgagggcgatttcgctcctcgtcgtggggcagaagaagcggtccgtcacgtggcggagatggggagccctctgggcgggtggccgtcatacaacccgcacaacttcagccagttggtccctgccgacccctccgcgcagccctcgaatgtcacaccagccacttatgttgcgacccacaggacagatccgccacccaatcaagtgataaccacggaggccaggaacatcctgctgaggcacttgtaccagaaatccgaggagaagctgaggccaaagagagctgcgccgaacaacctcgctccggagaacaacaacaagaagaagcagcccaggggacctgtgggcgacgtcgggggccagtcgagcgcaagaagctgaagacgcacagctggtggccgtcctcccctgcttctcatctatcggtgtcatgcagcctgcatctctcactcacagctgagctggtagctggtggtggttgccctcccctcccctgtgcgtcctcttcgcctctcacgtctcgtatgtacgtatggtatgactcggagagctagtttgcatacaatggaaaaaaaaaaaaaaaaaagcttatcgataccgtctggtggtggttgccctcccctcccctgtgcgtcctcttcgcctctcacgtctcgtatgtacgtatggtatgaccagaagagctagtttgcatacaatggatatactggatgtgcatagcc

SEQ ID NO: 2926 - DNA, 1367 bp, Zea mays
  Clone ID: ZEAMA-23APR03-CLUSTER7216_1
accacggggtcctcgtggtacgtctctgttcgtcatgtgcctggcaccctacgtacgtacatactggttctatggcccaaccgtttcatgtgccggaggtcctgcaggacggcatgtcatggttgctggcctcgccggaggagtcgctgccgttcatcctcgccgaccgcggcttcgacgtctggatcgccaacaacaggggcacgcgctggagccgccgccacgtctcgctcgacccctccagccggctctactggaactggtcctgggatgacctggtagtcaacgacctgccggccatggtcgacttcgtcgtcaaacagaccggccagaagcctcactacgtcggacactccatggggacgctggtggcgctggcggccttctcggagggccgggtggtgagccagctgaaatccgcggcgctgctcacgccggtggcctacctcgcccacatcaccacccccatcggcatcctgctggccaaggcgttcgtcggcgaggtgctctcggacttcctcggcatggccgagttcgacccgctagcgccgccggtgacgaacctcatcagggcgttctgccgccgcccgggcatgagctgctacgacctcgtcggctccatcaccggcaagaactactgcctcaacagctccgccgtcgacgtcttcctcaagtacgagccccagccgacctccaccaaaaccatggtccacttcgctcaaaccgtgcgcgacggcgtgctgaccaagtacgactacgtgctgccggagcggaacatcgccagctacggccaggccgagccgccggtgtaccggatgtccggcatcccgccgagcttcccgctcttcctcagctacggcggccgggactcgctcgccgaccccgccgacgtgcgcctcctcctgcaggacctcccgggccacgaccaggacaagctcacggtgcagtacctggacaagttcgcgcacctcgacttcatcatcggcgtctgcgccaaggactacgtctacaaggacatgatcgacttcctaaaccgcttcaactagtactagcatatatatttgcttcaatcggtgtcgtcttcagccccagcaggattagacaaaaaaagggggggacactgcagctcgtaaacgttgtccatacagattatcagaggtgaaaaccatacatgatgtaatttagcattagatagttaaaacatggagctgcctcagtatggaggattgtcaactactctccatcacagcagtaggtgtgatgtagaagagtgattgtcacactgtgtgtgttgcaaatttgcaacacagtgattactaatataaaaaatactcttgagttaacctttggcaaaaaaaaaaaaaaaa

SEQ ID NO: 2927 - DNA, 1097 bp, Zea mays
  unsure (1)..(1097): unsure at all n locations
  Clone ID: ZEAMA-23APR03-CLUSTER7233_3
cccgttgctcgtcgtcgtcctctgcatccgtcccctatttatccgtcccctcctctcccgcactagctcccaagttccatcccatcccgccacgaaattctccacgctccgatccaatcgcaacaatgaagttcggcaagagcctcaacaaccagatcgtggagacgctcccggactggcgcgacaagttcctgtcctacaaggacctcaagaagcggctgaagcagatcggcgccggctctggcgagcggcggagcaagcgccagcgggtgggggacgggcgcggcggatcctcgccgcctgcgatgaccccggaggaggccggattcgtcgcgctcctcgacgccgagctcgacaagttcaacgccttcttcctcgagaaggaggaggactacgtcatccggctgaagggctggtcaagatcctcaagaagtacgacaagaggaccggcgcgctgatccgcctgcccttcatccggaacgtgatgcagganccgttctgcgccaccgacgtgctgtacaagctcgtcaaggggtgcgaggagatgctggaccagntcctcctgccccggaaccagcagcggcccgtgccgagcgacaacggcggggaaggagacagcgacggcgacgacgacaagcaacgaccggcggagccaggcgcctcatcgctgcccancggcggcggcggtggcgctggcgacatggagctggaggagatcgaggacatggagagcatgtacatgaagagtacggtggccgcgctcagggcgctcagggagatcaggagcgggagctccacggtgagcgcgttctccctgccgccactacggtgattgacacgttgtgttcggttcagtagcgaagcgagacagaacggggccgactgcgctgttgctgtaggtagtgtttggttcaaagaagacacgaacaaaatgaaagaaaatctgtaaaatgatagtaatattcatctagtattctcaatctcactgctcccacaaaacttaaggggtgcatcgaatgcacaagtgacctccgctctacaaatcaatttctcgctgcctgtttctgatccaactcccgccgcgaaaattgccttgc

SEQ ID NO: 2928 - DNA, 1108 bp, Zea mays
  Clone ID: ZEAMA-23APR03-CLUSTER7239_1
ttttttttttttttttaggaagaaaaaacgtggagtaaaattgtgaaactggaactagaaatgtcacccattgaaaactaccgatggagatcggagtgagggctctctgactctgagtagaggcaccaaaagaactagagcgtccaactcacaagaactgaaaagtacactagacttcattattcagaacacgtacacctgaaaacccccttccagaagatgaaggccgcctcgaacaagcatgcaaaatctatgttcataggaattttgtggggaaaactctcgcattctagacgacgaacaagcatcaagcacgcaggctactagctgcagtcttgtaaaggtcgtcgccacgtcccagcagcgtcgctgctgctgacgacacggacggttcgggcttcttctttgttagttaacgggcgcgcggttatttactgctagcaggagcagcagtagtgattttgtgtctgtaagcaggagctgggctcgcggcgaggctaccgacgctcttgcgccacttccacgagtcggctggcgtgctgggcagcggcggcagcgggaggaaggccggccgcggccgacggcacagcccgaacggccacccctcgcagtcccggaagcgctcccaggcctcgggcgaccgcagcgtcggcgggggcgggtctgtcagcatgcacgccgacgacgccacggtcgccgcccggctcgtgctgcgcgtgaagaagctcttcacggagaagaacgcctcgctctcgtcgtccgcgtcgcagtcccccccgtcggctgcctcctcctcctgctcctcctccgcggccgttccctccaccacgacgcacgtgcacgtcttgggacttgacaccgtgtcgaggacggttcttggatcgagcggggtgtacgaccaggcgaaagcagagctcgacgacagaggcagcgtcggcgagtccacgtccacgccgcacctggaccgcctcttcatctgccggctcctcatctcgtggaggatcacctgcgcaagaacgtgacgggtgcagcgcttttagcgaaccgcgtgaacggaccgagaactgggaccgggggctacgcgcaacgtatatataccaatcttatt

SEQ ID NO: 2929 - DNA, 2074 bp, Zea mays
  Clone ID: ZEAMA-23APR03-CLUSTER7267_6
acacacgatccttcctaccggtcgaatcctagctctgatctagcagtgctccactttcatttcagtccggaaccacgaattctgccaaactacgagaatgtaccgagaatgaaggagtgtatactagtctagcaccaaagcgaccgagccgcggatttcacccctgcctttccttctccccgtgtccaggccctggtgcccgcgcgttcccgtgcggcaactggccgccgccgccgcactacgccaggtgcccaattcctcgtcgggtcctccgccggcgacgagcacccaccagaaaactggactggactctacatgtcaagacagtatggcgccaggaagcaaggcggagaggaaagcagcactagacgctggcgcatggatgttcaatgtcgtcacatccgttggtatcatcatggtcaacaaggccttaatggcgactcatggttttagtttcgctacaacgttgactggacttcattttgcgatgacgaccttgatgacattagtaatgaaatggctgggatatattcagccgtcctatctaccgttacctgaactagtaaaattcgccttttttgcgaacctgtctattgttgggatgaatgtaagcttgatgtggaactctgttggattctatcagatcgcaaagctgtgtatcattccagtcttatgcattctggaaatcatgttcgacaaagtccgttactctagagatacaaagctcagtatagtgcttgtccttgtaggtgttgctgtatgcacagtcactgatgttagtgtgaactctcaagggttactagctgcagtaatagctgtttggagcacagcactacagcagcattatgttcaccaccttcaatggaagtactcgcttggctcattcaacctcttaggccatactgctccagcccaggcagcatcattattagtattgggcccttttgtggacttctggctgaccaacaaaagagttgatgcttttaactacacatcaatagttacgttctttatcgtgttgtcgtgcataattgctgtcgggaccaacctaagccagttcatatgcatcggaagattcacggccgtctcgttccaagtcctaggccacatgaagacggttctcgtgttgaccctggggttctttttctttgggaaagagggtctcaatttccacgtcgcccttggcatgtttctggcagtgatcggcatgatctggtatgggaatgcctcctcgaaacctggagggaaagagcgccaggtttactccacaccgagtgagaaaactcagaagcatggggtgctgtcatcccaatccgagctcgatcagaaggtctgaaatgagacacgcaaaggaatccggtgcttgttgaacattgatcgacctggtttttttatatatacttcttttttttttgagggagatgtttgtttctatagaattgtaggccatagcagaaaatgggtacccagcggcctgcgcctgacattagcagccgggaaccggccacgttccacgatacaaggaactgtttcgttgtaattgctctcccagagtgtgaaattctccaaaggtatcgtatcaccttctttattccaaaaaaaaaaaaaaaaaaaaaaaaaaaaaaaaaaaaaaaaaaaaaaaaaaaaaaaaaaaaaaaaaaaaacctctcccaagtccatagttcattccgaatcaattcaatgtttagtgagagagtaacttgtgttcattttagctcttgtgcttggattgcttctttttctcattctttcttgtgatcatatcaacttgtaaccgactcaatacacatcctattgtgtgctggtacttccgtgcattttctatcccttctcccttaaaaaatggtctccccccatagtacttttttttttttttatttttattttttttttctataagaatactatagattctattaatacatagattgaaatattctacatataaggaaggtaaaacagattgaataaagaaaaaagaatccgtgatttgaatgcccgcgtactctgcgttgttccactcttaaggacgaatccagcacactgcggccgt

SEQ ID NO: 2930 - DNA, 837 bp, Zea mays
  Clone ID: ZEAMA-23APR03-CLUSTER728_7
gcacgagaccattacctagaacatcctaatcgaaaaacaccaagaatcacatcacacagcgaaccgagaaaccaacacaacaagcaaagcagcgatccgacatccgagagatggacgcggtgatgttcgggctggagactcccctgatggcggcgctgcagcacctgctggacgtgcccgacggcgacgccggcgcgggcgacaacaagacgggcggcggcggcggcgccacgcgcacctatgtccgcgacgcgcgcgccatggcggccaccccggccgacgtgaaggagctgcccggctcgtacgcgttcgtggtggacatgccggggctgggcacgggcgacatccgggtgcaggtggaggacgagcgggtgctggtggtcagcggcgagcggcgccgggaggagcgcgaggacgacgccaagtacccacgcgtccggcggcggatgggcaagttcatgcgcaagttcgtgctgccggacaacgccgacgtcgacaaggtcgccgccgtgtgcagggacggcgtgctcacggtgaccgtcgagaagctgcccccgccggagcccaagaagcccaagaccatcgaggtcaaggtcgcctgagggagcaagcagtagctgtgcttctgaaactttgtgtgtttgtgtttgcttccttctttggtatcaccaatcatcctatctgatatatcgactggggtttttgctgtctccatagaataaatctctacatgtctcttgtaaccttttctggtgaagatcgtgtcgcgatgaatctataagttaccgtttgttttctttcgaaaaacaaaatagatgataggggaggggggggggg

SEQ ID NO: 2931 - DNA, 1320 bp, Zea mays
  unsure (1)..(1320): unsure at all n locations
  Clone ID: ZEAMA-23APR03-CLUSTER7300_3
ttttgcagctgcaacagtgctctctctgtggcagccgaacaagctgagaatccaccaagccacggcgtcaccgccagcgccactgccatctcggggaaggaaccgaaccgacccctgaaaagaattcggtgcgtcggaaggaagagcaaccctgcggtggtggagcgaggacccgggttgagggatgtggtgggagggcgacggtggtgaggcgccgcgggaggagactcctgtcgacttcgatttcatcgccctcctcgccaagcccaaggattactataagatactggaagtagattactatgcgtctgaggagacgatcaggtccagctatatccgccttgcactgaaatggcaccctgacaagaagcaggggcagggcgaagagaattcaacctccaaatttcaggaaattaacgaggcataccaagttctgtgtaatccagcaaaaaggcaagagtatgacaaaaaaggcattctatatgttcaagatcagaatgtagtggattacctgaaccggcacaaggggctaatacttacgtgcaatggtcttggtataaggtactcagtatggtgaacacgctcaagggcccacagtttgcactcatctgcagtcttggagaatctgtagtgtatgccatcaaaatttattttcatcccttgtgtgccatagaatggcatatatggattttttgtgtgtatgacaggtggggccagtggcacacaagggatgaaaataatttccgatggcattacagggaagcccttgatctgaaaatggtatagtgcagcantgccatgtttgaaagccaaagattgacaacttgagttcatcctacaaggctncaacaganttgatttttatttgtcgatcagctgttgttgaatgaaaaaggcagatatgtttcacatgctccttgtgtgtaacatactgctcctagccgttcaatgtaagcgtttgtatgtgtcagtgaaagtgaatgaaaacaatggagacatagtctataaaaaagtaaggtgccgtttggttcacgaaatgtaacgtaaatggtaatggtaacgattcacactcgaataccggcagtaacaaatttgaataagactatccatttgtagtgtggtatcgattacagttaaacttaaacaaacatgatttaatgttatgagttacccattacgttaccaaaatttgaaccaaacggcacctaaattgctgaggacaacccactaataactttaggatcacatagtaatacttcgaaaaataacaagtttgtaagggcttaaggcaatcaattaagtaagacacgcagacatagt

SEQ ID NO: 2932 - DNA, 1524 bp, Zea mays
  unsure (1)..(1524): unsure at all n locations
  Clone ID: ZEAMA-23APR03-CLUSTER7321_1
tcagacggatcagggtgagacctcaggttcgggaanntcatncatnttctgngncnccngcccaagntnnncntgnantctgcctnnagntcaccnntnaagccacagaaagcagntatcttcaatccnatncantgcacattctgtggtgagggngcacttgaggangaggcncngatcaacanctgnttcangncagtagtgctgagncctnngcaccnnggtncccgagcccnacccngggncgncgcctnctnaaannntanagnngcgcgnacgttctntgntccgcncgtgccggccacggcggtctcngcgtncgctacgncctcacacgnncggcagcgcgncgaccncgccggcgcnggagccgttcgtgcccggctaccggcgggcggagatcgcccatggggggcgggggtcggcgagatgcgtgtattttttttttttttttcgctcaatgatcctctagcatgcttatacttacggcaaaaatgtaccggactatcgtattcgacaaccatcacattttttttggagatgacatttcaaaaagaccaaaaactatgatcgatctctcatgatccatctgctactctttgggtatcaatgcctcatcagcttatcgtttccttgcaccttccgtgcagctctgcccacagcacgccttaaccagttgcaactcaggacgcgttgtcgctccggagcttgaggatggcggcgtacatcttcctcctggagccaacagccccaatgcccatgtccttgaggtcctccagcgtgagcatggggagcacctcgtcgtccacctcatggatctcaaagacgggcgcgtaccgagaaagccccaacccatcgagccaggccttgacgccgccataccccgtcgcggagggaaggcgaccgttggggaggccccagtccgccaccccgtccgactcgtcgccgctggcgtcgcggctgcccgaaaccctagccctcgcggcggcggcggccgcggagtcggactggtcctcgtcgtcgtagtatcgctcctcgtcgtcgtcgtagccctcggcgggccccgccgaagcgggcgcggcgggaatccacgcggtccgcgggcggcgctgcgccggcggcttgggcccccggcggctgtgcgcgtgcgggtcgaggtcgtccgggtgcgcgcggcgcggcgggcgcgggtgcgacgaggacggcggcttgtggttgcggcgcgggggcggagcgtcgatgtccccgaggcggacgctggggcggcggcgtcgcttggagtagggcggcgcgggcggctgtggtccgcccgtggcggccatggcggtctctgcggccgctacggcctccacggccggcagcgcggcgaccacgccggcgctggagccgttcgtgcccggctccggcgggcggagatcggccatggggggcgggggtcggcgagatgcgtgtaatccgcaggctctctcggtctcggcagcttctggagtgggattgtgggaatagaacgtcagcttgaatcga

SEQ ID NO: 2933 - DNA, 1140 bp, Zea mays
  Clone ID: ZEAMA-23APR03-CLUSTER7387_1
gcacgagaccattacctagaacatcctaatcgaaaaataacgcaagcaaagcctctgctgcgtgctctgctcctatctctcctccatttgctgccgcagctctccgagctcgccgccgccgcctcagcgcaggcgcagcacagcacagattcggagagcctgcccttagcacgcagcgccagtgaagaaggccgagataatggaggtggagacgatgctggacgacgacgtgttcttcgccgagctcagcaagcggatatcgctgctcatcaccgacgacgacgagggcgcggacttctccgccgcgcagttcatccccgccgccgccgccgccgccgcgcccctccaggggttcgcgtcgcgcgcccatgtgccgtcgcaggcgtcgctgctggcgccaccggcctacgcgctgtaccactaccaccacggcgccagctacggcggggacgacagcgccagggcggcgtggcagcagctgcagtgcggcagcaagggcaccggcgtgttcatcccacggtccacgcccgggtccgcgcaccccaagaagaagggcaagagccggggcgccgccgccaaggccgcgcggccggccggcgcgggcgcaccgcccaggaagcgcgtctgatctccgcttctctgcatcgtgatttaatggatcagcaaggagaaaaaaaagaagaagaaaaaggaggggcaaaaaaaagagcaccagaactacgaactaaccccagatgcagcgctcgtcggaaccagccggattagctatgtttaattaatcattaaattttcagtgttgctgtcattcttatatggtaaataataaaaaaaccatagctactccccccctgggttaaaatgtataatgtgagccctaggggatcaggctgtgggctggggcaccaccgcaccaataatctctatgtgtgtatagtaaaagctagcggttggtggtgtcgtagttttcctggctaagtcgatttattaattatttctttgtatttcctttcttcccacatttttgtaagatgaagaaatgaattgtgctattggtgtaccactactatactagagcatagtgcagtgctaaaagaggatgagaatgtccaatgtgcaatgattagtgtactagtaactttt

SEQ ID NO: 2934 - DNA, 1139 bp, Zea mays
  Clone ID: ZEAMA-23APR03-CLUSTER7392_5
ccaggatgacaaaaatttcccactccactcgaattaaaaccccagcggcaaaaccttccgctctgtgccgccgtcgcctgctcccgtcccgccaccacatccgcccaggagctcaccgtcggggaggctgctcgaggagccgcgctgtctctcccgtgccgcgaccttcgccctcgccgccgccatgatctgcacgatctccggcgaggtgccggacgagccggtggtgtcgaagaagtcggggcttctcttcgagcggcggctcatcgagcgctacattgaggaccatggcaagtgccccatcaccaaggaggagcttactatggatgatatcgtgccggtcaagaccaacaagacaaattacttccccatttcaaaggtcactcaaaaacaaggattggagtacttcgtcagcaaacaagatttgatcagcagtttccatagggtagtcagtctagagagaatcttgaacggcatgttttgatggactataagagtatgcttggaagatattgccatgtggaactccaacgtcgtcaatgggccaaggactaccctacacctcgctgtgacaagctaagggagctgtctgtggcgcagaatgtgcatatgccatcagtttgatctcccattttcatcatggaagaatatcgctcatatttgcaggtgaaacgtaggaatcgtttggagcaaaacgaacagagtatggtatctagtcggtctggttgacaaatgtctaactggacagtagtgctcccttgtgttatagttgtagaattatatttgtttataattcacaaatctatatgtgtctgcgcaattggtacagttgtgaaccagtaagccagagcataaaaggcttgtttacatgaagagatacatggctggtgaccaaccggttgaagttgcggttcacgttgatgcagatgcagcacgcccgacacctcacacctccgaactccgatgttgctgctgatgcccgcactgtactgtaaacaatctttcaaaggcaaatggaactgtgggatacatgtggcagtgtggcacttcgatgatgtgctctgttaaatatttttttaggaaacaatatgctcattcctactgtttttatatactaacatatagtatgtgttaacgct

SEQ ID NO: 2935 - DNA, 1255 bp, Zea mays
  Clone ID: ZEAMA-23APR03-CLUSTER7398_4
gctccccttcgttcacctcgcgtacgcgacaaactaggccgaccgccgccgccctacgctcagctgcccacctgccctggtcttcgactcttcgtcgtgcgctttgccggcggcgagcacccatcacaccaggatggcgctaaggggggtctggcagctgcagaagctcgtggtaaactactgcgactggggagggagcagcaggggcatcaggtatgatgatatagtttggttcctctcttcggtagtggtaccattagaccattgtttttcggtatgatttccttggttctgttgcgaaaagccgaaaattagttgagatcctgctggtacatgttcttcaatagtcggatggttggtcgactcttcccagccatggatttgtctttgcagatgagtgcggtgtatgtcgttacaatttggaagttggaactgaagacaactatcctattgcctctagcttctctagggcattcctgcatggaaatttcatttctactagacagaaatgtgttatgggactagcgggtactgatgtctgggaagcccatttagtcgttagttcaattacatgctatttattgcaacaatagaatcaggcactttatgcctatgcttgtattcctttatcagattttagctcgagctatggcgctttccttgtacagcagtacactatagtttagtggcagctgtatgggcttcagatcaaacatggtgctggttagtagtcttcattactggatatcgatgcctgaatcttctctttaacaactaccaccgtttttttttactgcagggccttcatggaggcacatcttccagcctttaaggaaaagaatccacacttagaggtggtgacagagcttgtccgcggtcaacatcctaacttgaagggaatttacaaaaatcataacgagcgagtggtatgtgtgagaaatttaccgccagaggaaatactcctgcaagccaccaggctaaggaactctctgggcaggaaagtggtgaagctgcggaccagacatgtaacgaaacgccccagtgttcaggggacgtggacgacggaactgaagatgtgaagcaacaagccaaggtgtttcattgttctttggtggtctgattgcagaaaatgtcagctgtgtcgataactttggtagagctgccgttaggcttgcctgtttgaatagctaaaccgtttactccatttgttccgagtacaatctggtaataacataggagtacacttgactttcct

SEQ ID NO: 2936 - DNA, 809 bp, Zea mays
  unsure (1)..(809): unsure at all n locations
  Clone ID: ZEAMA-23APR03-CLUSTER7403_3
agcgccggcgctccatcttccgctccctcccccaccttcgatcggcacgcaggctcggcgtcgtcgtcagcggttcctcctcccgcctctcgccagtagcctcgcgccctcgccgactggnnaccctgccttgaaggggctggcaagatgatcggcgtagggaaggcgannnagtacgccaacgtccttgacaagcccctcagccgtggcaggcaggaggtcagtttgagtgcatttgcattcttgttctctgagttggttcagtacaaccagactcaagttgacaacattactgagctggaacggaggctggaggatgctggttatgctgttggtgcaagggtgcttgaactactctgtcacagggagaagggaaatagacgagagacacgacttctgggcattttatcattcatccacagtactgtttggaaagtgttgtttggaaaggtggctgggaaggagaatttagattagtatctgttttcttgaatttgagaagttcggtgatttcttgtatttgagttatgtaaaaccagtgtgactgagaataaaagttatgtaggggttcttttgtgacaaagtgtatgagatcgcaggtgcttcatcagtcttattgaaatccgaccgaaactgctgtattaatgcttttccttgcattcaccttgtattaaaggaatccttcatcttttgatttttcgtattttgtagcctggtagcttttattttctttttatttgtagtttttgaaactgttacattgttactacctttatttttctttataagggatacacacatcaaggttc

SEQ ID NO: 2937 - DNA, 1387 bp, Zea mays
  Clone ID: ZEAMA-23APR03-CLUSTER74296_1
ttttttttttttttttggtttaacaaatcttgattatataactagaaagcagttgcagttaacagaatgaacaaccgtcgtgtcggagtaatttgctagtttagtgcagtgaccagtaaggtgtaaggaggtgcatatctcatttattaaaggggttaactgcctaatagctagagaagagcacaatcttgttccctggctcctggtcaaacgcaacgccgctcctgatctgcagctggtttgcatagtcgtcgtcgtagacaggggatggcgacagcggctgctgcgccaaggagtcgtcccacgacgcgaccatgtcgtctagtagccccatctggaacgcgatgtcggggaactccaagtccatgagcgggaacagcgggtcctcgtcgcggctcaaggacgacgacacggagtcggaggctgcagagtaggacgtcgtggtcgtggtcgagaaaatcgtcgacgtcggcggcgccgtccgcccgtcgtccagaggcaccatgatctcgtccgggtccatcatgggtacctcgtcggtgcagaagcctgggtagtagttgctgaggagcggcacgtcatcgtcacctgcttcttgctggctagctggcgtcatcaccggtactgccgtcttctcctgtggaggcttcggcgacggagatggcggcgcttccggcgagccacctgtggcggtgtgcggtgggctctggtggtccttcggcggatgcggatcaggcggcgggaggggcttgtgggtgagggggtcgatccccatcttcctgagcttcttcttgatgtgggtgttccagtggttcttaatctcgttgtccgttcgtcctggcatgtgcgacgcaatctttgaccacctgttgccgagctgagcatgcaggtcgatgacgagcttctcctcggcgtcggagagcaggcccctcttgaggtccggccgcaggtagttggtccagcgcagccggcagctcttcccgcaccgcagcagcccggcaagcttgggcacggcgcgccagcagcactgcctgttgccgaggatgaagctgacgagcttctggtcctcctccgctgtccacggccccttcttcagccccaccttgtcgcagcacggctgccgacccatggtagcttagctagaggcgatgggctcgcagctcgatcgatcacaattgagcggatggacgatggtcgcgagctgctgcgatgtgtgctgtagactgtagacgacgggccggggggtgctcgaggtgcttttcgattaggatgttctaggtaatggtctcgtgcgaattcctgcagcccgggggatccactagttctagagcggccgccaccgcggtggagctccagcttttgttccctttagtgagggttaattgcg

SEQ ID NO: 2938 - DNA, 689 bp, Zea mays
  unsure (1)..(689): unsure at all n locations
  Clone ID: ZEAMA-23APR03-CLUSTER7432_1
nnnnnnnnnnntcgccggccccagggaaaattggtaaatccggcctccccttaggggggcggaaattttgggtaccgggccccccctcgagtcagctacgtaggccccccacccggttgtataaaagcgggcgcctgggattcccctctcatccctccttcaccatcagcaaatcggtctgccctggtttcccccgtcgtgaagcagaaacctctctgctgccattaccgtgctgcgcgccgtcgcggtgaggcttggccacaaccgtggaactgtctccatatggcgtaggcggcgtaccgagcttcgcctgatggatttgcagtccagtgggcccataatttctcgccggaccgcgagcagcaacaacctctcctcgccggccatgacctctacgcactccaagctctcctccgaggaccgtcatcttcgtgcatgtagtcgagcagtaaggtcacgaggatctgaagaatcaccctggtatctggaatctcaagtgctaggagaagagcaggtggttcaggaggagccgcctaacactgaggagttcgatctgatctaggtggcgtttcccagtcgacattggcgccgacgatccttagttcgttttatgtttattcttttattttgtaataagtcttccgctatgtaataagtacttgtttaaacacaataaagttggaacgtgg

SEQ ID NO: 2939 - DNA, 633 bp, Zea mays
  Clone ID: ZEAMA-23APR03-CLUSTER7440_18
agcagacccgggcgggccctggcaattcacgcacctcgcgtgcacacagacacaggcaggcacacagcgcaatcaccgtctcgcctcgcagtcgtactgcacggtcttgcacacacccgtccccatcctcttccggtgtcgccatcccctccgtcgaccgccgcgtccggccgcggcaacccgacctgtgtcaatcgccatggcgtcttgctgataggaagatatcacgatttgagaagaatatcacaaagaggggctctgttcctgagacagccaagaaggcaaacgattatcctgttgggcctattcttcttgggttctttgtcttcgtggttgttggatcatctctctttcagatcatcaagacagcatcaaacgctggtctattctgaggtgaatcggttgacacatgcagtttgtcactagaaactatacaagtgtagggcgtggcttaatgtcgcctttttaatgttgtaccgtggagagttttaagttatatatgtaatggaagtgctaatttaagtcacctgtctgacaggaaagatgttggagtagtccacaatacatatcgagtatagttatagttcgtgtctaaatatttttatggcgaaaaaaaaaaaaaaaaaagcggcc

SEQ ID NO: 2940 - DNA, 883 bp, Zea mays
  Clone ID: ZEAMA-23APR03-CLUSTER7449_6
aaaatcacagatctctctcggccccgtgcccagcgctccgaaaccctagcgccgccgcgggtgccaggccgcgagcgtcgccatgggcatcgtgtttacgcggctcttctcgtcggtcttcggtaaccgcgaggctcgcatcctcgtcctcggcctggacaatgctggcaagaccaccatactctgtggtcaaacaagcatcaggccatactggcggtgctactttccaaacacccaggctatcatatatgttgttgattcaagcgatacagataggcttgtaacagcaaaagaagaattccatgccatccttgaggaggatgaacttaaaggtgcagttgtccttgtgtatgcaaataagcaggatcttccaggtgcactcgatgatgctgccattacagagtcattagaactacacaaaattaagagccgccaatgggcgattttcaaaacatctgcaataaagggagaggggctcttcgaaggtttggactggctcagtaacacgctcaaatctggaagcagctaaggagcctccgcctcgtcatgaatcatttgctggatggtaaagaatagccgatgcttgcaagtcagcgcgcaaatcccattctctttgttttaactccagaagttctacaccgccatcaattatctgtaaagtgcgtgttaaattttttggatactacattagatgtacccccaggttgagatcaagaataggtctgtggaaaatgacgagcaaactgtgctactgtctttacccgtaaatctcatggatcatgacaagtttttttttgtaccccaatatgattaaacttactccacatttctatgttttcgtatcagtgatcattccagaaactgctcttaagcaccttctgct

SEQ ID NO: 2941 - DNA, 751 bp, Zea mays
  Clone ID: ZEAMA-23APR03-CLUSTER7454_3
atcatcgcttgcacttgcagcgtcacaagcaaaccgaagctagtcagtcacacacagctctccagcttccatccacaaagaagaaggaaacaagctaaccatgatgatgagcgccaagaagattgctcatctcgccaagaaatggcagaggatggccgcgcaagggaggaagcgcctcaccttgggggcggcggcggcaaaggaagtcgacgagtgctgcggctctgtggcgagcaagggccattgtgcggtgtacacggccgacggggcacggttcgaggtgccgctggcgtgccttagcacccctgtcttcagggagctcctgcagatgtcacaggaggagttcggcttcgcgggcggcgatggcaggatcacgctgccctgcgacgcggcggtcatggagtacgccatgtgtttgctcaggagaggagcctctgctgagctagagcaggcgttccttagcaccatggccatgtcatgccactgtgccatctacatggcgccgtatgttggacgagccaggcagcagcagatcgttgtttagttagttgctgttccgtgtatgtagacgtgtagtgtagagcaatgattttaactaggtgggtactattattcaaagccttctgatccagcaaccgatcaagtgaggtgttgtaagtacaagagaataaagagatatgattcttgctttgaaaaaaaaaaacttaactgaggaaaagctggaaaaaagtatatggacagtaagaatatt

SEQ ID NO: 2942 - DNA, 1606 bp, Zea mays
  Clone ID: ZEAMA-23APR03-CLUSTER74604_1
ttttttttttttttttgacaacggtgctagacagataaggaacagttgtagtttcaccaccagtggaacagcagaaatacgcacaaatcgaaccaattatgaagaatgtatccaatttccaccagatttgatgtctagtaacttaatagtttaatgttgttgagacttgtgtaactgccatgctgtttctgaaatttactctataatggtgcatcatctgccaacgtagcatacacctagactagagtagtaccaagcagcaacagttaccttccctccctggggaaaaaggcgcaaaaaggaaagcaggcaggcagcaaactctcaagtagcagcggcagctccaggctccgtctctggctgcgctgctgctccaggctccttgctctggcagcgttcaaggtagaactgcaggatggcaagcttcgcggtctcaaaggcacagtagcctagcgccgcaaagcacgcgctgtgcagcaccctgggcccgatgccacgggacaggccgacgagcccctcctccgcgacgacctccctcatggtcccgagcacggtgcggctaccctcggcgccgccgaccctggtcatgaggcgcgtcttgacgacgtcgagcggggtggtgaccgcggcggagatggcccccgcgagggcgccgcagaggacgctctccccgggcgtcaggctctctccgccgcggcgcctcagcgcgaacgccttgaggtactcgaaggaggagtagctgagcacgccggcggggaggttgcggagcagcgtggcggcgtagcccgcgtagaggtcgaggaagccgtcggcgcggaggatgcccaggagcacctgccaggaccggcccgtggcggcgccggactggaggcgctgcgtgatcagctccttgggcaccatgatggcggaggacgagacgttgccgctggcccccgcgagtgggggcacgaggaacggcgggaggtgcggccggagcagcgacttggcgagctcgcaggtgccgaagtagacggcggaggaggaggcggagccgaggatgacggcggagaggccacggtagaggccgagggggccgtcggtccggaggatgtccaggaacacctgccacgaggtcacagacggcgcggcggccgcctgcacctggagccgcgtcttcacggcgtcgatggggagcagcgccgcgtaagtgaaggcccccgcggccgctgcccgcgcaggccccgatggccgcgcgcgccagcggggtcggcggcgctgctgatgtgggactggggttcggcttgggtttgggagtggggatggaaagggaggaggaggagaagacgggtccggagccaccggcgccggcgctggcgggggagtggaggagcagggaggtgaggtcggagatgagggacgggaagtcgaggtctccctgggactgggtctgggtctgggatcgggccattgcgggaagcgcgaggcggggagcggagttgggcggcggcatgccgtcggctgagtcctagcggtgcggcggcgaggattcgatgcagtttttagatgggatgggatgggcgtggggactgggctggctagctggccagattggcagagggagggggaa

SEQ ID NO: 2943 - DNA, 797 bp, Zea mays
  Clone ID: ZEAMA-23APR03-CLUSTER7477_14
atatatagcgcgaaggaaccctaaccgcctccagcctcggcctctgctcccggctcccccacggtactccagccgctagcctgcgattccgccagtacgccaccaccaccgagcctggactaccgccgccgcccttcgccgatatcttcagcggcgaacagcgcccaccagatcccgccccctgcggatgggagtccgtggtggaacccgaaggcatacccgctggctgatgcgcagcttgacgatgggtatcctcgatattcatccagcaggccgccaactacaaacagcttaagaagggagcgaatgaagcgacgaagaccctgaatagggggatatcggagttcgttgtgatggcggcggacacggagcttctcgagatcctgctccacctccccttgttagctgaggataagaacgtcccatatgtatttgttccatcgaaacaagctcttggccgtgcttgtggtgtgacaagacccgtcattgcttgctcagtgaccagcaatgagggtagccagctgaaacaacagatacagggtctcaaggactcgattgagaagcttctcatctgatttacctaagatctttcagtgtgatgggcctcggcgacacatttttcagaggcttggactggtgatggtgtcttgtttacattacgctttccaaactatatttgaacactgctaagtcaatcatatttgaattgtgcttcactttatatttgtgattgtcatgtatcctcaagatgcctctgtatcgtggtggctggtttctgtccaaaaaaaaaaaaaaaa

SEQ ID NO: 2944 - DNA, 1391 bp, Zea mays
  unsure (1)..(1391): unsure at all n locations
  Clone ID: ZEAMA-23APR03-CLUSTER749_2
attgtaccatcaccttcctcttgtttttcttgcctgtctccatactcaccagttgcttttgaggagactgatcgagctacaatcgggcaaaggatatttccgaggtattgcaaggaagaattaatatgcatccaggaggtggaccactgtcggtgccaccgggcttccgcttccacccgaccgacgaggagctcctctactactacctgaggaagaaggtttcctatgagcccatagatcttgatgtcataagggagattgatctcaaccagcttgagccatggnatctcaaagaaaggtgcaggataggcaccgggcatcagcacgagtggtacttcttcagccacaaggacaagaagtacccgacgggaacaaggacgaaccgcgccacgacggcggggttctggaaggcgactgggcgagacaaggccatcttcctcggcaacgcctccaggaggatcggcttgaggaagaccctggtgttctacatcggcagggcgccacacggcaagaagactgactggatcatgcacgagtaccgcctggaccaagagaacgttgagattcaggaagatggttgggtggtgtgtagggttttcaagaagaagagctatcaccagagaggcctcaatccggctgaaatggccgccgcactggacgacgacgagctccagcctttccctgttcctatccccggcagctccctgcagccaacagagcacaagaccaaccctactcacctcatgcaatatgactatccttccttcgacccttccatgcagctcccacagctgatgagcgatgaccaggaacaggaacagcccgtgcggccaaccctcctccccggccatcccggcgttgctatggcctccatgagctcactcaacattgagtgctcgcagaacctgacgaagctcacatctaacggcagcgacgagatgctccacgtcggccacggcggtggggctggaggtggtgtagtcgtcgaccgcttcgctggcacgacgacagattggtcgatcctagacaagctcctcgcctcgcaccagaacctcgaccggctcttccacggcaaggtcgtcaccacggcatctgcctccccaatggcggtaccggtataccatcagcagctcatggaactcggtggctcgtcgtcgtccttgcagaggcttccactgcagtacctcggcggcgagacggccgatctcctcaggtaccaccccaagtaattggatcgacctcaagtttagctacctctcttgttgagcagtgaccagatcagggtttttggttgactactagatcgatcgactgcttaattaattcggtctactttgtatggagagtttagggctcctaaatgtatatatatggtgcaactgttttggggc

SEQ ID NO: 2945 - DNA, 1090 bp, Zea mays
  Clone ID: ZEAMA-23APR03-CLUSTER74_297
attttccccatgtccactatccctccttatcaccaaccatccagtcataactcacggcaggcagagacgcgcaccaccagaccagcagcagaacgaaagagatctccggtccccgggccccggctcctcccctcccgattccaatctggtctcgccggacgccgggcctggcggcgagggagagatggggaagaaccaggcgtacaaggcgatgcagcgggcgcggctggggtcctcgtccggcgcgccgggcgccgccgacgcccccgaagacggcatgacggacggttcattccattctccagagtggcatgcggcgcgcctggccagccttaacaagacgcacaccctcacctgggaggagttcaagaagaagcagaaggaagaggaactgaaaaggggcgagctggaggctgacaaagaccaaatgatgagagagtatagagctcaactggatgctgaaagagctcaaaagctagcaaacggaagaaatcactcaaggtcaaactcaaaatcatcatcttccaagaaagagaggaaggataaggacgcaaagaaaagaagtaaaaagaggagaaagcacaaaagttcatcagagtcaagttccagctcatcttcagaatcttcaagcagcgacgatgaggataggggttcaaggaagtccagatcacagtcgagatcaaagagaacaaggaaggaaaagaagagtcggtcaaggtccaagcacagaggcagtgaaagcgaggaggaaggcctggttgagcgagccgtttaccatggtgttctcaatatgatgctcagctgttaagagggtttggtcaagttgtgtggcttccaaaaactttgtaagcaactggatttcggctctcatcaagtgactcctccccctcatgttgactttgcggacagatgtctcaattttagtggtggagctacgaacaacaatccgatgtcctgatcgagagcgatggagttaatgtttgaacttgtgtgtttgaacttgtgaactaaaaatgtgaactatggatgtaaacttgtgtgaatttgtgaacttatgtatttgacttatgtgaattttgtgaacttatat

SEQ ID NO: 2946 - DNA, 979 bp, Zea mays
  Clone ID: ZEAMA-23APR03-CLUSTER74_298
ttttttttttttttttcaatccactatgcttatccctaggcaaaacccaaacctaaagttgataagcataaaccactaagagccacgtataaccaggaaaccctaagtcactaactaacttagtttttcttcacttagcataatgattattaaatcatgcataatcttagcatacatattcttattcattgcattcgatatattgcaacctcgctgatggagagtacgtcctcgtgccggagcaaggagttgctcaggaggtagccccggatccagcaccagagcctgccctagaggatctgcctgccccagctttggaaggcaagccccggttttatgcataacctattctatatgatattttactacacttaatgtttgtaggcttgtattgtgcacttaagtgtaggagttgattgaaaccctagttgcatgatctcaagaatcctattgagatgaatactagtatgctaggtcgagtagctactttattaagtaggatctcagaagaagtcgagtgatttttctagcactcgcgcgaggtcagcaattggttgtattcatcttataatgggatatatgttagtctatggatttggatccagggaggatgccttgtccatgagacgggaaaatgaattaaggattaatgtgtggatacctgagtcaagcttttgaacgtactaagcacatgccgggaaacatggtaaccggtaaacctagtacctgattgaagccgggcgcggactttatctctcatgcgacctgagattgggtctcccatgctagctatggtgggtacaagtgcggtcactgcacggcggcagccggggtcagtggagcattgtatgccaaggcggtgaggcctggacgcgaacggggaatcgatggggacggttgtcatgtgtggggtcggagtaccctgacatgccatgtgtttaggtttaccttgcaaggttaaaacttgattcgaatcgtc

SEQ ID NO: 2947 - DNA, 1309 bp, Zea mays
  Clone ID: ZEAMA-23APR03-CLUSTER74_302
gatccatttgaaccggaggctaccgctgcctcaagggcctcctcgctcgctcgccagtcgccacccgctcacggagacagagaggccgatggcgagctcgctggcccgcctgggagcggcgctgccacgcgcgcgcccacgcgctgcgacccgcaccctgccaccgccgcggtgggacgccgcggcgctcggcgcctcccgccgcgccgcaccgaacgtttgcaggtgcctagttcattccgacgttaaagtagcccctacatcggacttcaaggacagtagcaaatctgaaacttggaggatcaagatgctctacgacaggtgattgccctctctgtatgcgtgaggtaaacatgctaagagaaagaaacaaatcctatggagcaataaagtttgttgacataagctcgaaagattactctcccagatgacaatcaggggccttgattatgaaacttccatggggaggatacatgcggttctttcagatggaactgttgtcacagacgttgaggcatttagaaaactgtacgaggaagtaggacttggatgggtttatgctgttactaagtatgagcctgtagctagcatggcaaatgcagtatatggtttgtgggcaaaataccgtatgcaaattacaggtcgacctccgctagaagagatcatggcatcccgaagagctgcgggcgaatgtaaagatgacaaagtatgcaagatgtgagcataaagatgttatactgtgctacatacctcgcctctagccatgctttatataggctaaggctcgtatatatggctttaacagtacaaataatcgcagttgtattagaaaaaaaaggtgaatagcttatgtaatggtttatcaaagtacatatgattgtacatttgtatgtacactgtactggttcacgcatgtaaaaacgatccaccacagatcgagctgactcacattgtctgttctaccaagtcgtatggactactacgcggccccaagctcacagtcacatcctagtccattgttgtggatatataagctcatgcactgcccgctgccggctgagaagcacagctaacgtccgcagaggccgcgttgcttgacgtcgagggggcctcggtgcttggatgggcgtcggcgcgcttgttcttggaggctaacctgctgttcctgagcctgttgaagggccgccagtgccatctgtcgtgcgacttcatgtgacccatccccaccagcttttgttgctcttttttcaagccccttcgagcgtaccaagcaccaccttggcagcctaccgtggacccaacaaccatt

SEQ ID NO: 2948 - DNA, 894 bp, Zea mays
  Clone ID: ZEAMA-23APR03-CLUSTER7503_39
acaaccatcaggacgcggacgcggacgcggctcacatcaaacacccccttcagctgtgctcagtgctcactgccgcaaaaccacagccacacaggcaacaagcgcccagcgccctttcacatcaccacatccaccgtccacgctcctccgttccatggccatgtcgagcagcgccagcaagaagcaagcccaggcccagaaggccgggcggaggcccccggcggtgtcgtcggccgcggccgcggacgcggagatgcagagggtgttctcgcgcatcgacgcggacggcgacgggcggatctcgccgtcggagctggcggcggtgtcgcgcgccatctccccgccggcgagctcctcgcacgggcggcgcgaggtggcggccatgatggaggagctggacacggaccgcgacggcttcgtggacctgggcgagttcagggcgttccacgcgcgcggcgttggcggcggcggggacgacgacgacgacgcggagctccgcgccgccttcgccgtgtacgacgccgacggcgacgggcgcatcacggcggccgagctgggcagcgtgctcgcccgcatcggcgaggggtgcagcgccgaggagtgccgccggatgatcgccggcgtcgacgccgacggcgacggctgcgtcgggttcgaggagttcaagatcatgatgcgcggcccccagccccagccccagccccaggccggcgccggactgactgccgtgccggacaaggccaagaaggagtgacgggtgtaggtgtaggtgtactcatcagggcatcagtcgggggggaaagggatcgggttcctctgcctcttctgttgctttcacctagtctggactggaggaatggaaatactcaacttcctgcaaaaaaaaaaaaaaaa

SEQ ID NO: 2949 - DNA, 1078 bp, Zea mays
  Clone ID: ZEAMA-23APR03-CLUSTER75230_1
acaaggtcaaagttatttggagttgaattagggtgacgaatagcatatatattattatgtgtacatatatatacattttagtaactaatggcttttgctacgttttacacgtggccttccaaaatgccgtgacgctcctgcccccatcgcaaacgacatggccttctggttcagccttgacgtctggcgcacaacttgctggatccccttatcatcgccgaagaactgcagctgaattttgtggtgctgcgtgtggtgatgatgcagcctgccgccgatgagaaagacgcaggcggtggcggctgcgaccccaaacgagcacagcgcgccgatcagggctccaaccttatcgttgccgtccttcttgatatcttcttcctcctcctcctcctcttgagcaaacttgctgtcggcggtgacggactcctcggcatcagggctctggatcgccttctcttcctcgccaccctcagaagccattatcggatcggcaacactaggcacggcggatttgcaggtctcatccagcacgacgccgatgcccttgcactcgtcgtgcacgtcaacgtctcctgacggtggcagcagatcatgctcctctgtttctttatcatcaagattcttgccgccattgctcagggagaagctcctgtggtctggcaggaccagctcccagtcccagtccgacacatcctggcttgcatccatggagagacctgctgctctgctcctcctcgtattgctcagggagaagctcctgtggtctggcaggaccacctcccagtcccacacacatcctggcttgcatccatggagggatctgctctgctcctcctcgtattgcattgcaagcaagctgatagcctgatacataagggtgaggtgtgggggcggctgctaaagtcctgactattacaaattagctgcaaattgatcaagggtggaggctgctaaagtcctggctgttactatgagcaaatccacgatagttccttgtaattacgcccctaataaaacaaaaaaaaaaaatccaggcccccaacagtgtccgctctgccaacagtgtgcgctctgcatt

SEQ ID NO: 2950 - DNA, 1708 bp, Zea mays
  Clone ID: ZEAMA-23APR03-CLUSTER7545_20
atacggcataccacactagagccgccgccgccgccgtttcgcgcaccgtaccctagccctcgtcagcggcggcttcgagctcatccagccatgacgttcaagcggaggaatggcggacgcaacaagcacgggcgcggccacgtcaagtacatccgctgctccaactgcgccaagtgctgccccaaggtaacacttcccttcccatagagcgcggttgtttgtgatggatgaatcgggccgttgttagctgcagggaaagtggtattctcgagtctagacctctcgttcacacattgtttagtcgctatataggttgatagctctcacgatcacggtacatgcaaaaaaaaatccatgttattattgggtacctgtactttccgataaaacaactcctgagttgcccaaatatatttcatgtttgtattaactatactaattttgtggcataaatgttagttcatttttctacaaagttttgccaaaatattaaaaatctttgactaggacaactctggatgttaagttgcttaggatttagggacagaataagtactatgttattaatgaaacgtggaaagatccctatattgacatggaacttatatgctcttatttgtcacttctgttgttgatttatttcaatttcacttctagttacatacttgcattgggctgaatctcatcatgttattaatgtatgtacatgcatagctgcagttctgttgttttatgtgttgtcgccttggttctctctaacagaaatgttatgaattgtgtctgggtaatattgaaaccagatacaatgtgctcagacatgtttgacttgcattgcaacattagaacttaattttgctctgaactgtgtatgttgtagaagatatatgatgtttgctgtacttgcaggataaggctatcaagcggttcttggtgaggaacattgttgagcaggctgccgtgagagatgtgcaggaggcctgtgtacatgatggatatgttctacccaaattgtatgcaaaggttcatcactgtgtctcatgtgcaatccatgcgcacattgtccgggtccgctctcgtgagaacaggaggaaccgtgagcccccgcagcgcttcagacgccgggatgatggcccaaggcctggtcagggcccgccgcgcccaggcggtgcagctcctgcagctgcagctgctgctgctcctcgtacctaagttctggaattagtttcggggcttagttttgtgaaacattacctgttttgagaaaccattgttactgtatccccttgatgtcaaactttttagcacaatttgtggttctgaaaaggttggttgaatgttgcaaaaaaaaaaaaaaaaaaaaaaaaaaaaaaaaaaaaaaaaaaaaaaaaaaaaaaaaaaaaaaaaaaaaaaaaaaccaaaaaaaaaaaaaaaaaaaaaaaaaggttggccctgggccggaacccccttagggggaatttttgaaaatttccataacatggggggccgttcaacattgctttaaagggccccatttccccttataggggggggattaaaaatcaacgggccggggtttaaaaacgtggggacgggaaaaccccgggggtacccaaattaaatcgcttggaagaaaatccccttttcccaagtggggtaattaccaaaaaaggcccgacccgatcgcctttccaaaaatttgcccaccctt

SEQ ID NO: 2951 - DNA, 725 bp, Zea mays
  Clone ID: ZEAMA-23APR03-CLUSTER75582_1
tttttttttttttttttttcttttttttttttggaatcaaaccaataatcttggagtccattccattccatccatatgaaactgtcaaacaataatgaaataattaacgaatccagcaaacgaattaatagtgaaggtctccatggacggtacgtgcacaaatgaatgaatatttgtcggtggtctttcatgcaaagttgccgcggcgctccacgtggacgggtccgtgccttcccccgcgtatcgcgagcacgtagaagaactgcgtcactgttaggatgatggtgaaggtctccatggtgcccagcttggcgtttcttcggtcgaaagagatttcctgacaagctaggcccatggctaggactgtgagcgcccacgccacaatccccaacgccgccgcgggctgctggctttcgtagttccagaagcggaggtggttgaagcccaccatggcggaggcgatcccgacgacgcccgctatgagggagaagaggacgaagaagccggtggcgaagttgccgatggggaagaagatagggtggaaatgcgcgggaagccgcagctccgggccgatgatgaagccgcggtcgatggccacgttcagagcccagccgccgatgatggccaggatgacgtacatgcacaggttcaggagcagcagcagcaaagccacgggcttgataaggttgtcggccatgtctctagtagcttagctcttgtttgct

SEQ ID NO: 2952 - DNA, 806 bp, Zea mays
  Clone ID: ZEAMA-23APR03-CLUSTER7562_2
gagagagagagagcgcgcgcgcgctggcaatggcgggagccgacgacctgaaggtgctgggcctgtggacgagcccgttcgtgatccgggtccgcatcgtgctcaacctcaagggcctggcgtacgagtacgtggaggacgacctcggcaacaagagcgcgctcctgctcagctccaacccggtgcacaagaccgtgcccgtgctgctccacgcgggtcgccccgtaaacgagtcccagatcatcctgcagtacatcgacgaggtctgggcggggaccgggccggccgtgctgccgcgcgacccctatgagcgcgcggccgcgcggttctgggcggcctacatcgacgacaaggtgaagtccgcgtggctgggcatgctgttcgagtgcagggacgagggggagcgggcggaggcggtggcgcgggccggcgaggcgctcgggacgctggagggcgcgctcagggggaagcccttcttcggcggcgacggcgtcggcttcgtggacgccgtgctcggcgggtacctcggctggttcggggccgtcggcaggatcatcggccgcaggctgatcgacccgactaagacgccgctgctggccgcgtgggaggaccggttccgcgccgccgacgtggccaagggcgtcgtaccggacgacgtcgacaagatgctcgcgttcctggagaccctgctcgcgaactactactccaagtgactgtactgagagcgaactactgctccaagtgactaaataagaagggctgcttaattaataattacagtatataattgtgcaaaaaaaaaaaaa

SEQ ID NO: 2953 - DNA, 1923 bp, Zea mays
  Clone ID: ZEAMA-23APR03-CLUSTER75798_1
ttttttttttttttttgagataagctgtaattttcctctaagaaagaaagaactgtcacaatatagttttacatacacacacacaccccaacagacgactgttcttagaatcatggctccttatttacaagcacatagagaagaaaaaaaagtgcctactcagccaaactgctatgcacagtgtacctgaaagaagacttgtagggcaaccactgaacacacttgtcgatcctcctcctaagatactgcctgatctcttttcgctgcagctcaggcatgctctcgcacactatgtcaacaaggtcaggtagctccagggaagcatccttcgcatagaagtggagaaccttgggcaggaagatggtctgcctccggaccatgacatttgcttggatgaactcggccctggcttgctccagctgatggtacagtttcttggctgtgtacagcctcacaggtgggtctgaaaacgcgccggtcgagagcgcaaagtgcgcaattggctctgcgtactgaagcgcatatggatgtatggagctcccagattttttcgtcggcgtaaatagtgtccgaacccacagtgaagggcggtgggactggcatcctagaatcgagttctggatagtttgggagttcactgaatgcccacccacattgtatgcagccttcagaatcaagtcagtgcttttcatccgtttttcctgtaatccataggccatgaaagcatgcataaccaaggcattgtggatgttgacccagaaacagagctgctcttcatgtgccatctttctaggatcaatcttctccagccgtttgatcagcgatctgatagtgtccaggattttgcaggcatactcaaacttctcctcgtctacatgtatccctgggaaaaccatcaccccactgtaccgcccactgctcccgccggacgaagcgtacgcgtccggggtcgcagtcgcgtcggcgttgtagtagcaccgagggctccagccacggacggggtgctgcttcttgagggagaaggagctcgacgcggacgagaccgagagagaaggcgtgaacggcggcgtctcggacctcgcctcctcctcctcctgcgacagcggcctgctcgcgagcttgcagtagacggcggagacgcaccgcagtatgtcctccgagagcttgcacgagatcttaggcacgtactcagcgatcgaggcgctcaggaagttggccaggctggaccgccctgaggagcacctggagagctctacgcgtttagaatcggagagcgttggtaggctgtaggacgcagactccttgatgctcctcaggcgaagggcgccttcgtcgtcagcagcagtagcccttctgctgctgcgctcatggcgcggttcctgagcagacgcgcgaggggagacgccgaggtactggtcgaacgcggctctgtacagggacagcaggtgcagctccttgcggacgacttgctcctccaggacggctatctcccaggccaggtccgcggcagacttcgaaccgatccatacaactatctctctgactgaagccatgatatgttcattacaagtttacaactagtcaactattctctttctctctgtctgtcttgctaaatcatgttcaaaatttggaattcggatacagttccctgacaacagcacgtacgtactggcagtacgtcattaagaaggaaaagaagaagagaagcataatcatcactcatggcttttactcacttctccctagatatgacaaagcatcattgtgctggcacaagagatcaccaccaccgcggccgcccatgggcgtccgcccgcactctccatggcggatggcatctgcgcgtgcttcggtcaccaagaagcgccaaagccgagcttcagctgtgtgtcatgcgatcttgctgcctggaatgatgac

SEQ ID NO: 2954 - DNA, 1937 bp, Zea mays
  Clone ID: ZEAMA-23APR03-CLUSTER75798_2
agataagctgtaattttcctctaagaaagaaagaactgtcacaatatagttttacatacacacacacaccccaacagacgactgttcttagaatcatggctccttatttacaagcacatagagaagaaaaaaaagtgcctactcagccaaactgctatgcacagtgtacctgaaagaagacttgtagggcaaccactgaacacacttgtcgatcctcctcctaagatactgcctgatctcttttcgctgcagctcaggcatgctctcgcacactatgtcaacaaggtcaggtagctccagggaagcatcctttgcatagaagtggagaaccttgggcaggaagatggtctgcctccggaccatgacatttgcttggatgaactcggccctggcttgctccagctgatggtacagtttcttggctgtgtacagcctcacaggtgggtctgaaaacgcgccggtcgagagcgcaaagtgcgcaattggctctgcgtactgaagcgcatatggatgtatggagctcccagattttttcgtcggcgtaaatagtgtccgaacccacagtgaagggcggtgggactggcatcctagaatcgagttctggatagtttgggagttcactgaatgcccacccacattgtatgcagccttcagaatcaagtcagtgcttttcatccgtttttcctgtaatccataggccatgaaagcatgcataaccaaggcattgtggatgttgacccagaaacagagctgctcttcatgtgccatctttctaggatcaatcttctccagccgtttgatcagcgatctactgggtcacaaaataccacctgatagtgtccagcattttgcaggcatactcaaacttctcctcgtctacatgtatccctgggaaaaccatcaccccactgtaccgcccactgctcccgccggacgaagcgtacgcgtccggggtcgcagtcgcgtcggcgttgtagtagcaccgagggctccagccacggacggggtgctgcttcttgagggagaaggagctcgacgcggacgagaccgagagagaaggcgtgaacggcggcgtctcggacctcgcctcctcctcctcctgcgacagcggcctgctcgcgagcttgcagtagacggcggagacgcaccgcagtatgtcctccgagagcttgcacgagatcttaggcacgtactcagcgatcgaggcgctcaggaagttggccaggctggaccgccctgaggagcacctggagagctcctgcgcgtgtacgcgtttagaatcggagagcgttggtaggctgtaggacgcagactccttgatgctcctcaggcgaagggcgccttcgtcgtcagcagcagtagcccttctgctgctgcgctcatggcgcggttcctgagcagacgcgcgaggggagacgccgaggtactggtcgaacgcggctctgtacagggacagcaggtgcagctccttgcggacgacttgctcctccaggacggctatctcccaggccaggtccgcggcagacttcgaaccgcttctttcagctctctctgtggctgcggcgacgcgatgctcgggaaactggtcagggaggtcgagcgaacgccttgtgtcgtcgagcacctcactgcgactgatggccgcaggtatgtgaccggcggagagtcgcggcgacacgtcgggagcatttacgtacgacgcgctcgttgttcttctggagtgtcggtgttgcaggcaggaagaagacgagtgagccccgttcggtcttcttccggcgtctcttcccttgaccttgagcaccgccgccgccgccgcctctggtcgtccgccggcactctccatggcggatggatgctgcgcgtgcttcggtcaccaagaagcgccaaagccgagcttcagctgtgtgtcatgcgatcttgctgcctggaatgatgac

SEQ ID NO: 2955 - DNA, 1713 bp, Zea mays
  Clone ID: ZEAMA-23APR03-CLUSTER7583_2
aacccaatcgatcgtccccaatccgttcaggcagtccccgacatcgccatcgccgccgccgctctccatcataaacaatctactcctcgtcgcctcgcgtccgtatacttgaccgcccccttctcctacttgtaattcccctcctgcttgtgtggcaggggcctctcccgcgcgatggggaagcacgagttcctgacgccgaaggcgatcgcgaaccggatcaaggcgaaggggctgcagaagctgcggtggtactgccagatgtgtcagaagcagtgccgcgacgagaacgggttcaagtgccactgcatgtcggagtcgcaccagcggcagatgcaggtgttcggcatggcgcccgaccgcgtcgtcgagggcttctccgaggaattcctcgagtccttcctctccctcatccgccgcgcgcaccgccactcccgcgtcgccgccaccgttgtctacaacgagtacatcgccgaccggcaccacgtccacatgaactctacgcggtgggccacgctcaccgagttcgtcaagctcctggggcgcgaagggtactgcaaggttgaggacacgcccaaggggtggttcatgacctacatcgaccgtgactcggagcaggccgtcaaggaccgcctcaagcgcaagaggatcaagtcagacatggctgaggacgagcgccaggagcgcatgatcgcccgccagattgagcgtgcgcacaagtccttagccaaacctaacgatggtgatgctgccgagggcgagcccgagtctggtggtgaagaagagtattcaggttcggatgatgatggggaggagctggaggatgtctcgaaagaggcaaacaaggcaacagggaagattgcgattgcgcttcagacggctgtgcgagggcctaaggttaatccttttgaagataagccggaggtgaaatttcgtttcgacgaggagggcgacttgggtaccggagaggagaaggatgagctggccaagaagaagggaaaggatgtgaaggcagcagatgcaaggaggtcagcattggacgagctgatgaaggaggaggagatggccaaggagaggagcaataggaaggactactggctgtgccctgggatcgtggtcaaggtgatgagcaagtcattggcagagaaggggtactacaagcagaaaggggtggtaaggaaagttatggataaatatgttggggagatagagatgttggagagcaagcatgttctcagggttgaccaagatgagctcgagaccgtgatccctcagatcggtgggctggtgcggatattgaatggtgcttatcggggatcaaatgccaggttgctctcagtggacactgagaaattctgtgcaaaagtgcaggttgagaaaggtctctatgatgggaaggttcttagggctgtcaaatacgaggacatttgcaagatatcctcatgatatacagtgatccattccattttcctggatcatcaccgaagcaaacaagcactatgcaacccagtgtactagctctgccagttacatatctgatagtgtttgtgcttgttactgcttgtgatggaatatcttctgttgaagcagtgttcaatatgttgttgtttctagttcattgtagctgctgaaaggctatgtgtggggaaacggtgtcatgtatatttgcttgttactagaccctgataattttgcaatatttggttaacttct

SEQ ID NO: 2956 - DNA, 794 bp, Zea mays
  Clone ID: ZEAMA-23APR03-CLUSTER761_4
agtccgacagaacagcacgtgaaagcccaggcctccctccctccctctccccacctgctggaatccgcggccgctgcctgcaagggtgaccttgcttgagcccgtcttccttcttcctcagctaggcacccgtgcccatcttcagtccacctagccatgcctacgacgatggcggcggcggcggcagcgtctgctccaagctcgctccgcgtttcgcgccaggggacgatcgggggaggccatgccctctacagcaggtctcagagggctgccactgtctccgccagagcttccatgaacataacgtgctgcgcgaaccagacgcagacggcgcagcgcaagtcgtattcggggacgacctctccgccgtcaggttcagtgaaagagaaggtgaagccgaggctcgacgacgggggcgtcgggtttccgccgttccggttcgggggaggcggaggaggaggcggcggcgggcggcagcagctcgtccggcgggttcatcctcttcgtggtcgtcctgctcctggattacctcaaggagttcgagaggaacctgcagaacgggccacggaggagcggcggtggctacgacgacgggctggcgccacagtagattcctctctctttctcggtgtgtggtttgaattttggaagagaacgtgtgctacgactctacacgaccatgtgttgcagagatgcttcggtgttcgttggtgtgatctctctctctcttttttttttttcctacaaaagacagtttttctcgagggctcatgtgaggactagaaattttagcc

SEQ ID NO: 2957 - DNA, 1356 bp, Zea mays
  Clone ID: ZEAMA-23APR03-CLUSTER76437_1
tttttttttttttttttttttttttttttaacatcaacaatattcatattatattggtactttcggcttgccaaaaggtgagagaacgaggatgatgcgagagtgattacaatccagcgtgaatagtacggtcggggtactgttcatctatttatagtcacgggacgcagcccggtaaaattacatccatgcccttgaacacttgtttacaagtaattaaaaccaataaggcctatctagtcctttttccttccttgcttgatgtgggctgaggccattgagcttcggcatcttgcactgtcggctctatacagagtcttcgtcttgaggagataaatcgagactgaaggtggcttcggtgatcctttgtatcattttgtcgaagatgttttttaaaagaatcttcgacggaaaagaagaccccaatagtgtatcgttgaaatgtagtgtactaattaatgtaccattagtagcatcattattttgctttagatcccgacgcccaagaagtcgaagaattgcacgtccttcctctttgcaagcgcatcaccgccattgtcatcgtcgccaccaaggtctttgctcatgtcatgacgatggccgtcgtccagtaatgcgacggcagtgggcacattgcagttcctgacaccgcaacttgcagctggtctgctgagtccgagcggaccgaaacctgcaggcaccgcgaagcacagcgagcgggtcggcggcggcggcgagcagcttccaaaatggaagtactgatgacgaggcggtacaacgacagagccgatggctgcggcctcgccgacgagggtacggcggcggcggcgcgccatgacgacgtgccagtggttcttgacggcgttgtcggtgcggcccgggaagaggcgggagatgatcgcccagcggttgccgtgggcgcggtgcgcccgcaggagcagctcctcctccgccaccgtgaagggccgccggttgatccgcgggtcaagctggttgaaccatcgtagccggcagctcttgcctgatctcccctccagactctcagcaatggagttccagttccgcgggccgtacttgtcgacgagctgccgcagcttgtcgtcctcgccgggccgccagtggcccctcgacggcctggccctggacttctccttctccttctccattgcgcgcgattgtgacgtacgcgtactggggtttaatttccccaagaaacagatggtgaagaagaatacgtacgtttgctagctacttccattagttagctggatgagagagcttttttcgattaggatgttctaggtaatggtctcgtgctcgtttgaaggtttggatggaggtcactgttgtttagtt

SEQ ID NO: 2958 - DNA, 875 bp, Zea mays
  Clone ID: ZEAMA-23APR03-CLUSTER7650_1
atactgtctcatatactccactccagtccccgcgctgcatccttccgcttcctctcgctccctctgctctctcgcggtcgcagtctcgcagatcccgatcgcgcaaggagccagcgtagagggtgatcgacgatggcgggcagcacgcgcgcagcgcacaaggcgttcctgctctgcaactacacgctgctgggtgcagcatcggcgtgcatcttcctcacgctctcgctccgcctcgccccgtccgcgtgcggcctgctcctcgtcttcctccacgcgctcaccgctgtcttcgccgccgcgggctgctcgggctccttcaccgacggcggcgccggggccggccgcgcgcacgccgcgcacacagcgggggccgtgctcaccgccatcttccagggcgccgccgcgctgctcgccttcacccggaccgccgacttcctagccgagctgcggtcctacgtccgggaggaggacggcgaggtcattctcaagctcatcggcgggctcggcaccgccatcttcgtgctcgagtgggccgcgctagcgctcgcattcgcgctccggcttgacgatgatggcaacgaggagattgacggtgagcactgcaagagctgggcgtcagcgtaccatgtctgattctgctctgttcagacaccggagacgcgagagatacaggcacacaaaccagaaattgggggggggggggattttctcttctattatttacagctgtggatctattccgctgttgttacttgttactgtggtcatgaaccgaagtgcaaaggcaaatgttttgctttgcaatgtattcaattcatctcttagaaattgcaataaagtacattcagtgagccgtaaaaaaaaaaaaaaaa

SEQ ID NO: 2959 - DNA, 1144 bp, Zea mays
  Clone ID: ZEAMA-23APR03-CLUSTER7679_1
acaacaacgcacgagacaaagggcctcacgctttccacatcgacacaaaaaccaaccgccgccacctccctccgctcgcgctagctgtgtgcgttccttgcctgccacaacttccagcacttggagtcttcgacgacgacgacgacgacgacggcaggggaggagaaagagaaacaggcgggcgggtcatccatggagacggaggaggagacgacgcccaaggcgaagaagcggccgcagtcgctgctcgggagcctgcgggaggcgatcaccaaggtccggttcctgctctcctccagcgcgacgcggtggatgctgctcaggtccctggcccgcggcggcggcggcggcggcgccccggcgcggcgcctcagcttgcgacgcgcgaccgggcctgctcgacaccatcgccgcgtcgccagacctcctcctgcagctccagtacctccaggtcggccagcctgggtcgccgagcctgggcacggcgtgtcgcgggccaccagccccgcgtcgccggaggccctgacgagggcctcgtcgtcgtccggcggccgctccccggcgtcgtcggccggggacgacgacgtcgaccagcgcgccgagctcttcatcgccaacttctacaggcagctgcggatggagcgccaggtctcgctgcagctgcggtacgtcagggggaacagctgggacaggacccctggcgcaactccttctcctgcttcttccaggggatgatccgtagattgcgtagcgaaataagaatttgcaaggtagagatcctttcctttcagagcgcgcggtgacgcgatttagatgggtatcctctttttttttcctccatcgtttctgcacattcttttttttttgggtgctgaatagtactgtacagtttatgatttgcttggactcatgatcgagagtgtaataaatacaaaaaaaaagagagagagattgggattacagtctgtaaaaaaaaaaaaaatttgactttcgttatgtgaaccaagaggaaaaggggaagcacattctgatgctcccttaggagtgtttgtgttcgattggttgatatgttgaaaagcatttaagtgcctatggagagagaaggccgagagcatttgtgtgttcgaatagagcattgttcgtc

SEQ ID NO: 2960 - DNA, 2801 bp, Zea mays
  Clone ID: ZEAMA-23APR03-CLUSTER7686_1
gctgcgacgtccccaaccgcccgcgccatagagatagagatagacagctagcttcatcagtggagagctcagtgaggcgccccccccccccccgtttatctccacccatgcgtccctgctctcctctagttgagctcaatcccaagtgctcgcttaagctgtgtggccaggttccctttcctggtcgccgtcgatggaagccctgccatcgatatcgcatgatattggttgttttcttcgaccacgtcaatgcctcacaggatttggacaccttgtcgacactcgaccatgtgttcgctcgttaccacgccatcttcagcatcatggttctataaaactctgcgcactcgtcggcacccgtctgtcaatctccaccacgcagcgctgcatcggacttaccctgtatgatgttcgacgacaagcccgaaccagtatttatcagcattctcgcgagtagtgagtcacgtttgatgctggtacgataattactcgcgtgatgcggaagacgacccaagtcgaccccaagcgcgggctaatccgcaggataaagcggatgaactaatctgaagacggatagatgaaacaagtatcacaacaaggataatcatcaagtggacgtcgtctaacaacactaacctagtgttactcaggttctaactttgtgctgttgttgatggtgttaagtgccggtgggctcggccttcttataagtctaactttaccgatcacgtgcctcttccccttcttgtatttcatggtaagggacttccgcgtcgctgaaacagaggaagacatcggattctatgctggttttcttgctgcgtcgtacatggtgggcagaggcttctcttccatcttctggggcgtcatcgccgaccgcgttggacggaagcctgtcatcacgttttcgatactgtccgtggtcgtattcagcgcgctgtttggtctgagcacgacgtactggatggcgatcgccacgaggctcgtgctgggcgctctcaacggcctgctcgccccgataaaggcgtactgcgttgaagtttgccagacccagcaccaggcgcttggactctcgcttgtgaacacggcatgggctctgggtctcattgttggtccagctcttggaggctacctttcgcagccagctgagaaatatcctcacgtgttttccaaagactctgtatttggcagatttccataccttttgccctgtctaagtgtatcagcgtttgctacacttgtcctgataagctgtgagtggcttccggagactatacacaagcataaggttcccgaaatggacaccaaagcattcaaagccctgtcgtcaaaagagggctattgcgatccacctcgcaagaagaagagcttgctccagaacaggccttggatatcaaccctgctaccttactgctttttcagtcttcatgacacagcatatagtgagatactttccttatgggctgtgagcgaccggaagtatggcggccttagcttctcgactgaagatactggtcaggttcttgctatggcaggcgctagtcttctagtgtaccagcttgtcatttatcgctgggtccatagaattcttgggacagtcaactcagcacgaattgcatctgctgtgtccatacttgttcttgcaacttatccctttatgacatacctatcgggagtgaaactttccttggctctttgttccgcagccatgatgagaagtgctcttgcgatcactgtcaccacaggaatttcacttctacagaataatgctgtgtgccaagaacaaagaggcaccgcaaatggtatatcgacaactgcaatgtcattcttcaagtcaattgctccagtaggtgcaggggctctattctcatgggcacaaaaacgtcaagatgttgctttcctgccaggtgatcaagtggtgttcatggtgctgaatttggtgcagcttctcgggctgatatccacctttgagccctttctagtgttacctgcactaccagagtagtagtgtttaaggtcacctgtacgggcgacttcacctgcacgggcgcatccttcagccgatccgaagacaccatgcctccagggaggaagggaatacgaagcacaagggaacccccaccagaaatcacttctactgagtatgagaaacaaagggcagcaaatgtgatgaggaacaatcagatgttccaacggcttgggattaatcagttacgcacaatgatgactgctacaagagtaaagagcaaatatgatggtccagaggaatcagggtctttgtttgatggcgaggatagtgaaggctctgagccagaggaggattcccatgttgcacaaggtgtacgtagccacaacccaactcatgttgctgacaaacctacacaacaaacacgaggttctaaaagggttgtggcccctgatgttcatggacaacagattagattcactaggcaaaggagtgctgccataaatcaacaatcctccctaagcctaactactactacacaagctggttcaagagccaccacaaaccaagaatccacccaaaacttggctgctgcaacacaatttacttcaagtgttgccactgagcaagattacaccgcaggcctgactactactgcacaacctacttctcccacacaagctgaggtcactgacccacatagagatgaagaattggtaccaagggcaagaagtaggggcaaaccgcggcgggcccctccagcggcttcgcctcccccccctccccttccaagggtttatttttttctctttttcacacgacagaaaaaaaaaaa

SEQ ID NO: 2961 - DNA, 1462 bp, Zea mays
  Clone ID: ZEAMA-23APR03-CLUSTER7696_3
aacacggtgtggtatatgtgttagctttcgtcttcgcctcggtttgggagccacatggatcggggcacagagattccgtgtgatcggggcacagagattccgtcgtaaaaaaatcgtgtcctcgccgacagggaaagccgtgttgcaagaaggggaattccgctgcgagatccgtgaacggttcagagatggcacagacggtgttcaccccctctttggaagcgatgaagcatgtcaaggcagagaacggagtcattctcaccaagcccttccttggatgtctgcaagcaaatattgcctgtcctcgataaatttggagctgctatggcaattgtaaagagtgatatcggcggcaatatcacaagactggaaaacaagtatacttcagaaccatcaaagtatgaacacttgtacagcatgattcaggaagaagttcaaaacaagaccgcaaaaggttcctcaagctgcacaaatgggcttctgtggctgacgagggccatggacttccttgttgagttgtttcgtaacctgcttgagcatccagactgggccatgagtcaatcttgcactgattcatacaccaagactttgaagaaatttcatggctggcttgccagttctagttttacggtggcaatgaagcttgctcctaatagagagaaatttatggaggtcattagtggaaccggtgacatcaatgcagatattgagaaattttgcacgaccttctctcctttcctcaaagaaaaccacaactttctggcgagcgtcggtcttgatgatctgaaggcttcatagatcaatctccatgctgattacaacaaaataagcatgtcttacgaaactcaaagtgttgccgagggtatacctgtttcccgtagccatctcccccttgaaaaactttaggagatggtaataatttgtcagcatgattgaccatggctacttacgcagagaattgacaccactcaacaaatttagttaccgaactctcgatcctgtgttacagcaaatcctatggttatgtggaactctggtgctgtaattctcttgtatgctacccagtatgccgcaggaaatcataattcggtgttccattgcagcaggaccatcgtgtcacttgtaggctacccatattgactttgtggctcagccacttccaacacagttgagcgagaacatctagatgacataatcatttaattggtgccaatatgtatttagagaccaaatttagcagggagactgctgactattagcaagtaacatgcattaactgattccaaggtgaccttaatttttccgcatgattaaccatggctacttacacagcgacttgacagtactctacaaatttactttccaaagttagtccctttttttccagataatctacatatgatatgaaattctagtgcaattaataaataaattcctgcaaaaaacagaaccgttaccggtt

SEQ ID NO: 2962 - DNA, 827 bp, Zea mays
  Clone ID: ZEAMA-23APR03-CLUSTER7750_12
tctctgctaacgccgctcgcgcatcctattgccctcgcgccaccgtcgccgccgctgcagcgagccaccgccctgccgtcgcctgaggtagacaccaagccaccgccatggggcgtatgcacagccgcgggaagggtatctcttcatcggcgctgccgtacaagaggactcctccgatctggctcaagacagctaccaccgaggtggaggagatgattaccaaggctgcgaagaagggccagatgccgtcggcagattggtgttctgctccgtgaccagcacggcatcccgcttgtcaaggagcgtgactgggtagcaagatcctccgcatcctcaagggcccatgggttgggccgccggagaatcccggaggatctctacttcctcatttaagaaggcggtggcgattaggaagcatttggagaggaacaggaaggacaaggactccaaattcagactcattcttgttgagagcaggatccaccgccttgcccgctactacaagcgtaccaagaagctcccacccacctggaagtacgagtcaaccacggcgagcactctggtggcctaagtgatatcctccgatggcttggtctttagcacctatgagcttgttctagatatgaatttatgtaattcttgttatgtctggagctggttagatggacaaggaacctcaactttttctatgtttacttggagaatcccataaaccatttttggtttcgcaattctgtctgttaaacgtaacatgcatccatgttttgtcgaaaaaaaaaaaaaaaaaaaaaaaaagaaaaaaaaaaaaaaaaaaggcccctagggcc

SEQ ID NO: 2963 - DNA, 1589 bp, Zea mays
  Clone ID: ZEAMA-23APR03-CLUSTER77575_1
ttttttttttttttttcggatcagctctctgatttattgcgcgcaaaccttttattactgtaacatgccagacacatacggacagacagcttgcttgcttgctcgctcgcttgctttcgttgctctctacgcttcgctagagccatggccaacacagattcactacccagcgcacgacacactaggagtccactcgttttttacagcagccaaggagcagcagccaaggagcgggggggtggggccggcgcctcgaggaggacgaagcgaagcgccggcgacgcttcaaaatgtggcgagcttctttcatttgaggtgtggccgccgccataatcatcgggtcaccgagctagtagccttctcgcttggttacgattcctgagcctcggaccggtctctactacgttatcgggagctgcagtggtctcgctgaatggtggtggcctcgtgttggaatggttcttgtagaacctgatggagatcagactgctgcgcgtccccctgatcgacgattccggtgatccatggaagctcaccgccggcccgtgtcccgagaagaaaccttgccagagaatgacgacgcagaagataacggtgacgatcagggggcacagattgccacccgagaacccttgcttggcgttcttcatcttcttcaaggccttcatccgctcgaccctcgcccgcttcagcacggcaagctcgctcagctcgttgaggagcttctggtcagagacgtccagcggcgtaggcgtcagcggcctcggcggccgcggcggcttcttcttcgaccgcttcttcttcgccttgtcccctcccgagctgtccagaaggcccaggcccagcttctcctccccctcggacttcctgtcgtctccacttctagcaacggcgtccgaagccggtgaagagcagtccatgtgctggttgttcctgtcatccctcggacatccgttggcgcacgcacacacgcaaccactctccaggtcgttgctatggttgatcactgcagtgccgttgccactctccaggtcgatcaaggtgtcctggtcgttcacacacttagactccatcggaaccacgaaatagctccagtacttggtcctaactcctaacacattgataagcaaaaccgtggccctctctgatatgatactggggggtcacgaaccagatttgccctctgtcgatcaggagaggagaaatcacctctggaatactagctacctacagagctgcagcggcgaggtcaggttaccacagctagccagcgacgccctcccatggcgatgcccgccgaatcaaggaactcccggggccgcaccgcagccgcgaagaggacggaggggttgtggtggtgtggtgtggggtcaccgtacgtcccgggactgggagcggtgggacgggttgaggtggaaacggaaggaagcatccagattttcccgcctcgggggtcacgcgctatttaattccgctcctcgcgcaggatccatcgccggccccggccgtcgtcggcccggcggaacagtttttcccctttttgcttgctttgctctgccgcccggcccccggccggcccctcgagggta

SEQ ID NO: 2964 - DNA, 1390 bp, Zea mays
  Clone ID: ZEAMA-23APR03-CLUSTER7777_2
ctcaagctcaggccgaggcggcagcggcagcagcaaccgaagaagcctttgttgcaatcccagtcgtcggaacactcgaaatttcccgtgtacagctgcctaccctccctccctcccgctcggctacacccacgcgcccacctacccaaaagaaccgcgcggcctccttccccggtgccaccacctcgtcggtcggactagcgcatcgatcggcagctaaacaagcacccgccgcgcgtgatggcaatggacgcggctgtggcagagaagagcggcggaggcggaggcggagcggccggggtcgcggcggccgcgcaggtggggctgaacggcgtcggcggcggcgagaggcgttcccggttccatcgcatctgcgtgtactgcggcagcgccaagggccggaagcccagctaccaggacgccgccgtcgagctgggcaaggagctggtggagaggggcatcgacctggtctacgggggaggttccatcggcctcatggggctggtctctcatgcagttcatgatggaggtcgccatgtgattggggtcataccgaggtccttgatgcccagagaggtaactggcgagcctgttggagaagtgagggcggtctctggcatgcacgagaggaaggcggagatggcccggtttgctgacgccttcatagcgctacctggcggctacggaactctggaagaggtgcttgaggtcatcacctgggcgcaactaggaatccataagaagccggttgggcttgtgaacgtggatgggttctacgacccgttgctgtccttcatcgacatggccgtgaaggaagggttcatcaaggaggacgctcggcgcatcgtcgtctcagctcccacggcgaaggagcttgttctcaagcttgaggagtatgttccggaatacgaggtcggtttggtgtgggaggatcagatgccggcggcggagctggagagcccgggatcgcctcctcctcgtctctggacgtcggctgcccttctctgaccagtttctgcggccggatctcgaagtagtaggcatctatgctgatatatatactaagctagctctagactcagcctgttggtttgttcttttgggatgggtgacagtgtttaccttagcatctatcgttagccgcggtgcagtgcgtttctctgtcattgctgctcttttgggcttttgctcctatagaagcaggaaggaaggcatggtatgtctgtatgtatattccgggtacgtggtgacggacctgatcggctgttcttgttcgctcgcagcctcgcactcgcactgtgtgatggaatgggatgatgatgtactgtgtccggaacaaacaaacaaaaaaaagactaattatgcaatgtaatcgattcgtttctaatct

SEQ ID NO: 2965 - DNA, 710 bp, Zea mays
  Clone ID: ZEAMA-23APR03-CLUSTER7799_52
acagaagaagccgaacgttttcggttccgctcagagtcataagccaggtcagactaggttagggtttacctgtgaggcctgctcccctgccgccgccgccatgggacactccaacgtgtggaactcgcaccccaagaactacggccctggatctagggtttgccgtgtgcgctaacccccacggcttgatccgaaagtacgggctcatgtgctgcagacagtgcttccgcagcaacgccaaggacattggcttcatcaagtaccgctgaaacttggggagctccaaagcatggcaataatggaagcatggatggggacctaaaagatagcctgtactcttattcttatgataaaaccatgtaatgaattgtttggctttgtgtggacgaagttggtgtattctagatggtactcttgaatcttgatgcttccctgctatgctagctgagcatgtcgaaccgctatgaatcagacaatacagtatcaatgttaccactcagtcttgttattaaaaaaaaaaaaaaaaaaaaaaaaaaaaaaaaaaaaaaaaaaaaaaaaaatagggggggggaaaaaaaaaatttttttttaaaaagaaccaaaaccaataaaacaataataaagctggactggtggggccttcaatcggcctattttgggttatttccatcaattggggggccctttgggcttccttttaaggggccaaa

SEQ ID NO: 2966 - DNA, 1216 bp, Zea mays
  Clone ID: ZEAMA-23APR03-CLUSTER7814_1
acggttatttcgtatcagcaatagcatacgccctacgccttctttcctccctgcccccaccacgaaactccacgacgacgcgtccgcgcacctggcaggcatcgaccaccgtggaccgtggcaccgtcgatgccgagcaacgcgaggagttgagccgatggaggtggcgtcgggggacgaggatctggaatcgctgctccagaacttccatcgcgtgtcccaggggtacaaagatgcacttatgcaggtccaggttttaagagtaaattgcagcactgagttcaaaaggcgggaagctcttgaatcacatattacagatcttaagaaagataatgagcggttaagaaggcaatacacagaaactttattcaaggtcaccaaccaggtgaaattccacacagaagctcaaagcctgaaggaagagctggacaaggcaaatagtagattgttatccatggaagaggaacacaagagggaaactgagcaacttaagcacagcagtgaaatgaacatcaatgccctggagaacaagctcagccacgcccttgtacagcaagcaagagatgaagctgcaatgaagcaactgaagttggagctgagtgcccataaatctcacatcgacatgttaggtagcaggttggagcaggttactgatggcgtgcattcgcagtataaaaatgagatccaggatttgagggatgtggtttctgttgaacaagaggagaaaaaggacattcacaggaagcttcagaatgtggaaaacgagttgaggatcacgaggatgaagcaggcggagcagcaaagggattctgtctcggtccagcacgtggagacgctgaagcagaaggtcatgaggctccggaaggagaacgagtccctgaagaggaggctggcgagctctgaagtctgaactggagtgcacatgaaaactgcaactgctttccttcacgccgtagttttatctcatactgtaggatgtagaaaaatccactgctccaaaagcatatatcactgccagatgctttaaaactagcaatgataggtatgttttcactgaaagttattatcaccaatcgacagactcataaccttttcatatgaaattatataaagataaaccctatgtccaagatatagagttcaaagaactttttagttgacaaaaaaaagaaaatttggatgttcgaatattcaatataaagatcacatgcctatt

SEQ ID NO: 2967 - DNA, 1088 bp, Zea mays
  Clone ID: ZEAMA-23APR03-CLUSTER783_16
gcacgagaccattacctagaacatcctaatcgaaaaacagtcagttgtagacctgccctgcggcactagccacctctgccgcggcttcagagcttagctcggtccccagcagctgaggaacatgatcatccttagcgactcctcggcgccgccgccgccgccgatcttgccggccgccgacaaccgcaacgcgccccgcttcgcggccgaggagcaaggcttggccacctgctccttgagctcgatggcggcgcccagcgtcaccgcaatgcagctcggaaaacaggtggccgagcggaccactggttccgtcaaacagggagctcgtgcaggcaccgaatccatggtatggttcctgatgagaccatctgatttggaggatatgcactggtttgtcttatctacgacattcagttcatatcttgtctgaaattgtcacttgctttgcttgcatcatctttactcattgctgttctgcacttcatcagtttctgaaattagtgaacgtctctgtcggttcatcctggtcgcagtttcgagtccgtctgcaactgcaagtctgcaacgcagcgcaggcgaccacgcagcaagtgtctgtgggaacaatgtgaatcctgtggatttcctttaacatttttacattcctaaatgggactctagatcttgagaggaaggcggttctttggttcttcggataaaaatatatatgcagatggaatgcaagatgcaagaagtgaagaaaccgccgaaaatcgaagcccttctttctgcatgtgctcttgtgtttttgtttctgacactgtattaagataaacactataatactgtgctaggacttgatggttatccacttacaaatttaaaactgagcgagggaaacttctctctccaacgggcatccttttgatattattggtatcttttagcattctataagggtatgtacaatgagtgtcttaagttgtgatttagagtgtgtttaggggggtgaatgtaaaaaaactcaagacatgtatctgacgaagacacagtatcttagcttcatgttcgagacaggagactagctgattggtcactttaatttattg

SEQ ID NO: 2968 - DNA, 881 bp, Zea mays
  Clone ID: ZEAMA-23APR03-CLUSTER785_175
cctctcgtgtgtttggggtggccagccaccctttgggtggctccccagggggtattctttaatccctttgtggtttactgagttcttggtagataccctgctgagtgggggggttttaatggtggtggaaggtgtccatattgggggtaaaatcccttggagaattagtgtggagaagaaaggttaaagttcaacccttctttaggggtttcaaggatatgctcgaacctggggggtcgttcttcgttttttgcggaaaatcaagtcggagccatgaggtgattagggtttcgagttaaggttggaggaaaccatgatcggttgtgttggggtatataaatttccaaacttgcaaccaaggccccaaaggccaaaatgctcgccctcaagacgaacaagcgattgttgattttgcagacggtgggagattttctcaccgacaaaatgctcaacctcaagacggtgggagatgcaccatacaaccggcagtggtgttctggacaaagaaagcttgtaccttaaaacaggaggatacaagaagctggagtggttgtctgaaggcttttgaactgcttgaagcattagtgtagcttttgtgcttttgtgactgatcagctctggagcagctagagtgatgtagttgtgggcttttgaacaatagctggagtgatatgaaacattagtgatgtagttgtgggcttttgaactgcttcaagctggagtgatgtcgttgtggtgcttttgtgactgatcatctctggagcttttgtgaatgatctagctagctatctataaatgatctagttgtgaatgatattataactgtgatgcttttgtgaatatataattgttgtgcttttgtgttaaaaaaaaaaaaaaaa

SEQ ID NO: 2969 - DNA, 1821 bp, Zea mays
  Clone ID: ZEAMA-23APR03-CLUSTER785_246
agattaggttcggtgccctcttcgcctctgtctcccgaggtctccctgcggcggcggtcaccgtagtggactccggccacccccacgacaaccggcaaaagggtaagggagtgcaagaactagggtacaccggcctcatgaacagctccattaacaatctctttgatctcatcacgaaccaaggtacgggagtgtgaactatgccgtgcaaagacctgcgcttcactgcctttgcccacacctcaggctagaaaatggttcctgattccgtcaataaccaagaattgttctacgcatctctatgtatgctccaagcactatctctttaatctacgacaagaatttcatagcagctttgacttactattgaagttgatctttttactagtgtggtctgcttagcagtaggtagcactacaactagcaatgtatggatgaattaaaggaagtgaagaaggcagacaatcttacataaactctacatcttaaaactgccatgattggcaaagaagctggatgcatcctttgcattggtgtattcttatcaccaagcagtaacgtgaagcaagtcctgaccagattgaagctctgtatcagtacgccaaatttcagtttgagtgtggtaactactcaggggctgctgattacctttaccagtatcgtgctttgtgcacaaacagtgagcgaaatgtgagtgccgtctggggaaagctggcagcagaaatcctaatgcagaactgggacgtagctttggaggaactcaaccgcttgaaggaaataattgattcaaagaacttctcatcacctctgaatcagctctagaacaggatatggctgatgcattgggctctgttcatcttctttaaccatgaaaatggtagaaatgggatcattgatctgttcttccaggacaggtacttgaatgctatacagacaaatgcacaccatcttattaggtatctagctactgcagttgttgtcaacaaaaggagaaggaatatgcttgaagagttgattaaggtcattcaacaggagccccatagctacaaggatcccgtaactgaatttctggaatgcttatatgtaaactatgattttgatggtgctcaacagaaactcatagagtgtgagcaggtaactttgaggttgtttttcctgcaattttcaaggcctcaattttgttattcacgtgtgtgcttcttgaattatggaaaaagcctgaaagacaacacatccttttttgtgtgtgcaaaacatccttctgtgaaatgatcctcaaccatcaattcttttaaatgttccctagtaaaatgatttattcttgatggttcaaaagtttccctattccttggatgtatcatatgcatcggggatgtcatattgaagaattagtataataatatggactatttggaggggtctttaaatgagcttggaagttggtgcataaggctgcaacaccgtctagtggagggtgttttggacaaagaaagcttgtaccttaaaacaggaggatacaagaagctggagtggttgtctgaaggcttttgaactgcttgaagcattagtgtagctttggtgcttttgtgactgatcaactctggagcagctagagtgatgtagttgtgggcttttgaacaatagctggagtgatatgaaatattagtgatgtagttgtgggcttttgaactgcttcaagctggagtgatgtcgttgtggtgcttttgtgactgatcatctctggagcttttgtgaatgatctagctagctatctgtaaatgatctagtcgtgaatgatattataattgtgatgcttttgtg

SEQ ID NO: 2970 - DNA, 1542 bp, Zea mays
  Clone ID: ZEAMA-23APR03-CLUSTER785_261
aaactaaaccatatttctcaaaccctagattcggatccgccatcaacaggctccgccatcaacaggctcgaacgccctctcctcaaaccctaccagatcttgtcgttcggcgcctcaaaccccagattcggatccgccatcaccatagaggtgggggcagacggcatagcgctcatcaccatcgccaacctgcccgtggtggatgcgccatcgcctgaggcgagccgcggggaaatgagggatccttggaggcagagctggcgtcgcgtcgccggtggacgctggtgctggtgaacatggcgtcgatgctggaaaagatagacgagatgttgctgctcgccgtgtacaagaaggtgtgcacgtcgctgggcgcttctcgacggcgctgggctcccaaaccctttgtcgcgcgctcgttcaagccgcctactacctactcaaagcctacgcctccgcgcgtcatgatcgggcccgtgtcgtcgctgtcggagccttcacctgggccaccatcgccttcctcgtcgccatctccggcagcttcctctaggaaggccatctggtatttcgaaggaatctatgcgtactcccctcagataccaggtgttcgtttcccaggattaacccatcctggtatagtgggaactgcaccgtcagccaaacttcttaatgtatggaatgagagggagaaaagattggccgagacaagcccacagacccttaaactgtttgaagtgctacaccagaggccccttgccaatttaccgacccctgagaactgcttacttggaaagattcaggaggggactgctggatggcacaaagtggcgaatgaagcagccaggactattccgggaagggagaatggtggtaattgtgacataaaaaacctaagcagaggttccaaagtttatctgccagtatttgtcgaaggagcgaatcttagcaccggtgatatgcacttctctcagggcgatggtgaagtttcgttttgtggagcaattgaaatgagtggattccttgagctcaacttcttccagggattcatacctttgatccatccatcaaaaacaaagttcagtgcagcggtggttttgttgtaatgggtcagaggtggcagtaggaccattggcaccttcatcaatttaagttcagtgcagcggtgaggttcgacatgccccgtgcctactatcactctcgatttgaagaagagtctcaagattctgcaggtgttgtgttactcctaattcagttaccttactggcaataggatgccattgcaacatctgaaagtgcaaccatctgattgaagcggatttaattatacaagatagatctagaattgctttacttgagattcaagcaatgttggatgcttttgtgactgatcatctcttgagcttttgtgaatgatctagctagctatctgtaaatgatcttgttgtgaatgatattataattgtgatgttttttgtgaatatataattgtggtgcttttgtgtttatgtgatggatctatgactgtggtatactgattaattgtgt

SEQ ID NO: 2971 - DNA, 2473 bp, Zea mays
  Clone ID: ZEAMA-23APR03-CLUSTER785_284
attcgcccccgtccctgcagtcgcccgtgctccgcctgctccaccagggcgcctcgccctaggggatgggtctccgaccacctcccttcaccgccaccacgtgctcagtgacgcctaggtcatcggcgctgaagtttggaggccctgtacgtgcttcacagagatcgccgaccatgggctacgcagagatcgccatccgcccctctgggagcggcaagaggttcctggagaccatgaaggccatacagggggcactgataatgtcctccagcattcagatcattctaggctacaaccagctatgttattttctccagaaaatacagaggcagggtggcctatctcgaagattttcaaatgtgtcctattacggtctcacaaccccgccatataaactggatgctctggaaccttatatgagcaagaggacagttgaacttcactggggtaagcaccatcaagattacatggatggcttgaataatcagctggctaccagccctctgtatggatacactctggaggatctgataaaagaagcttataacaatgacaatccattaccagaatataacaacacagcacagtgaagagaaatgagagaaagcttttggttgttcatacacgaaatgctatctccccacttgcttttggtgacattcacgcttactacttagactacaaggatgataagctaacatatgtcacaaacttcatggaccatcttgtctcttggcatactgtcactctacgcatgatgcgtgcagagtcttttgtgaaccttggtgagccaaatatcccagaggcttgagctatagatacaccctagttatcatcatgaggtaataattcagtactttgatgcattgcacctagcacatatatatcttaatcacgtacttcaatgcaagaaacagggacactgtttagtttctttgtgcttttttcccagctatcgagtaacctttaatagtagaaattaatggaaattcaattcatattcataggtttgtagtgctctctcatggtacaacaaaactttttcttggaaaattagtacatgggaaaacataatactagtattgagattgatgttcatgcaccatgagatttcaggttacatggaggttttatgtaaaggttttcttttttctattttagctaaggccagggagtcgtgtgtgcccaaggcttaacctgccactgaactgagatgacaattagaggctgtcgctgtcacattagtagcacttggttgatctttattggcaaggaatgctgctataaagcatccagtccctcacaaactaaataaaacaaaaaaagcatcctacctttagctagttcttgcatccactatacttagggcttgtttggatgcccatgtattaactatctttagctagttgatgcgatgttcttgcatccactacactcaagcccacagaggatggctaatggtccagttatcttcccttttgtcacctcatctaaaagcaaacatttatatcttctatcatgttattcagtgtgcaatttttacgagtttgatcccttgttttccatccactgaataggcattcttcggatacatcggatcaaatcctgctggaggagccagagagttggaaaatctcatgtctcacaagaaatgcttatcaccccaatgtcatatacgccaagataagctgctgggatttcaccattgcccttggatattgctacaaggaaatcactagtcagcatccagtttgaagacatgcaacaaaacaactctagaagctatggagctggtagattctggagttggcagtaaggcagtgatccaacttgggctttgaagccatggtgctttctctagacggctattatgtctgtagtgttgttagaataatcctggttctgtgttttcataacttcatcatgctagtgttctgttgtagcggaacacagaatggaacggaacgatattcttgttttactggttgagcactacacgacggttgtttttctagggtgttctggacaaagaaagcttgtaccttaaaacatgaggatacaagaagctggagtggttgtctgaaggctattatgtctgtagtgttgttagaataatcctggttctgtgttttcataacttcatcatgctagtgttctgttgtagcggaacacagaatggaacggaacgatattcttgttttactggttgagcactacacgacggttgtttttctagggtgttctggacaaagaaagcttgtaccttaaaacatgaggatacaagaagctggagtggttgtctgaaggcttttgaactgcttgaagcattaggttagctctagagattttgtgaatgatctagctagctatctgtaaatgatctagttgtgaatgatattataattctgatgcttttgtgaatatataattgtgtttgtgtatattgattaactgtgtaaaaaaaaaaaaaaaa

SEQ ID NO: 2972 - DNA, 1606 bp, Zea mays
  Clone ID: ZEAMA-23APR03-CLUSTER78616_1
ttttttttttttttttgggtttagcagctccaactttagataagagtagctggatgttgcacagacacaggctacatgcagaattattacttattgtcgtcgtgatgatggccacgtagaggaagacgccgttgatggagagcaggcgatggctgcttcgaagaattgtatactaactacttcctttccatgactgggcaccgtgccgatccttcttggcgacaatggcgacggtggccatgcccaggaacatgccgtgctcgacgacgccagtgatccggagcaggcggtcgctgatgtcgcgcaggtcgccgcgaatgcagccgccgaagaacatctagaagatttagtttcccttgttgcttggtatgataataacaccaggatgatgattaacatactcctgcagacactcagcatatgaggataacgcacggacacgatacaactccaacttagataagagtagctgggtgttgcacagacacaggctacttgcaaaattattagtacttcttgtcgtcgctgttggcagcgacgatggtggtggtggccacgtcaaggaacatgccggtgatcaggcgatcgctgtttcgaagaacaggctactgcttgtagattactactgctacttcttcctgtccatgactgacaccgtgccgtccttgttggcgacgatgacggtggtggccatgcccaggaacatgccgtgctctacgacgccggtgatccggagcaggcggtcactgatgtcgcgcaggtcgccgcggatgccgtcctcgaagaacatctcgacgatgtagttgccgttgtcggtgacgaagggctgctccgactccgagtccgagtcttctccccccttggcgggagcggcggggacagtcctcagcctggcgtggaatccaggcaatccgtcgaagaggccgcggatgaggcccagcgtgtggagcgcgccgaaggggatgacctcgacggggatggcgcccgtgcagccgaggcgcggcacgagcttggactcgtcgacgatgacgacgaagcgggcgccggcgccctcgatcatcttctcgcggagcagcgagccgccgcggcccttgacgaggttgaggtccgggtcgacctcgtcggcgccgtcgatggagagcgcgatcctggcgcccgggagcgggagcagcgggatcccggcgcgcgccgcgtgggcctccgtcttgagggaggtgggcacgccggccacccccggcagcgcgcccgcgcggaggaggtcgcccaggcggtccagcgcgtgcgccgccgtggagcccgtgcccaggcccagcgtcatgccgggctccacgaactccaccgcgcggtgcgccgccacgcgcttcagctcttcctgcgtcagcttcccggacggcggcggcgaggcggcggcgctgcccatggcgaggtggggacgaggggttcttgggtggggagtgtcgggggtgatttcgggaattgggaggtcgggagagggaaaaaagggggcaagtgaatgggaggaccaggcgggaaaggggaggtgggcagcgcagggatagggaatcaaatcgccgaatcggaatggttctaggtaatggtctcgtgc

SEQ ID NO: 2973 - DNA, 1480 bp, Zea mays
  Clone ID: ZEAMA-23APR03-CLUSTER78616_2
agtaaaatagcgtgagaatcactgataacaaggtttgtgatgataacataaggatgatgatgatgattaacatactccatagtaatcagcagacactcagtatagtatgggaggatgacgcacggacacgacaacagctccaactttagataagagtagctggatattgcacagacacaggctacatgcagaattattacttattgtcgtcgccgttggcgacggtggtgatgatggccacgtagaggaacacgctgttgatggggagcaggcgatggctgcttcgatgaattgtagactaactacttcctttccatgactgcgaccgtgccgtccttcttggcgacaatggcgacggtggccatgcccaggaacatgccgtgctcgacgacgccggttatgcggagcaggcggtcgctgatgtcgcgcaggtcgccgcggatgccgccgtcgaagaacatctcgacgatgtagttgccgttgtcggtgacgaagggctgctgctcggagccttgctccccctcggggacggtggtggtcctgagcctggcgtggaagccgggcaggccgtggaagaggccgcggatgaggcccagcgtgtggggcgcgccgaacgggacgacctcgacggggacggcgccggtgcagccgaggcgcggcacgagcttggactcgtcgacgatgacggcgaagcgggcgccggcgccctcgaccatcttctcgcggagcagcgagccgccgcggcccttgacgaggttgaggtccgggtcgacctcgtcggcgccgtcgatggacagcgcgatgctggcggcgtcgagcgggagcagcgggatgccgacgcgcgccgcgtgcgcctccgtcttgagcgaggtcggcacgccggacacccccggcagcgcgcccgcgcggaggaggtcgcccaggcggtccagcgcgtgcgccgccgtggagcccgtgcccaggcccagcgtcatgcagggctccacgagctccaccgcgcggtgcgccgccaagcgcttcagctcgtcctgcgtcggcttcccggacggcggcggcgaggcggcggcgctgaccatggcgagggtggtggggagggggcggcgcggggttgaggtgaggatcgggaacgggaattgggtttctgagaagcgggggtgactctgttcgggaattttggatatttttattgtagtaggaaagaggggcgggaaatgggaggtgggcagagcagggggaaggctgggaatcaaatcgccgaatcggaatggtccgtggaacccgtgcccaggcccagcgtcatgccgggctccacgaactccaccgcgcggtgcgccgccacgcgcttgagctcgtcctgcgtcagattcccagacggctgcggagaggcggcggcgctgcccatggtgaggggcggtggcgggagcaagggaggcttggaccttggagtgacggcgcgcgtatctacagcagccgcagtttg

SEQ ID NO: 2974 - DNA, 1004 bp, Zea mays
  Clone ID: ZEAMA-23APR03-CLUSTER78616_3
gagggataataaataagatatattggaatcaccagtaggaaagatatgagatgataaaacaaaatgatggtttcacaacggtaacgagcagaacttaggtagctggatcacacacggacgcacacatacaggctacttgtagattattacttcttcttgttgatgactgtgacggtgccgtccttgttagcgacgatgactgtagtggccatgccaagaaacatgccatgctcgatgacgccggtgatccggagcagacgatcgctgatgtccagcaggtcgccgcggataccgtcctcgaagaacatctccacgatgtagttgccgttgtcggtgaggaacggcgcgtccgagtcctccccattggcggcggggaccgtcctcagcctggcgtggaagccaggcactccatcgaacaccttgcggatgaggccgagcgtgtggggcgcgccgaaggggatgacctcgacggggacggcgcccgtgcagccgagcctcggcacaagcttggactcgtcgacgatgacgacgaaccgatcgccggcgccctcgatcatcttctcccggagcagcgacccgccgcggcccttgacgaggttgaggtccgggtcgacctcgtcggcgccgtcgatggagaggcggcggcgctgcccatggtgaggggcggtggcgggagcaagggaggcttggaccttggagtggcggcgcgcgtatctacagcagccgcagtcggcgacaagtcccggcgcgcccacgcggaggaggtcgcccaggcggtccagcgcgtgcgcggccgtggaacccgtgcccaggcccagcgtcatgccgggctccacgaactccaccgcgcggtgcgccgccacgcgcttgagctcgtcctgcgtcagattcccagacggctgcggagaggcggcggcgctgcccatggtgaggggcggtggcgggagcaagggaggcttggaccttggagtggcggcgcgcggatctacagcagccgcagtttg

SEQ ID NO: 2975 - DNA, 1122 bp, Zea mays
  Clone ID: ZEAMA-23APR03-CLUSTER7867_2
agcagtgccggaccgtggctcgctagaaaaacacaccaccgacggtttcggacccgatgggttcctctgctcgtgctcgccacctcttctttctcgccgccttggtggccgtcgcggcgcctcgctcggcggacgcgtggggcggtggccgcttcttcttcagcaagaccacgcgtgccgaagccactgctgagcccgacaagaaggccgccggcggggacaccgttgccgcgccggcgttctcgcgcccctcgaccgccggcagcggcggccgcgggtacgggctctacggccgcctcgaggagaagtacccggcggactacttccgccgtggcgtgcaccgcaacaccgagaagctgacgacgacgaccggcggcgagcgcgtccggacgacgttccccgaagacagcggcaggggtcggccgtacccggaaaacggcagcggcaggagccgcccgccgtggtactacacggccttccaccgcggcaggcagcaggagcaggagcagcgggacttcgggatgagcgacacgaggctgtaccagaacggccgctactactacgacgtggacgccggcaggtacggctacggccgcgagtcgaaccccatgcggacgcgccccgacgagggagagttcggctccgggtacggccgaccccgcggccccgccggtggcaggcgcggcagtagctacggcgacgcggcgggttaccagcagcggtacggcaacgacgaggagttcggggacggagccatggatcagaacacgaacggcgccttccaggaggaagcaggccagaacggacgacgatacactccatgagcttgcatcgtgtgtcatgcgtcagagatacactcagtcgtcgtcgtgtgttgctagcgtggttactatcgtgtgctccatctccgagtaatctcccatgggacgatgcgattgagtacttgtaacttaatcgtgggcagaaccagctgcctgcctgcttccgcggacgtctacgcgcaccactggtgacgcaagcaatcagtgaataaggtgtgtgtgtgtgtgtacaatgtaactgtgttgcagataaaaaaaaaaaaaaaaaggggggccgctcgcgttctagaactagcggacg

SEQ ID NO: 2976 - DNA, 1000 bp, Zea mays
  Clone ID: ZEAMA-23APR03-CLUSTER7869_16
aaaggaaactcactcccactttactcctatccactgcggcctggacgcgtgcgagaggcttgaccaagcagcagcagcagcagcagcgatggcgcctctgaagctgtacgggatgccgctgtcccccaacgtggtgcgcgtggccaccgtgctcaacgagaagggcctcgacttcgagatcgtccccgtcgacctcaccaccggcgcccacaagcagcccgacttcctcaccctcaaccctttcggccagatcccggctctcgtcgacggagacgaagtcctcttcgagtcccgcgcgatcaaccggtacatcgccagcaagtacgcgtcggagggcacggacctgctccccgcgacggcgtcggcggcgaagctggaggtgtggctggaggtggagtcgcaccacttctacccgaacgcatcgccgctggtgttccagctgctcgtgaggccgctcctgggcggcgcccccgacgcggcggtggtggagaagcacgcggagcagctcgccaaggtgctcgacgtgtacgaggcgcacctggcccgcaacaagtaccctcgccggggacaagttcacgctcgccgacgccaaccacgcgtcctacctgctctacctcagcaagacccccaaggccgggctcgtcgccgcccgcccccacgtcaaggcctggtgggaggccatcgccgcccgccccgcgttccagaagaccgtcgccgccatccccttgcccccgccgccctcctcctcggcttgacctcgccttgcgctgcctgggtcgcggatgcgtcggagccccgagtcgaataaaagaggccgcatcctgtcttgcatttgctgctgcgccatgtgctataacagcctgtgtaataaacactgttgctttcgtgtgtgttcattgccttttggttggttggtccttgcatatcctactagtgctgatctttttgtgaagcttggattggatggacgcgttttcttcgccgaaaaaaaaaaaaaaaa

SEQ ID NO: 2977 - DNA, 647 bp, Zea mays
  Clone ID: ZEAMA-23APR03-CLUSTER790732_1
agatatgatgctgcactgcacatttgctatatctgaggctcctgcgcgcgccttggcccttggccaggtgtctgtcatgcgggcgatgccgcaggaagaagaagccgcggtggcgacgacgaccatggccgggggcaaggtggcggcgctgctggccacggcggccgcgctgctgctgctgctcccgctggcgctgccgccgctgccgccgccgcccacgcagctgttgttcgtccccgtggtcttgctgctcctcgtggcgtccctcgcgttctgccccgccgcgacctcctcgccgtcgccgatgcatgccgccgaccacgggtcgttcgggaccactggatcaccgcacctatgttgacgctgacgatgagaggtctcgtcgatcgacggtcggcttgcaatggcgcgtcggaatcaagcagttcgcagttcgcacacgcatgcatatgcctgacgacgatgccatggatcggagcgaggaaaaaaaatgtacagtacagggtaaacttgctagtagagtaattggattgcttaggcgcttatagcttagctgcggccttgtagcgtgagtgtgcgtaacagtgctctggttctttctttccaaaaaaaaaaaaaaaaaagggcggcctcgcgatctagactag

SEQ ID NO: 2978 - DNA, 1808 bp, Zea mays
  unsure (1)..(1808): unsure at all n locations
  Clone ID: ZEAMA-23APR03-CLUSTER7912_2
gcacgagaccattacctagaacatcctaatcaaaaaccccaccagtctctggcaggttctcccccccacccctctccgtctccgatcccgtccgcattgcttcgcgccggaccaaggaggaagggtcggcgtcgcaggcattgcggtctgctagccacgagggccatggacccgtgcccgttcgtgcgggtgctggtcggcaacctggcgctgaagatgccggcatcggcgccccccgccgccgccgcggcgtccggctccggcgtgcacccggccacgccgccctgctactactgccgcatccgcctcaacaagctgccctaccagacggcgcccgcgccgctgctgccggccaccgaggagggctcggcgccggcgccggcgccggcgtcgtgcgcggccgccttccacgcctccaaggccgacctggaccgggccgccgccaggcccgcgctcttcctcggcggccgcctccgcaccgcgcgcctcaaggtggccgtgtacgccggccgcgggggcggtgaaggcggcgggaggctgctcggcaagctcgtcttccggttcgacctcaggcgcgccgtggccgagcccttcgtcttcctcagcggctggttcgacatcggcaagcgcggcgccgggaagccggcggcggccaacgccgcgcgcgcgcagctcaacctcaccgtcctcggcgagcctgacccgaggttcgtcttcgagttcgacggcgagcccgagtgcagcccgcaggtgctccaggttaaggggagcatgaagcagcccatgttcacgtgcaagttctcctgccgcagcaacagcgacctgcgctcgcggtccgtgcagtccgactcgggcgccgtcggcccgcgcaactggctggcgaagctgtggtccgagcgcgagcgcgagcgcgcggggaaggagcgcaaggggtggtcggtgacggtgcacgacctgtcggggtcgccggtggcgctggcgtncgatggtgacgccgttcgtggcgtccccggggacggaccgcgtgggccgctccaacccgggcggctggctcatcctgcgccgccgcgtggacgggacctggacgccgtggggccgcctcgagtgctggcgcgatcgcggcggcagcgccggggacgcccagctgggctaccgcttcgagctggtgcccgaccacaacagcaacgtcacgggcacgggcgtgtgcgtggccgagtccggcgtcccggcggcccgcggcgggcggttcgccatcgacctgaccacggccggatcccccgggcggggcagcggcgagttgagccgccacgcgctctggcccccgggcggcttcgtgatgtcggccgccgtgcagggggagggccggcgcggcaggccctccgtggagatcggcgtggcgcacgtcgggtgcgccgaggacgccgccgcgttcgtcgctctggcggccgccgtcgacctcagcatggacgcgtgccggctcttctcctgcaagctgcgccgggagctgtcggcgtgaacggcgaggggggagggagattggatggtgatcggacgaacttgttttcgttgtttgtctgtaatcccgctgagttctggtgtgatgttcgtcttctaggtgccttttgtagcttagaagaagccataaaactgggctctggggtgagcgaggcgaggtgtgtgttgttggatgtttttttttggattcccagcctctccgcatcgtgctgctaccgaagtggtagagatcaaattttcaaagctgtttgtgctgtcgctgtttgtgctgttcgtcgagtgttcttgttgtg

SEQ ID NO: 2979 - DNA, 2101 bp, Zea mays
  Clone ID: ZEAMA-23APR03-CLUSTER7980_2
aacaacggtcaagggcctagctatttgttaactctggcccctcacctgctccccttctgtccagcccacgggagggcgactagggttaggggcgaccggaggtccccgcgcctgcccaaatccacccatcccttccgttcaagccgccggagctcccaggccgctggtgtcgaagccgtcgccccttccttccaggcccgcctcctctctgtccgttctgtcttggtcgccgaagctcaagaccacagtgtcaggaagttctccaatcttccagccaaacacaattcatcagtcagatacactttgaccgaggaattattcagaatcactccacgagaggatcagctttcgaagctagagaagcagagctctaccaaacaggccaggacgtctctcaaatccccagttcagtaactggctaactgtaggagaaggagagagagatggagaacggcggcgctaaaggcgacgtccccgacgatgcgaacgagcattgccctggaacacagtctgaggaggcaggcaaggcagatgcctgcgctgggtgccccaaccagcagatttgcgccaccgcccccaaggggcctgatcccgatgtggttgctattgttgagaggttggctactgtgaaacacaaattgttagttttgtctggaaagggaggtgttggaaaaagcacattctcagcccaactctcgtttgccctagctgaaatggaccatcaggttggccttcttgacatagatatatgtggccctagcatccctaaaatgctaggccttgaaggacaagatattcatcaaagcaaccttggctggtcacctgtgtatgttgagtccaaccttggtgtgatgtcgattggtttcatgctgcctaatccagacgatgctgtcatatggaggggtccccgcaagaatggactgatcaagcagttcttaaaggatgtcgattggggggagattgactatcttgttgtggacgctcctccaggaacatctgatgagcacatctcgatcgtgcaataccttcaagccacaggaatcgatggcgcgataatcgtcacgactccgcagcaggtctctctgattgatgtgaggaaggagataaacttctgcaagaaggtcggtgttcctgtcctaggtgttgtggagaacatgagtggtctgaggcagccgctttcagacctcagattcatcaagttagatgaggcgggcaagacagatgcgacagaatgggccctgaactacatcaaggagaaagcccctgagcttctgtcggtcatggcctgcagtgaggtatttgatagcagcaagggaggcgccgagaagatgtgccatgaaatgggggttcctttccttggtaaggtgcccatggatccgcagctgtgcaaggcggctgaggaagggaggtcatgctttgctgatcagaaatgcagtgccagtgcgccggctcttcgaaacatcgtgaagaagctgatcaaggccgagtgagaaaataatgttggcctgctggggaatctggtagtgagaaatgagatgaaatgacagatgccagagttctcgttaccaatatatatatatgttacggcgttacacactgaatctgtattagtgcttgtgttggacctgtaagtttttgttcgtgaataatcagtgggtgcacagactattaaaagcttagtttctgctctaccaagtggactatgtttgcttgaacgatatgtactgtacgcaccagaactgaatgagagtgtacggtgttagcaattttatttttaaaaaaaaaaagaaaaaaaagggcggcatagaggatccaagctcacgtggggtggaaaggaaggtcatgctttgctgatcagaaatgcagtgccagtgcgccggctcttcgaaacatcgtgaagaagctgatcaatcccgagtgaaaaaataatgttggcctgctggggaatctggtagtgaaaaatgaaattaaatgccaaatgccaaagttctcgttaccaatatatatatatgttacggcgttaccccctgaatctgtattagtgcttgtgttggccctgtaagtttttgttcgtgaataatcagtgggtgcccagactatt

SEQ ID NO: 2980 - DNA, 1465 bp, Zea mays
  Clone ID: ZEAMA-23APR03-CLUSTER8029_9
aaaccacccgaccccacatggccacatccgcgatgcccacgccgtgagcccgtgaggcgcgccgctggagccgccgcagccgttactatgacctcgccggcccccacctcctggttctccggcctctcgcgctcctcctccaccatggccggcggcgtcgcctcggcctcggcctccgcctccgcctccggccccgcctccgcgttcctccccgacgcgcccaagtccgtaatcggcgccggctccggaggaggcaagcggaatcatctctgcggggcgctgttcaagtacggccccaaatctgcgcaggtagcattcaggactggggattttaaccatcaggtgatcttcattggtggcctcacagatgggcttttagctactgattacttggaaccattgtcacttgcattggaggttgagaaatggtccttggtacagccattgctttcttcatcatacactggatatggaatttccagcttacagcaagatgcgttagaactagagcaactcatcagttacctaataaataaggaaaattctgaaggagtaatattgcttggtcatagtactggatgccaggatattgtgcattatatgcgcacaaactttgcctgttcgaaagcggtttctggggtcatcttgcaggccccagtaagtgacagggagtatagagcaactcttccggaaacagctgaaatgatagacctggcagccaaattgattagcgagggccgtggaatggatttgatgcctagaaaagcaaactcagatgctcctattactgcctacaggtaccactccctttgttcatatatgggtgatgatgacatgttcagttcagatctaagtgaagatcagctgaggcagagacttggtcatgtcaaccacacagtgccaggttattttttcaatgggggatgaatatgtgcctgaatatgttgataagagggctctagtagacaggctatgtagggcactgggaggtgcagagaaagtcgagatagaatggggaaaccatgctctgtccaacagagtgcaagaagcagttgtggccattgtagattttgtcaagagggaggggcccaaaggctgggatgacccatggagctagatacagcagttataatctcatttgtaactagtttgtgcttttcctcttctctcttttctccaattgtaacttctttcttttgcattattattggtccatttttcaatagtgatatgctatttttcttataacccccacccccacaaaaaaacatgcatcgcgttctcattctggtatggcgtatcgcatatgtaaattgcgttcggaatctttatttagccggctgtctttggtggatcatgtaaaataggggcagactgtctttggtggatcatgtaaaatatgggttgtgacagtttgaaacagaggatgatataggggatgtgacaaggagctgttggagacggc

SEQ ID NO: 2981 - DNA, 1418 bp, Zea mays
  Clone ID: ZEAMA-23APR03-CLUSTER8085_1
gcctgggaggccgcctccgccccctccccctcggaagccctctcacaactccccaaggccccttctcaacttcgtcgacaacccctaaccctcccggcgaactcacccttcgaaaaccctctctcaaattcacaaggccccgccgccgccgcctcgtcccccattcatcttcgccgaaaccctaaccctagtcgccgcggccacccttcccggcgacgccatgtcgaacccgaagggctccaagatgctccagttcatcaactaccgcatgcgggtgacgatccaggacgggcgccaacttgtgggcaagttcatggcgttcgaccgccacatgaacctcgtcctcggcgattgcgaggagtttcgccgcctcccgccctccaagtcctccaagactaccggtgaacgcgaggagcgccgcacgctcggcctcctcctcctccgcggcgaggaggtagtatccatgaccgtcgagggcccaccgccgcccgacgagtcccgcgccaaggccgcggcggcgggcggagccctcgccggccctggcatcggccgcgccgctgggcgcggcgtgcccaccggcccgctgctccaggcagctcctgggcttgctggccctgtgcggggcgtgggtggacccgcccccggcatgatgcagccccagatctcgcgcccgccgatgcccaacctgtcggcccagccggtgtcgtacccgcaggtcgtgcgcccgccgcaggggatgcctccgccaatgcgtcctggaatgccgccgcagatgccgatgcaattccgcccgcctggggcgccgcctgctccgttccccggggcaccgccacaacagtacatgaggggaccgccgccgatggggccgccccaggtgaggcccgggatgccggggccgccaccgcctggaatgaggcctggaatgcctccgccaccattcggacagccgaggccagggatgccgcctccgccacctggtccacagcagcctggacagaacccgccgcagtagccttacctggataagcttcttgcagatacacctatggaagatttttttgtatcgcgagagaggatcataatcgcacctggggaggacctgtgaattgcaccaaagcttcaccattctgtctcgcatcagggcagtagtttcctttgggtattgtgagggaggagaaccttgcaagcgtgtgtaccactcatcctttgatgtgagaagggaccttgtacgtagagaggccaggacttgtattttaactgttggtgttggttatgttaggaaatatggataacttatttcggctgcagtcttgttgttacggtgttgattcatgctctgttgaagttgaagcccttgttttctctctctaaaaagtactttctgtgtttgctgacgaagcaagataattggtttagag

SEQ ID NO: 2982 - DNA, 1793 bp, Zea mays
  Clone ID: ZEAMA-23APR03-CLUSTER809_25
gtacgtcgtagcggctcgtccagctcgcgctccagctcgcgcgccaccgccatggacccgtacaagcaccgcccgtcgagcgccttcaaccccccctactggaccaccaactccggcgcccccgtgtggaacaacgacagctccctcaccgtaggcgcacgaggtcccatcctgctggaggactaccactgtgagaagctagccaacttcgaccgcgagcgcatcccggagcgcgtggtgcacgcgcgtggcgccagcgccaagggcttcttcgaggtgacccacgacatcacccacctgacgtgcgccgacttcctgcgcgcgcccggggtgcagacgcccgtcatcgtccgcttctccacggtcatccacgagcgcgggagccccgagacgctccgggacccgcgcgggttcgccgtcaacttctacacccgggagggcaactgggacctggtgggcaacaacttccccgtcttcttcatccgcgacggcatcaagttcccggacatggtgcacgcgctcaagcccaacccgcggacgcacatccaggacaactggcgcatcctcgacttcttctcgcaccacccggagagcctgcacatgttctccttcctcttcgacgacgtcggcatccccgccgactaccgccacatggacggatccggggtgcacacgtacacgctcgtcagccgcgccggcaccgtcacctacgtcaagttccactggcgccccacctgcggcgtgcgctcgctgatggacgacgaggccgtccgttgcggcgccaaccacagccacgccaccaaggacctcacggacgccatcgcggcggggaacttccccgagtggacgctctacatccagaccatggaccccgagatggaagaccgcctcgacgacctggacccgctggacgtgaccaagacgtggcccgaggaccggttcccgctgcagcccgtgggccgcctggtgctcaaccgcaacatcgacaacttcttcgcggagaacgagcagctggccttctgcccgggcctcatcgtccctggtatctactactccgacgacaagctgctgcagaccaggatcttctcctactccgacacgcagcgccaccgcctcggccccaactacctgctgctaccggccaacgcgcccaagtgcgcacaccacaacaaccactacgacggatccatgaacttcatgcaccgccacgaggaggtcgactacttcccctccaggtacgacgccgtcaggaacgcgccgaggtacccgatcccgaccgcccacatcgccggccgccgagagaagactgtgattagcaaggagaacaacttcaagcagcccggggagaggtaccgcgcgatggacccagcaaggcaagagcggttcataaccagatgggtcgacgcgctctccgacccccgcctcacccacgagatcaggaccatctggctctccaactggtctcaggccgacaggtctctgggccagaagctcgcgagccgcctcagcgccaagccgagcatgtaagatcaaccagacaagggcgccgcgcgggggaggacggagctctctgtctcgtcgctcatgcatcatcatacgcatggaaccaagacaaattactctagcagactagcacgcgtactgaatcgcgtttccgcctgatcctttccctagtttagttttttttcgccccggataaaggctgctagcttggttgtaataatgggtggctgtgtccagaactcttgcactcttccagatgcccgaatataatatattcctttttccaaaac

SEQ ID NO: 2983 - DNA, 757 bp, Zea mays
  Clone ID: ZEAMA-23APR03-CLUSTER8103_21
acacacacacacatccatcaaataaacaagcgcacacgaacaaatacctcgccgccaataatggcctccagatcctccattgtgctcgccacggcgatgctagctacactattcgcggttggtttgtgcaccaccccgctcaccttccaggtcggtaagggatccaagcctggccacctgatcctcaccccgaacgttgccaccatatccgacgtggagatcaaagagcatggtggcgatgacttctcctttacgctgaaggagggcccgaccggcacctggacactcgacaccaaggccccgctcaagtaccccctttgcatccgctttgctgtcaagtctggtggctaccgcatcgccgacgacgtcatccccgccgatttcaaggctggcaccacttataagacgacactcagcatctaatcagcatctgaagatgaactatatttcaaaagagctcatctggcgcacgtgttagcaagacaatttttttctttggttattttatagcaccaaaccacccaagaaataagttatgctacatgtccatatgatgccttgttgtgttgggttgatatttttacataaactaaatacattatttatttaagatctttggagaaatttgttgatctggtctagctttatcgtttgtgggcgatttgtgaactagtagtatgtttgtttctatccgagccggaggcgatacttaaccatggatacttgttgtgagttcgtttcaaaaaaaaaaaaaaaa

SEQ ID NO: 2984 - DNA, 1600 bp, Zea mays
  Clone ID: ZEAMA-23APR03-CLUSTER8103_30
atagaatagcacagtcggcgaccataggaccagccactgtcggcaatggcggagcccaaggcgtcaaagagtaggtccaagtccaagtccaagagcagccacgacggggcggcgtcgaacaagtccaaggccgcgcccgcgccggcggggaccctggacgcgcacttcacgccgtgcgcggacgtcaaggggctccgcttcggcgcgcagctcgtgacgcgggcgctcaccgtgcgccgcgcatcgccgctggagctcccgcacctcctccgcgccgcgccctccccctcctccgccgcccccgcggcggcggacccgctgtcgttcgcgcccacgacgacggcctacatcccgaccagcttcgccatcctggcgcaccacgcgtggcacaccctgaccctgggcctgggcaccaggaactccaaggccgccgtgttcgtgttcgagtccgccaccatgaaggccgcggcggacgccgcgtggccgggcgtggtcccgctcggcgacgtcgggcgccgchtcctccgcgccgcgccgggggcgcccgagatggcgcgcttcaagttccgcaagggctgcctcaccttctacgtgtacgccgtccgcgccgccggcgcgcgcgggttcgcgcgcgccgacgagctccgcgccgtcgtcgaggccgtcgcccgcctcaaggacttcctcgaccacaccgccatgctcgcgctgccgggacagaggagcatcgacgtcgccgccgccgccgccgcgcaggtgggcgtcgtgcattgacggcttgtgacgaactgtgaataatttctttgtgttttttcctcgtggtgtgtgcgttggttttcttaatgcggcagtttcgttttggattgagatccgtgtttgttgtgcgattcattggttctccggtgtgaaattgttcattattagcattagaagaagacaggcacacacacatccgtcaaagaaacaagtgcacacaaataaatacatcgctcactagattgccaagagcaatggcctctaggtcatccatcctgctcgtcatggtggcgctggctacgctattcgtggttggttcgtgcaccaccccgctcaccttccaggtcggcaagggctccaagcccggccacttggtcctcacccccaacgttgccaccatctctgacgtggagatcaaggagcacggtggcgacgacttctcctttacgctcaaggagggtccgactggcacttggacacttgacaccaagaccccgctcaagtaccccctctgcatccgcttcgctgtcaagtccggtggctaccgcatcgccgacgacgtcatccccgccaatttcaaggccggcaccacctacaagaccaccctcagcatctgattagcctcttatgacgaataatatttcaagagagctcatccggcccatgtgccagcgagctaatatttaatttttttctttggatatattgaggcaccacacgagccaagaaaaaagttatgctacatgtcccgtctcacgccttgttgcgttaggttgatatgcatgattacatagattaaactacacttttatttaagattttttggggagacatatattgatct

SEQ ID NO: 2985 - DNA, 1575 bp, Zea mays
  Clone ID: ZEAMA-23APR03-CLUSTER813_4
gatttggccctacttggccgaggacaagtttggcaggattcacaagtgctcgtagcaaatctacaaaatccccaaccgcctctcaacaaagtctccccacgggaggtacacagctacgcgcaaacccgcgtctcgcgcgaagaatccgcatttccccttccccgcaccgcaccgcacccaacccccgtcggagagagagatggcatcggtggcggagatgcagcccctcgcgccggcggggtaccgccgcgcgccggagatgaaggagaaggtggaggcgtcggtggtggacctggaggccgggaccggggagacgctgtacccggggatctcgcgcggggagagcgccctccgatggggcttcgtccgcaaggtctacggcatcctcgctgcgcagctgctcctcaccaccgccgtctccgccctcaccgttctccaccccaccctcaacgccacgctctccgactccccgggcctcgcgctcgtgctcgccgtcctgcccttcatcctgatgatcccattgtatcattatcagcacaagcacccacacaatttcgttttcctgggtctgttcacgttgtgcttgagcttcagcatcggtgtggcttgtgctaacacccaagggaaaatcgttctggaggctttagtgctgacggctggcgtggtggtttctctgactgcgtatgctttctgggcgtcaaagaagggcaaggaattcgggtacctggggcctatcctgtcttccgcgcttactatcctcgtcctaactagctttcttcaggttttcttcccactgggacccgtgtcggtgggcttgttcggtgggctaggggctctggtcttctcaggcttcatcctgtacgacaccgagaacctgattaggcgccacacctacgacgagtacatctgggcgtcggttgggctgtacctcgacatcctgaacctgttcctctccatcctgaacatgctcaggagcatgcaatccgacaactagccggtcaaagcaccgcaccgcggcctcttgatcgaacacggtataccccctagcggtcctgtgctctggttgttaagaggacgggatcgaagtgcgacatatgtattgtctattgtatgagcccactcgtgtcaacactgcaaacaattgtggtcatgtcaccttgtatgttcttcgtcactttgcaaacaactgtaagtacctgatatcgttttgcgctcgtgctattcgcgctaaaaatcacaatgatccagtaacaggtgaaaaaaaacggttttgtgcctgaacctgttcctttccatcctgaacatgttcaggagcatgcaatccgacaactagctttttgatcgaacccggtatacccccatggtaaatgcggtcctgtgctctggttaaaggacgggatccacgtgccacatatgtattgtgtgagccccctcgtgtcaaccctgcaaacaattgtggtcatgtccccttgtatgtttttggccccttttcaaacaattgtaagtccctcaaatcgttttgcgctcgtgctattcgcgctaaaaatcccaatggtccagtaacaggttcccctc

SEQ ID NO: 2986 - DNA, 1571 bp, Zea mays
  Clone ID: ZEAMA-23APR03-CLUSTER81597_1
ccaaatatatattgcttagaatatatattgcttattaactagttgggtaacaagtccgcaacctttgcctgactcttttttgttattatagctcaaaggtagatttgcattggctttggaacaacatttggttcaagctcaagcaaaccctaatagcaataccatactatccctaataatggtatggcatctcaagaagaaagccatgcatgagagaatgggagatgaagagatatctagctagcatcatgaagacatctaactaaacatggagatgatggaggtagtaccatttttatatattcgacatgagcatgcatgcaattaggtatttgagctacgacgaccaatcgagcgagatgatctgcccgcctcctgcggcggcgtgctagctatgctgccgcttgcatgttcatgtccgagacccgtcgcctcttgggccggtctccggcagcgcctggcctctctaccagagcccgcagggcttccttgaggaagtcaccgccgccgccgtctgtggcaccgcccgccgagtcagcagcgcgtccaccgtatccgtcatcacctcccgcgacggcaccgccgccgccgtcgacgacgtcgcgcgccaggacgagcacgttgcggacgcggccgccgagggtggccatctcggagcggagcgtgcggaggcggagcgcgcgcagcgtctcgatgaggtccgggaggaggtcggagcggtagtcgcagcagacggaggcctcgaagacggcgcggctgcccgacgcgagcaccacgatctcgtcgtgctccttcgggaatatgtgcgccggcgccgcctccccgacgcccgccgcccgctgctataggtcccgcaccttctccaacgccgtcgccagcagcgaagcgatctctctctcggggtcgcaggcgagcacgttgcggaggcggtcgaggtgtgatgtaatgcgctcgcgccggcgcgtgtcggcctcccgctgggtgcgggacgcggcgagcgcgcggtcgtgggcggcggcggcggccgccgcctcgtcctcctcggagccagcggcgccagcggtcgcgggccagatggagcccatgaaaaagggcggcagcatcgtcccggcggcgtcgccggcagcctgacgccccgctcccgcaccgcccgccgcgagcgccgacacttcgaccgggaacatgtgcgagctagctactagcagctggtcgatcctcttgtcgcccttgcagctgggacggttgctcctcgagtgagtggcagggagaggcgcagcgcagcgcagcacgcactgctggtgtcccagccgcccccgcccggcgaagctagcactgaggcgtgcagctggtatggtagctagctactgcgcggcggtagtggcggtggtggtgcgagtttttgcgccgtggtgttattcctaggacttggttggactgcaagcgagatgacgaagcggatttgatggatggggagagagagagcgacacggacagtgaggagagatgggatccggcacgttgcggggtacgtcgaggtgcgacttaatgcgctcgcgccggcgcttctcggc

SEQ ID NO: 2987 - DNA, 1137 bp, Zea mays
  Clone ID: ZEAMA-23APR03-CLUSTER819_6
actcgcgtcgcgcccctccactgcaccagcgtcatggcggtggcctcgacctcgccgctgtccgccaagcccgccacggccccctcgccgcccgctcccggatccgggctcctcgctctcggcgttcgccgcgcccccgccactgccgcgtggaggaggctccgcgtggaggcgatcaggacgcagcgggagaagcagcgggcggaggtgcccgtcgaggagtccgcccccgccagggacgctgccgcgcccctggccggaaacggagccggagccggagcggacggctccgtggttccttcctcggacgacagctgggttgtcaagctcgagcagtcgttcaacattttcgccacggattcggtgattatggtactcaagggcgtgtacggtgatcggtactacgccaggttctttgcgctggagacgattgcgagggtgccgtacttcgcattcatatcggtgcttcacttgtatgcgacctttggatggtggagacgagctgattatataaaggttcactttgcgcagagctggaacgagttccatcacctcttgatcatggaagaattgggtggcgactctttgtggtttgactgttttcttgctcggtttatggcattcttttactacttcatgactgttgcaatgtacatgctgagcccacgaatggcatatcacttttccgaatgtgtggagagacatgcatattccacctatgatgagttcctcaagctccatgaagaggaattgaaaagactaccagctccagaggcagcattgaactattacatgaatgaggacctttacttattcgatgagtttcaggcatcaagaactccaggttctaggaggcctaaaatagataacttatacgatgtattcgttaatatacgagaagatgaggcagagcactgcaagacaatgaagacctgtcaaacacatggaaatcttcgttctcctcattcaacgccgaactgcttagaagatgatacggaatgtgtaatacctgaaaacgactgtgaaggtattgtggactgtgtcaaaaagtcccttacaaagtaaatagactatattctttcatgtgtttaactgttttcaggtgtcgtagtatacaaagtataaaattttgatgat

SEQ ID NO: 2988 - DNA, 1248 bp, Zea mays
  Clone ID: ZEAMA-23APR03-CLUSTER8210_2
gcacgagaccattacctagaacatcctaatcgaaaaatcatcatcgactccacctggaactcgctcactggcaatggctaccaataccaagctcgtggcccttggcttggccgtcctcgtgagcgttgggttctccgatgcagcgagggtagttaggcttgggagctatgcgtctgccggaggaggcggcggcggtggaggcggcggctccggatcgaccggggctgctgggtacggcggtgggtctggcggtggcggtggctacggcataggcaagggtggcggggactggtggaacaatttcgtctccagcgtagcgggcggtggtggtgggggacagggcggagggggtggcaccaacggtggatccgggtccggcggtgggtcgggctatggttctggcaccagttccaccgcagcctctggccccagcagtggcaactacgccaacgctgagggcaagggcgccggtgggggcatgggcggcggtgccgatggcgcctacggttctggtgccggtggaggcgttggcaagggccagggcgagagtggcgtcgcattggcaccgtcgtccgatggctactacaatggcggcgccgctgatgctaccggtggtggttccggcgctggcggtggacatggcggtggcgccggagctccaagctacgggactggaggtggccttggcggaggcaagggcgaggccggcagcgacggtcctggggttcaggttacgcggcgggaatcggtgctggcactggcggcggcggtggcggcggattccaaggcgcctctggtggtggcggtggctctgggtccggatccggcagcggtggaatccactgagtttccctgcggcatgcagctggacggagcgctcggcgtgtagtgtcagtccattttggagtcggttcgtgtacctgagttttccttgaggagatgctggttttcgcattctttgttgcaagaattattagtcaggaataatgggcttcgttcgtgattgtagttcgagtaggtaggtagtccagcatgcaactgacatgtaatggctacaggctactacgagtatatgcttgcatcgccatcttttgatgtgccccttgttgttactctcatcgatctttagaggtcgttgctaccggtttttatcttccaaaacacaaaatatactgggacgactcttgcagtctcttgctactgttgaatgtgactattgactagctatagtagtatttaaaaaaaaaa

SEQ ID NO: 2989 - DNA, 2096 bp, Zea mays
  Clone ID: ZEAMA-23APR03-CLUSTER8219_1
gcacgagaccattacctagaacatccaatcaaaaaagcatgtctcgcgggtcctgccgtctcgtcgccactactgactactgaggagaggagcatggccctgactaacgtcttcgtcgtcctcctgagtaccgcattggctgtgctccccttctcccctgccgatgccggcgtggtgggcgtgagctacggccgattagggaacgacctgccgggcacggcttcggtggtaaagctgctgaagaagagcggcatcacctcggtgaggctctacgacgccaactcaaaggtgctcaaggccctggccaacaccgggatcacggtgatggtaatgctacccaacgacaagctcgccgcggcggccgcggacccgtcgagcgcgcgacggtgggtgcggaggaacgtggcggcgtactaccccgccacgcacatccacgccgtcgccgtcgggaacgaggtgttcgaggaggccaagaacctgaccgggcagctcgtcccggccatgtccaacgtgcacgacgcgctggtgaagcttggcctggacggggccgtgaaggtctcgacgccgatcgcgttcaccgcgctccaggagtcgtggccgccgtccgcgggcaggttccgggacgacatcgcgcggtcggtgatgaagcccatgatcgatttcctggagcggaccgggtcgtacctcaccgtgaacgcctacccgttcttcgcgtacgccgaggagccagacaagatctccctcgactacgccctggggaactccaacgccaccggcgtgcgcgaccccgtgaccgggctcgtgtaccacagcctcctggacgcccagctcgacgccacgtacttcgcgatggagaagctggggacgtccagatccagtgcgcgggggccaaaatccgtggcgccagcagcgcacgtttcggagagcgggtggccttccggcggcaaacccaaacgcggcggcaggccgcggccacgcccacgcggcggcgggaggcgtttggagttggagcaggctggaggtgaagcggcttcggtagccaacgcgcaagcgtacaacaactacctgatcaagcgcgtgctgtccggtgacacgggcaccccgtaccaccccgacgccgacatggacgtctacatcttctccctcttcaacgagaaccagaagggcgacggggcggacgacgtcgagcagcacttcgggctgttctacccgaaccggacgaaggtgtacgagttcgacttccggggcggcgcgctggtggccagctggtgcgtggcgaacgcgtccgccggggacgcgcggctgcaggcggcgctggagtacgcgtgcggccacggcgccgactgcggcgccatccagcccggcgcgccgtgcttcgagcccgacaccaggctcgcgcacgcctcgtatgcgttcaacagctactaccagcgcaacggccggggccaaggcggcgtgcgacttcgacggcgccgcctacgtcgtgtatcacgaaccagctggcacctgtgacccgaacgtgagctggtgcgtggcgaatgcggcggccggcgacgcgcggctgctggcagcgctgaactacgcgtgtgccaacggcgcggactgcggcgccatacagcccggcggagcgtgcttcgagcccaacaccgtggtcgcccacgcctcgtacgcgttcaacagctactaccagcggaaggggcggggcagcgggacgtgcgacttcgccggagccggttccgtggtctaccacgcgccaaagattattgggaagtgcgtcctcccgtcgaaagcttggattcaagaaacaacaacagtcaagtctagaggattcaagacaagttcggtttaacctcgtactaggaacgtagaataatgtaaacattggcatctgcacatcaggataactgatgtctttgtgttgctttgcttttcggacactcatgaaccatcgttcctgtttcctgaggcggatctcctgctaggtttggttcccggcttctggctttatcggatactgtagcttttttaaaaatacatctggggtccttaacttttttaaaaaaaaaaaaaaaaaaaaaaaaaaaaaaaaacgctca

SEQ ID NO: 2990 - DNA, 2184 bp, Zea mays
  Clone ID: ZEAMA-23APR03-CLUSTER8249_3
accttccgccggcgtcgccaccggccgtgctccctccctccggccccggttgaccctagcctcgcatcaccctaaccctacccccctcccgccgctgccagagcaggggaaaaagatgccgcgcgagatcatcacgatccaggtggggcaatgcgggaaccagatcgggatggagttctggaagcagctctgcctcgagcacggcatcggcaaggacggcctcctcgaggacttcgccactcaggggggcgacaggaaggatgtcttcttttaccaggctgatgatcagcacttcatacccaggtctctgcttattgacctggagccgagagtgatcaatgggattcagaacagcgagtacaggaacctgtacaaccatgagaacatatttgttgctgagcacggtggtggtgccgggaacaactgggccagtgggtatcatcagggtgaacaatttgttgatgatatcatggacatggttgacagagaagctgatggaagtgatagccttgagggttttgtcctgtgccactctattgctggtggaactggttcaggtatgggttcttatctattggagacactgaatgatcgatacagtaaaaagcttgtgcagacatatagtgttttcccaaatcaggtggaaacaagtgatgttgtcgtccaaccttacaactcacttttgactctgaagcggctgacactgaatgctgactgtgtggttgttcttgacaatacggctcttaataggattgccgtcgagcgccttcatctatcaaatcctacgtttgcacaaacaaactctttggtctccacggttatgtctgcaagcacaactactttaaggtatcctggatatatgaacaatgatctggttggccttcttgcctccttgattcccactccaaggtgtcattttttgatgacaggttatactccgttgactgtcgagcgccaggttaacatgatacgcaaaacgacggtattggatgttatgagaagacttctgcagacaaagaatataatggtgtcatcatatgctcgaacaaaagaagctagccaggctaaatacatctccatattgaacatcattcaaggggaggtggaccctacacaggttcacgagagcctgcaaagaatacgcgaaaggaagcttgttaactttatatactgggcacctgcaagcattcaggttgctttgtcaagaaaatccccttatgttcaaacaacccacagggttagtggtctgatgttagcaaatcatacaagcatccgtcatttattcagcaaatgcctgggacaatatgaaaagctaaggaaaaagcaggcttttcttgacaactacaggaagttcccaatgtttgcggacaatgatctatctgaatttgatgaatctcgagagataatagagagcctagttgatgaatacaaggcctgcgagtcgcctgactacatcaaatggggaatggaggaccctggagaggcaaatgttgtggcggcacttgactctaagttggtagtgtaaatataaaggtaccatctcacagtattaggcactttttatgcagaaacaatttgacgcacaatcatattgaattgattatccacttgaaaccttgaacacttgctttcttttgataaccatgtggactacaccaattattataaacgatgcacaatctctgctagatgttgaaaatgatactaaatccctcatttttcgtatctattgctggcaaataacatcttcacactataaggctctactttaatgttatatcagtactgataaattcttggacaactgtcacttttagaagcaaataattatggtgctgtaattcctcacgtactatgtttagtctgataattttggaaattgcagtgttgtgcagcaatccacgcaactgaggaagtgctgtctacaatctacattcaagtcatgttggtcatccagaccaaacatgctactgtcacatctagtagtcatcagtttgacgccgcctgcttctatagatccaatcggagtgcagccaaagtgggttttgacgttattttgacctcaaatttgcctttagtctgtgctatgtatatttcgaaacccacttcctctggcctgttttcatttctttagggctagtttggaaactccattttttcaacggatttttattttctcaagtg

SEQ ID NO: 2991 - DNA, 699 bp, Zea mays
  Clone ID: ZEAMA-23APR03-CLUSTER825_3
acgagatggctccggggaagcgaggcaaggccaaaggggcggcgccgccgccgcccaccgcggcggcgagtaccggagctgtagggttccctggctgcctccgcctgatgccgccgtcgaccgtggccatatctatacacgccaagcccggctccaaggtcgccaccatcacagagattggggacgaggcggtgggcgtgcagatcgacgcgccggcgagggatggcgaagccaacgccgcgcttgtcgactttatcagctcggtacttggggtgaagaaaagagaagtgtctataggctcgggttctaaatcgagggaaaaggttgtgctggtacaagatgcgactcttgaaggtgtctacgatgctctgaagaagtcttgtaattgtgcatgagcttgcaaacacaagttagaaaatgaagtgagacgaggctgaattgttcgttcttggttgattttgtgacaagtggatcacgggggatcgaagggaattgagggggaaatgaactaattttcccctcaatcctctccgatcctcccgtgatccctggtcatcaaatcagctctaagctgtcagaataataatgcatatatgtcaatgcgatgatggtatagggaatgcagatgcaccagacattactgaaccttggtttgtatggctatctgcattgcacccgtggagacacgtacgtgctgac

SEQ ID NO: 2992 - DNA, 1830 bp, Zea mays
  Clone ID: ZEAMA-23APR03-CLUSTER8280_1
gcacgagaccattacctagaacatcctaatcgaaaaatagtcacaggctcccagcctcccgcgtccggagtccggatccggacacgcgctcgaggcctcccgcgctgtcccgcctccggcagcgatggcggccgccgcgcgccccgcgtccgcccacctcctcctactggccccgctcccttctcctccccgcctttcgcatctcatccacacccgcagactctacgcactcgcccccgcccgccgccctgcggccgtgcgcgcgcgccgcgaaccctctcctccctccgcgccctccccttctgccccggctgactcgttcgattgcgtcggaactggctcggatgtcgagtgcttcgtcgacgccggcgccgaagacgccgctcccctccttcccgcgctctccgcaggcgcgtccaaggacgatcggaagagcgagggcgacgcggcggtctcggcttcccctgctgggagggagctctgggagtgggcatctctggtgtcgcccttcttcttctggggcacggctatggtggccatgaagggggtcataccccgcacgggtcccttcttcgtcgccgcgatacgcctgctccccgcgggcgcactgctagttgccttcgctgccgcgcgcggcaggaagcagccctccggctgggaggcctggctcgccatcgctgcgttcggactcatcgacgcggcctgcttccagggctttctcgcggagggactgcagaagacgtcggctgggctcgggagcgtcatcattgactcgcagccattgacggttgctatccttgcatcactgctctttggagagtcgattggcgcgataggagttggagggctcgtgttgggcgtcgtggggctcttgcttctggaggttccagcactgtcagttgaaggaaatgacacaacaatctggggaagcggggaatcgttgatgttcctctcagctcaaagcatggcagtcggaactatcatggtccgctgggtgtcaaagtactctgatccaattatggcaacaggatggcacatgattattggtgggcttcctttgctagtgatatctgttcttaatcatgatcctgctctgagtggccatattcaagatcttacatggagcgacatattagcacttggttatacatctatatttggcagtgctgtcagctacggtgtatacttctacaatgctactaggggtagcttaaccacacttagttctctcactttcttgacccccatgtttgcatccgttttcgggtacctgtacctgggtgagaccttctcaccagtacagattggtggtgcgcttctcacactggttgccatctacatggttaactacaaaagcattataggtgagaaataagaggctatcacgtacttgtgcgacgtctatcacataagggtggttgggtgctgcatgcagcacctatagccacttgttgggttcaggaatctgaagattaagtacagtcgtgtagactcgggcaaattatcagattggagagagatgtgctctgtttctggtctagactgtaaatgcagtataaagtggcacaaaaccaaataggtttcatcagctccttcgacaatcctattagattgcctggttatgtctgcttctaggttacccagccacctgtatctctgttatgcgtagctgagagaattataatttataggatgtttccgaattgtagttgctacgcattatcttctagggaggtaggggatggaccccccaacccgtgttgcaatggtcagaaacatggtatcagttgcaaggaagaaggctcgtttgtgtccaataataactcacac

SEQ ID NO: 2993 - DNA, 864 bp, Zea mays
  Clone ID: ZEAMA-23APR03-CLUSTER8292_2
agtggtgcccacagctaaagccttgtgcaaaattatcattaagctgtcatcaatcatcatggctgccattacggcaggtctgctggtactcctcgctgctgccgtcgccgctccggcgcacgccacggactacacggtcggcgactcgtccgggtggagcagcggcgtggactacgccacctgggcgagcggcaagaccttcgctgctggggacaacctagtgttccagtacagcgcgatgcacacggtggcggaggtgagctccgcggactacagcgcctgctcggccagcaactccatccagtcctacagcgaccagaacaccaaggtcgcgcttacggcgcccggcacgcgctacttcatctgcggcgccccgggtcactgcggcaacggcatgaagctcaccgtcacggtcgccgccgcggccgccaccaccaccccggagacgtccacgtctacgcccgccgcaacgacgacgcccaccacgaccaacgctgacacgcccaacgctgacacgcctccggagacgtccacgtctacgcccgccgcaacgacgccgcccaccacgaccaagtccacgtccacctcgagcactagcagcactggtgctgcctgcggtggggaggcccggctcggtatgggcattttggccgcggccgcgggcctcgccgggctcgccctgatgggctaggctaggcaagaggcagtgctgtttcggttttccttatgtcccctgcttttcctgttggttgcagccctgtagcccattgtgtttactgtctacgcaccctcctccattcacgtttatgctcacgatggcttgttcgaggctcctgctgaatacatgtacgatcattcttactg

SEQ ID NO: 2994 - DNA, 1654 bp, Zea mays
  Clone ID: ZEAMA-23APR03-CLUSTER8296_1
aaatccgcggcacggacggagagacggctgcaccgccccacacccacccttttccgcgcccgcgaagaaaacgaaggcagtggaacccgaagcggaggggccagaaagcgacccgaccgtctctccgctccctccctcccccacaccacccacctgtgatctcccgcgcgggagatccgcccgccccatggcgccgtcgcgcccgctcatgcgggggatccgcccgccgcgcgtcttcccgacccgcggcggccgcgcctcgccgtacgctgtcgccctcacggccctgctcctcgtctccgccgccctcctcgcgctcatcgccttcggcgtcttctcgctccccgtgtcagcgccgaacgccgccgccaccaccacagccggaggggagaccgaatccgccgacacccgccccgcgcgcccccgcgcccgccgggacctgggggaggggctgggagagcgcggcgcgcagtggaccgaggtcatctcgtgggagccaagggcattcgtctaccacaacttcctgtctaaggaagagtgtgaatacctaattggattggccaagcctcacatggtaaaatcaacagttgtcgacagcactactggtaaaagcaaggacagcagggtccggacaagttcgggcatgtttcttcaaagaggaagggacaaggttattcgagtaattgaaaagaggattgcagactataccttcatacctgtagatcatggagagggactccaagtactgcattatgaagtcgggcagaagtatgagcctcactttgattattttcttgatgagtttaacaccaagaatggtggtcagaggatggctactcttctgatgtatctatcagatgttgaagaagggggcgagactattttccctgatgcaaatgtgaacgtcagttctttaccatggtacaatgagctttcagagtgtgccaagagaggcctttctgtcaaaccaaagatgggagatgcacttcttttctggagcatgaaaccagatgccaccctggacccattaagtttgcatgggggttgtcctgtgattagaggaaataaatggtcgtcaaccaagtggatgcatatccacgagtacaaagcttgagccttcaagactcgagagtcgagcgtaccaaagatggatctctatgcatgtgacttggggctgtctactgggttgacacccatgtatgctttacagacccactgaagctgtattctttgctcctttgttggaggggggagaattgcagataataggggccaataagcaggggccttgctcatccctgcagtatttttgggtctgatccttgctgacttggcttttgtcttttcttttctttttcttaccttgccgtaccccagctatagaggaatggtgtagtgtctgggggcatagagtttgagattttgttttgtgccacacctgtgttactagtataagctttggtactaatgaataacgaggcctaagctcacatctactacatgaatggtgtaatattgttgaagatagaaagcatctaatgttcggtggttttggttaaaaaaaaaaaaaaattattgtgacaaaaagtgtgttttgagagataatagagctcacatctagtacattttgcccagggggacgccgcgatctgaa

SEQ ID NO: 2995 - DNA, 935 bp, Zea mays
  Clone ID: ZEAMA-23APR03-CLUSTER833_22
agtcgcctccttcctgcgccgccgccgccgccgccgctaccaccgcctcgcggccgcctgcggctccgcgtttccgcacggagaggtgattaggtgtgactgtagtcactgtcatgcagttggtgaaggtttcttgaggctgagaacatggtgctgaagacggaactttgccgcttcagcggccagaagatttatcctgggaaaggcattagatttatccgtgctgattctcaggtcttcctttttgccaactcgaaatgcaagcgctacttccacaactgcctgaagcctgcaaagcttacctggacagcaatgtacaggaagcagcacaagaaggatatccatgctgaagcggtaaagaagaggcgccgcgccaccaagaagccatactccaggtcaattgtgggtgcttccttggaagtaatccagaagaagagagctgagaagccagaggtccgcgatgctgctagagaagctgctcttcgtgagatcaaggagcgcatcaagaagaccaaggatgagaagaaagcgaagaaggcggaggtgagcaagtcccagaagacgcagacaaagggtgcggtccagaagggttccaagggccccaagttgggcggcggtggtgggaagcgctgaaagaacttaaggcctgtttggaggctgacgtcgagcgccacaccccgcctaagatgcggcggccaatttggccgccacaactgcggcgcgtggcgtgtggcgcggcgtggtgtttgcggcagcgatccaaacacgcccttagtgtcgtttctcgacattgcagtcgttccttagccaaagccactttcgtagaacctgtgttgaatttgcaagacttattcaagcgttgcttgtgcgtgctaaataccatggcaagagaacggatttaaaaaaaaaaaaaaaaagggcggccggacgcgggg

SEQ ID NO: 2996 - DNA, 1669 bp, Zea mays
  Clone ID: ZEAMA-23APR03-CLUSTER833_45
gctgcctcttctcctccttcctccgtccctccctccctcgctctcccatcctcctctgttctcacaatttttgcttctgaatttcctgccggtgtgccggcatcttctttctactgaggcgtagaccaaggaggagagtaattggcgagcggttggagaacgaatacgagacggctccggcggccggaggcccattttttgatgcgtggtgccgtcgaggtccacacgattcgcagagacgtcgccacgccgagtcccctgaggctcagagaccctccggcattggacatgatgaggtaccaaaggctgagcccggactgcctcccgctcggcaacggcggtggcggaggcggaggcgccgtgccccgcaagcaggcgtccagatcctcctacatcagagaggacgacgccccggccgtggccacggatggctcccgcctcgcatcgtacctggcggcctcctcgcacgagcccaagccgctgcgggcccgcgcgccgcagccggcgcctctctcctcggtggccggccggagcccagcgcgcgaccacgcacaccaccaccacacctccgactcctccgacaccgcctccccgagctccaccggcggcggcggcggcgccgtcgtcggcgacgtgctgctgcagtgggggcacaagaagcggtcgagctgccggcgcgactcggccaccgccgcggcgccgtccgcgcagcgccgacagtctgccgtcggtggcggggtcaagatccagcggcgcgcgtcggcgccagcgcacgcggagaagctcatgccgccgccgccgccagccgccacgcgtggatctaacttgcggtcggcgtcctccttcccgtcccgcgcctccgcctccaccgctgccaccggcagccaccacccgccccaccaccacaggaccgtcgaggatcgatcaggcgggcagaagcggtcgtcgccggacaagacgcataggtccaccatggatggcgtctaccaccatcaccaccaccaagagtcgccgttgacgggcaacggcgtcgccaccgccggtgagaagctaggcgtggagcggttcgagctgccgctgatctacatctcgctgtcgcggaaggagaaggaagacgatttccttgcgatgaagggcaccaagctgccccagcggcccaagaaaagggctaagaacgtggacaagaccctccaatttgtcttcccgggtatgtggttgtccgatttgacgaggggacggtacgaggtgcgggagaagaaatgcgtgaagaagaagcgaagagggctgaaagggatggagagcatggacagcgactcggagtaataaggtggaggcgcggcgcagccatcttccatgggggtgggagtcgaggaagaaggggccctagagaaggaggaaaggaggagacgttgagggcaagagtgagcggtcgcgcctgctcaccttgagccgccgccgcgctggaagcgtcggaggacggcggtgcttgccacacacagggctgtgtttctggcggtcgtgaggtttttttgttccttgatgctgagctgcgtctccgcggccgctgtttgcagcatgtaaccctgaaactctgcgatccgtctatctctgccttcttcattttttctcatgcgctttcgagccacctgaaacgagacggttggattcc

SEQ ID NO: 2997 - DNA, 1034 bp, Zea mays
  unsure (1)..(1034): unsure at all n locations
  Clone ID: ZEAMA-23APR03-CLUSTER833_47
atgagctactataaatggccaaaccctagcggasscacaaaacactctcctccttcctccaccgccgccaacgtcgcctggcggccgtctgcagctccgcgcctctgctcggaagttgttggtgaaggtttcttgaagctgagaagatggtgctgaagacagaactctgccgcttcagncnakaagatttatcctgggaaaggcatccgatttatccgtgctgattctcaggttttcctttttgccaactcaaaatgcaagcgctacttccacaaccgcctgaagcctgcaaagcttacctggacagcaatgtacaggawgcwkcacaagaaggatatccatgctgaggctgtcaagaagaggckccgcgccaacaagaagccatactcgagktccattgtgggtgcttccctagaggtgatccagaagaagagggctgagaagcccgaggtccgcgatgctgctagagaagctgctcttcgcgagatcaaggagcgcatcaagaagaccaaggatgagaagaaggcgaaaaaggctgaggtgaccaagtcccagaaggcacagacgaagggagcggtcccagaagggttccaagggccccaagttgggtggtggcggtggcaagcgctgaaagaacctaagtgtcgttccttgaccttgcaattgctcctccatagcccaccttgttgcaccaacgccacttttgtagtacctcggttaattttgcattttctttcagagttgtttgtgggttttgagttccatctcaagagagttgagtttatttatctttatattgggtgaaatgttcatatgctttcctcagcttggatgatggtttgctttgtttctcaaaaaaaaaaaaaaaaaaaaaaaaaaaaaaaaaaaaaaaaaaaaaaaaaaaaaaaaaaaaaaaaaaaaaaaaaaaaaaaaaaaaaaaaaaaaacaaaaaaaaaagaaaaaaaaagaaaacaaaaaactaaaaataactatggggggggccgctttttaaaaaaacaaaaatttatcaaagg

SEQ ID NO: 2998 - DNA, 1969 bp, Zea mays
  Clone ID: ZEAMA-23APR03-CLUSTER8343_1
gtgtttccagccttccaggcgcctctgctgcctgcgcctgcgcgcgtcgtgaaggcgtgaacggcagctcggctcggcgcaggccccccgcccgcgccggcatcgcgtcgcggccgccgcgcgagccccatgctgcgttgctgccgcacgacacgtcacttcggctgcggcgtggttgtgtggactcctctcgctcctggccctcgccggcgctgcgtcggctgcggatggggcggagggtgagtgggagccgctgatacgccgcctgctctcgaaggggagtgacgctgcttctgctccggctgctgaggatgatgaagtggggacgaggtgggccgtgctcgtccgccggatccttcggttatgggaactaccggcaccaggccgatgtgtgccatgcgtaccagatactgcagaagggaggagtgaagaaggagaacattgtggtgttcatgtatgatgatattgcccacaacattctgaaccctaggcctggagttatcattaaccatcctaaaggagcaaatgtttatgatggtgttccaaaggattacacaggtgatcaggtcactactgaaaacttctttgctgtcctcttgggcaatagaagtgctaccactggagggagtaagaaggtgatagacagcaaacctaatgaccacatcttcatctattactcagatcatgggggtcctggagttcttggtatgccgaacctgccatatctgtatgctggtgacttcatcaaggtcttgaaaaagaagcatgcttccaatagctactcaaaaatggttatatatgttgaagcatgtgaaagtggcagtatctttgaggggttaatgcctgaagatctaaatatttatgtcacaacagcctcaaatccagttgaaaatagttggggaacttactgccctgggatggaaccatcaccccctcctgagtacattacctgtttaggtgatttgtacagtgtttcttggatggaagacagtgaaacccacaatctaaagaaggaaaccatcaaggatcagtatgaagtggtgaaaacaagaacctcaaactcaaataagtacaaagagggttctcatgttatggagtatggtgataagaccttcaaggatgagaagctttccttttatcaaggttttgatcctgctaatgccaacattgcaaacatgctgctttggccaggcccaaagggtgcagtcaatcaaagagatgctgatcttctcttcatgtggaagaggtacgagcagttaaatggggggaccgaagagaagctgagggctctcatagagattaaagaaactgttcagcacaggaagcatcttgacagcagtatcgatttcgttgggaggctcgtcttcggatttgagaaagggccttcgatgcttgaggctgttagaacctctggtcaaccattagtcgatgactgggactgtttgaagaggatggtgcggattttcgagtcccagtgtggttcacttactcagtacggcatgaagtacatgagagcgtttgcaaacatctgcaacagtggtatatctgagatgaaaatgagggagtcgagcatcagcgcttgcagcagctacaactcggcgaggtggagcccgatggctcggggacacagtgcttgatggtaaagatcaaatagcaaagccccccgaggtctgctgccccatgtccctgtgagcgagctcgtatcatctggggactgtggacccatcgacggttgtacatatcatgcacttgtgctcgtgcctatgtaaagtagtaataccaactcaactctgatcttcatccaagtaccgaaatgattaaaagatcagatgtgaatgctgttgcgatgggtgatcgcaagtaggccataatcagtggaccgaaaatgatgacccaaatcaaggtagtgctcctctgatcgatagcccaaatctattgctaacaaaaaaaaaaaaaaaaaaaaaaaaaa

SEQ ID NO: 2999 - DNA, 1630 bp, Zea mays
  Clone ID: ZEAMA-23APR03-CLUSTER8351_2
acaaaccaacactgacatcacagcgggttcaggggaggaggagagggagagacttctttaagatcaccacaccctcccctcacccctcctcctcatcgtcctctctccctctctctctctccattgcactcgctctatactaggtcctaggtaactagcaattgagctatgaaattgttgcttgaggtgcagcagcaaggcacactgctacaaacaagctgatcagctgatgcccggtggcttcaggactttgccaaggttagcgaggtcccgccccattttgcttctcccctgggcttgcggttgcgtttgagtgcacttctgaggctttgattgggccctcccgctccgcacttaagctctccgcctcgtccatggcgtcgcagccctcaagacttgctgtctcttggtagctgccgcttctagctactccaccacctaactgaaaggtagaaccgagatcaatctggggattcgttagagaccacttcttcctctgcaatccgatcgatcactccaaacgaacatcgcgaactgacacctgttttgtgccaccttttctttttccgtgcagagcgtatagttagttggtcttggattcttggtccggtgctgccgccgccatgttcctgagatcgaagatccaggagatgatcctgcggaggagatcgaggtcgatgaacagcgccggcgcgcagaggggccacgtccccgatcaagccccgagctcgtcgaccgttccgtgcgacgatgacagtgccggcgccggcggcagcaggagcgcgggtgcgcgtgccctgttcgcctccccgagggctgctgcactcgtcctccctgcccgccggcgccggcgccggcgtcgtggccttcgccaggagccccgcggcggagcccgagcccgagacggcctcctccctgagcccgacctccgtgctggacgcggcggcggccttcgtgccacgcacgggaggcgccgcgggcaagcggcgccagcgccgcccgtggcgcgcgcgggacaacaacggcggcctcgcggacgtgctggactgcaccgatgaccagcagcaggagcggatcgtcctcgcggctacgtcgtcctcgcgctctctgctcaggtcgtgctccctggaccgccgcgtcgagttcggcgtcaagaacaagagctcgtggctgcccctccgcggccgcggcgagcccgcggcgccggcgccggccgacccgcgcgagatcgggccgtcgtcggaggactacacgtgcgtcatctcccgcgggcccaacccgaggacggtgcacatcttcggcgaccgcgtcgtggagggcggcgccgcaccggaacaggagacggagacggagacggagagctcgccgcggccgatcagtctgccgacgcgaacggatccccgtccacgcacgcgtagcctgatgagtgatgacgccgcctagctaggtaaagaaaccgagtttaattagctgagtctgagtgctattattgagttcaggcagccttgatgttgctgtattgtattggttgctccgatgcgttccatcgtctggtcagaagatagatagagatgatctttcataggtgttttcttgatcagatgatgaactagacgttttgtccaggttg

SEQ ID NO: 3000 - DNA, 1409 bp, Zea mays
  Clone ID: ZEAMA-23APR03-CLUSTER8352_4
acctccgatccgtccccgatcatcgcaccacctgtagcccacctcgctctcgagtctcgacccagcgacgagatggccgcggtggatctgaccccaaggacgcccaagaaggcctacggcggcgacggcggcgcctactacgagtggagccccgccgacctgcccatgctctccgtcgcctccatcggcgccgccaagctctcgctcgccgccggcggcctctccctccccagctactccgactccgccaaggtcgcctacgtcctacaaggcgcgggcacctgcggcctcgtcctgcccgaggcgacgaaggagaaggtggtggcggtgaaggagggcgacgcgctggcgctgcccttcggcgcggtgacgtggtggcacaacggccccgccgcgcaggccgacctcacggtgctcttcctcggcgacacctccaagggccacaagcgggggcagttcaccaacttccagctcacggggtccgcgggcatcttcacgggcctgtccaccgagttcgtgtcgcgcgcgtgggatctgccggagcccgacgccgcgaggctggtgtcgagccagccggcctcgggcatcgtcaagctgcccgcctccgccgccgcgctcccggcgccttcgccgcaggaccgcgccggggtggcgctcaactgcctggaggcgccgctggacgtggacatccccggcgggggccgcgtcgtggtgctcaacacggccaacctgccgctggtgcgcgaggtcgggctcggcgccgacctggtccgcatcgacgcccactccatgtgctccccgggcttctcgtgcgactcggcgtaccaggtcacgtacatcgtgcgcggaagcggccgggtgcaggtggtggggcccgacgggaggcgcgtgctggagacccgcatcgagggcgggtccctcttcatcgtgccccgcttccacgtcgtgtccaagatcgccgacgcgtccgggatggagtggttctccatcatcaccaccccgaaccctgtgttcagccacctggcggggaagacgtcggtgtggaaggccatctcgccggaggtgctgcaggcgtccttcaacaccactccggagatggagaagctcttccgctccaagaggctcgactcggagatcttcttcgcgcctcccagctccaactgaagcaccagctctccaagacgggggagaggatcgttctcgatcgtcgtcaaggtcatggttattaataagggtctattaataattaagttagcgtcgtcgtcttaagttagcgtcgtcgtcttaagttagcgtcgtcgtcttttagcgtcgtcgaagtcagggtagagcgagatgtagagaggtcgtctgtcatccgccattgaactggaactgctttttcaagatgaatactacccctctttctt

SEQ ID NO: 3001 - DNA, 916 bp, Zea mays
  unsure (1)..(916): unsure at all n locations
  Clone ID: ZEAMA-23APR03-CLUSTER835_3
gaaatccgcagattcccgtcgctacttcggccacatggctgcagcggcggcgtggaccggcgccgcatcccccaactcgctgctgctctcgcgctcgcctccccacgccgccgtgctcgcgccttcgccggggagctccatgcggaggcggctcctgctcggcgtcggcaccccggccgtggcggcgctggcggccgcggcgccgccagcggtgctgcaggacggggcggtcactgtgctcatcaccgcnggcgcctactctcttgtgcgcgtcttcgacnagctcaccgagcggcggctcatcgaaaagagcttgagcaggaaggttgtgcacgtgctatccggcgtcntgttcatgtcatcttggcccctgttcagggaattgctgagaggtccactctattatgtcctggtgctgctgttcagcgttttagtcttctggcgtgagtcccccatcgggatcgtctccttgtcgatgatgagcggtggcgatggtactcccgtccccagtatctaatagcacgatgtcgttttgtagaacgccgttgcatttgattgtttgtgccatataacttgcaggttttgctgacattgtcgggaggaggtatggctcagcgaagctgccattcaatcggaagaagagctgggccgggagcatctcgatgttcatttctggtttcctgctgtccgcgatgatgatgctctacttctcaagcctgggttacattgatgttatctgggaagaggcacttggtaagctggcgcttgttgcactagcagcaacagtagtggagtgcgtccctgtgaccgaagttgtagatgacaacatatctgttcctttggccaccatgctggtagcttttctcttgtttagctccaaccgcacaatagttaattaaaatactactagtgcatt

SEQ ID NO: 3002 - DNA, 1779 bp, Zea mays
  Clone ID: ZEAMA-23APR03-CLUSTER83909_1
ggtaccgggccccccctctagttttttttttctttttttttttttttttttttttgattcaaagtaattacactgaacagagaggcatgtacaaatatgaaatgtgttaatcaagtgaatgaatactagacattacaatgatcatgtacagtggattaaccacgttgtgtgtggttagaggtaattggtgggaggaaatggaaagattcgagacaagggtttaatgggtttgaaaatattgacgtgatgagaagtttagacagagataggtggtgattgggcattaagtggaagatgtgtgcgcatcatgacttacggcaccactccaaatcccactcaccaaacagaaggatatgaattccttgtccagctctcaatatttaattcaatccacaagccaaacaagagaactgggagtacaaatctccgagggctggtttggtgaatcccctccaattcccttgaaaccaaaccagccccaagtgacagtgaattcccctaacagttccacctagcattttcatgcccctttccatctgttgccaggtcacaaatgaagacaactagcatcggttatgtcgatcggctccatgaatgtgtgaatccccataactccacattctttagttcaaactctggactatatgccaaacatgagtttccaaatgtctcacatgatccactgcttccatgtaacagatcttcatcaacacacaatgcgaagcttccaccacctccaaatgctaaagcattattcaagcacaaatagtagaatctgtttgcaccagttggtctgaaaagtctaggttcaccatgtattgttgtgaacacaaacgtctggtttgttccctgatatttccttttctctgtgggccgcagaggactgttcaataagccaccaaacacagccccttgcatatctccaacaatcaataggcatggaccctgaatattctcacttctacgaagaagtgttctcagagatatcccatgcttccaggtgctatatagcaatacccagtggcaccccttcaaagtcccagggagagaagattgaaagaatgcaaatagttttggagacacaaacatagacttttcagttagataacgaagagtgcccacacaatctgaagtcgatgtttcctcattgccatttgagttatttatgggcctatatgactgaaggactgggtcgttaccaaaattcccattcctttcatctctatcactttcagacccagactcctcactcaattccacgggaggatctttccaagttacatcactccatctccattttttaggaagtgattcaggaggtaatggtctcaaagtctctgaacaaggtgaattctgctcatgccctgtgtttgaggttggtagaagggaaaatacatacgaagataatgatgatgtcttggggggagtaaaatgttctggtggaaaagatttagcctgcgatggctcgacggcggcctgagcaggggagggagagacaggggagtcggcgagcaggcgggcgagacggtccgccaccttctccttccacgccagcatcgccccgcctcgccctcacctcacagttgcccccgcgcgaggaggtggcggtggcggtggttgtgacggtcgtggagaggaagcgagagcgcgagggcggcgggaggagaagggaaagagaagggaagaagtttcaagcttggttgatggcacacgcctgacgccgcccccgctgggtgggtgggtcgctgtggtccgtgggacacgtcgtgtcgattagga

SEQ ID NO: 3003 - DNA, 1682 bp, Zea mays
  unsure (1)..(1682): unsure at all n locations
  Clone ID: ZEAMA-23APR03-CLUSTER8411_3
aataatttggctaaggcttgtgctgcctatcgtgactttgtatcacaaaatgctataagagttaaaacttcttgttttttcttaaaaagttttggactagggtagtggggttttaaattttgctgagatacttctacctgcctgtaaggactagggtagtggggttttaaattttgcccacaaatgtaaacttttggcctaatccacctgaatagacaggatttaacactattatttgcagcactgataaccttattttgcagtgtttacttgcacaatgtgcgcttttttcctccttgcccatgttatcctaaaaattgaggaagttcttacatttgtcgacggacagagtactagatcttatattatcaacatccactaccttaacgagctggcatctgctggttacattctgctcccttcatgtagcattatggatgaagttctttgagcataagccttttgattcaagaactgtcatgggatttggagtacttaacggaatctccattgggctcctcaacttgagtcttggcttcaactctgttgggttttaccagatgactaagctggcaatcatcccgtgcactgtcattttagagacacttttcttcaggaagaagttcagtcggagtatccagatgtccctttctgtgcttcttcttggtgttggtgttgcaactgtcactgatctgcaactcaatgctgtgggatccatactgtccttgctggcaattatcacgacttgcattgctcaaattatgacaaacactatccagaagaagttcaaggtctcatcaacccaactgctttaccagtcttgcccttaccaatcactgaccctgtttctcattggccccttccttgatggctttttgactaaccaaaatgtctttgcttttaattatacatctcaagttgtgtttttcatcgtcctgtcatgcttgatatctgtttcagtgaacttcagcactttccttgtgatcggaaagacatctcctgttacttaccaagtcctgggccatcttaaaacatgccttgttcttgcttttggttatgttttgcttcacgatccgtttagctggagaaacatacttggaatcctaattgctgtagttggaatggtcttgtattcatacttctgcacagtggagacccagcaaaaaaatgttgaagtctccccacaacaggtgaaagaaagcgaggcaggccctttgatcgcagactctatgagcaaagttgaaaacgggggtggtggtgttgatgacgagcctttgaaggtacccatgtggagctcaaagtactcgcgggagtgaaaaggtcacgatggcatggcaccatacaggattcaatttagtaggcagatagtagggttggaagccaacccagagtgtaatgaacatttcagttacatttttgggcttctttagtgtcgcagtctactagcagttaaaggatctgtttcttggaaggatcctaccttcagggctctcagacctaccttgaaactagacagcaggtattgtatgattgtatctcgatatgctccacatcctcttactgtaacttccaactggtacatggcgtgcctatatccaaagatagacctcattctttttgtatcaaaaaaatccggataagaagacttgtgcaaaaaaaaaaacgataagtgaannaannnn

SEQ ID NO: 3004 - DNA, 1289 bp, Zea mays
  Clone ID: ZEAMA-23APR03-CLUSTER844_1
atacgcaactcgcactcgcagcggccgtccgctcccctccgcctttcgtttgccccgccattctatcctttcatcgcctctccagcgcccaccagctagctgttcgacccaacaccggactcctcccaccccgatcctctacccgccgcacaccccaatggcgaccgccaccgcgtccgtggcgccgccctccacctccacctcctcggtcctcctgcaccgccgtctcccttccccggcgcccggcgccttcccccggctctccggcccggccccgccgccgcgccgcgcgcgcctgctcctccgggtcgcgctcaccaacgaggtggcctcggacgacgtggcggccgaggaggccgcggccgcgcctaagatcggcaggcgggtgcgcgtcacggcgccgctccgcgtctaccacgtcctcaaggcgcccgacctggacatccagggcatggagggcgtcgtcaagcagtacgtctgcgtgtggaagggcaagcgcgtcacggccaacttccccttcaaggtcgagttcgagctcgccgtcgagggccagcccaagcccgtccggttcttcgcccacctccgtgaggacgagttcgagttcgtcgacggagagtgacagcgtcgagtgcgttcgggtaagcggcgagcgccgttcttatagaataatcaaggccgcggcggtcgctggtttatactgttccggtgcaggagctcgcgaggcaaggcatgtcaagtgtttgcttactcactgtctgtgctgctcaggcttcttcctcgttcggttcagcatcggtttttcagctgtggggaattaattgttcggatgctgtgcaccatcgatagtttataatagtggtaatttggccgctgttcgttggctatgctctgcgcttagttattttgctggctcttccaagagattcgtttgtctgattggtacacattgcattgaaacccggaactgtttccttggattataaaatctggttattgtacaaaaaaaaaaaaaaaagacccgctcccccccgttcggttcagcatcgtttttccagctgtggggaattaattgttcgaatcctgtgccccatcgatagtttataatagtggtaatttgccccctgtacgttggctaagctctgcgctcagtgatttcgctggctcttaccacagatccgtttgtatgattggcgcacgtgccattaaaaagcgggattgttcccttggattataagatcgggttgttgcatcaacaaagaaaataaaggtccgctccacccacgcgtccg

SEQ ID NO: 3005 - DNA, 1624 bp, Zea mays
  unsure (1)..(1624): unsure at all n locations
  Clone ID: ZEAMA-23APR03-CLUSTER8455_2
aggggttccggtgatccgcgcgcgccctcctcgagatgtctgacgtcacctctgactcggcgcagagccgccgctcgccgcccccgccgtcgccgtcgccgtcgatgccgcgcttccagcagcagccgagcggacgccagccgccccagcccggcgccgactccttcgtcttcggcgtcttcgccttcatcgccatctgcttcgtcttgatttcactctcagtcccatcaagtgttctacatcaagttcctgaaggacatgttggggtatactggagaggaggtgctcttctgaagacaatcacccctccagggtttcatctgaagctccctttaatcacacagtatgagccaatacaggttacacttcaaacagaccaggtcagagatattccttgcggaacaaaaggtggtgttatgatcagctttgacaagatagaggtcgtaaaccgcctccgcaaagagtttgtgcatgaaaccctactcaactatggtgtgcactatgacaagacatggatatatgacaaaattcatcatgagattaaccagttctgcagtgctcacagtttgcagcaagtttacattgacatgtttgatcagattgatgaaacaatgaaagaagctattcaaagagactgtacacgctatgctcctggaattgaaatcatcagtgttcgtgttacaaagccaaatatacctggtagtatcagaagaaactttgaacttatggaggaggagcgtacaaaggcactgatcgccatcgagaagcaaaaggtagcagagaaggaggcagaaacacagaagaagattgcgctatctgaagcagagaagaacgcgcaggtgagcaagatcctgatggagcaaaagctgatggagaaggacagttccaagagacaggagaagattgataatgaaatgtacctggcacgagagaaagcactagcagatgcaaactactacaggattttgaaggaagcagaggcaaataggctcaaactgacacctgagtatctggagctgaggttcattgaatcaattgccaacaactcaaagattttctttggtgaaaagattcctaacatgatcatggatcaaaggttgctcaagaattaccttgatgctgttcctaggaaggaccattatgaaatgtagccgcgggttccgtgggttggaagcagaagtctttcttttttgtgtgatcccacgcagtagataggattaccgtgtagccgtccagtatactagtaagccagaaaggagtcatcaggatcctcttgaagatgaaattagcagtcatgagatctttggcttgttttgtgtagtagcagcattagggcacctggagcattcgcatgtgaccgacagtgatgcaaccagtgcaaatcctgtagtcttcaaaactgatggtcaaggccgctggcctccaaacccaggtaatctcttgaaaaggatctgggttataatttttgactgatgggcagaacaatttgtagcactgctgatgccaaagttttctcgatcataaatgtgcaagtttgctccccgacttaaaaaaaaaaaaaaattaaaaaaaaataaaaaaaatatttaaannnnnnnnnnnnnnnnnnnnnnnnnnnnnnnnn

SEQ ID NO: 3006 - DNA, 871 bp, Zea mays
  Clone ID: ZEAMA-23APR03-CLUSTER8464_5
caaaatcccgcgccggccctgctaaaaccctaaaccgtgcccctccgtcccaaccgtccgccgcctccctctccgctccgccaagaccctcctcctcactcagctcccctcgagcccagaagcaccgcgcgcaccatgcggccaccgagagggcgcggcggcggcggccggttcggcggaggtggaggccgaggcggcggcggtggccggttcggcggcggaggccgtggtggccggttcggcggcgggttccgcgacgagggcccgcccgcagaggtcgtcgaggtgtcgacgttcgtgcacgcgtgcgagggagacgcggtgacgaaactcaccaacgagaaggtgccctacttcaacgcgcccatatacctgcagaacaagactcaggtcggcaaggtcgacgagatcttcggccccatcaacgaatcctatttctctgtgaagatgatggaagggatcattgcaacatcgtacaaggaaggcgacaagttctatatcgaccccatgaaattgctgcctctttcgcgcttcctgccgcaaccaaagggacaatctcaaggagcacctagaggtggtggccgtggtggaaggggtggtggccgaggccgtggtggttcgttccggggtggaagaggaccaccaaggggtggtggccgaggtccaaggggtggaagccgtggtggttttagagggcgaggaaggttctaggtgtagtttgagtttgatgatgtttttttttgttgaggcatcatagctacccaattggaaacttccatgttcttgtaacctgatatgtttaaggtagcagaacactttgtttgtggaacttggattctcaattgaaacaaagggtttgtccctgttcaaa

SEQ ID NO: 3007 - DNA, 791 bp, Zea mays
  Clone ID: ZEAMA-23APR03-CLUSTER8515_15
gcacgagctcgacctcttgcgccgccgccatggcgagtcctaaccaagcctgaagttcgatcttcctccctgtgcatgtacatctcgaatctaatccattttactccctgttctctctccgcagaccttcaagcgccgcaacggcggccgcaacaagcatggccgcggtcacgtcaagtacatccggtgctcaaactgcgccaagtgctgccccaaggacaaggcgatcaagaggtttcaggtgaggaacatcgtggaacaggcggccatcagggacgtccaggaagcatgcgtctatgatggctacgtcctcccgaagctgtacgccaaggtgcaccactgcgtctcgtgcgcgatccacgctcacatcgtccgcgtccgatcccgtgagaagcgcagggaccgcaagccgccggagcgcttcaggcgcagggaggataggcctgctggtggacaaggaggcccccgccctggtcctggtgctgctgctacagctccatctccagcaccggttgctgctcgcccataggctttagcttttcgaccgtgttaagtcttctgcccactcagtttcggagttgtcccctgtgcgtgtgtgaagctgctatattagagttactttttgtctaaagtctgaacattttcgaagaatttgaatatctgaacatttgaatgtttgtgctgagtttttcaaagaatttgaatatctgaacaattgaatatctcacttgaacgttaaaaaaaaaaaaaaaaaaactcgagactagttctctctctctctctcctcgtgc

SEQ ID NO: 3008 - DNA, 895 bp, Zea mays
  Clone ID: ZEAMA-23APR03-CLUSTER8515_19
accctactgcggcttcaggactcgacctcttgcgccgccgccatgaccttcaagcgccgcaacggcggccgcaacaagcatggccgcggtcacgtcaagtacatccgatgctcaaactgcgccaagtgctgccccaagggacaaggcgatcaagaggtttcaggtgaggaacatcgtggaacaggctgccatcagggacgtccaggaagcatgcgtctatgatggctacgtcctcccgaagctgttacgccaaggtgcaccactgcgtctcgtgcgcgatccacgctcacatcgtccgcgtccgatcccgtgagaagcgcagggcaccgcaagccgcccggagcggcttcaggcgcaggggaggataggcctgctggtgggacaaggagggcccccgccctgggtcctggtgctgctgctacagctccagctccagcactgggtgctgctcgcccataggctttagcttttcgagcgtgttaagtcttctgcccactcagtttcggagttgtcgcctatgggtgtgtgaagctgctatattagagttactttttgtctaaagcctgaacattttcaaagaatttgaatatctgaatatttgaatatttgtgctgagtttttcgaagaatttgaatatctgaacaattgaatatctcacttgaacgttatatggcttaaaaaaaaaaaaaaaaaataaaaaaaaaaaaaataaaaaaaaaaaaaaaaaattataaatttataaaattaaaaaaaaaaataaattttacaaaaattttttttaatttatagaaataaaaaaaaaataaataaggggggggtttttttaaaaaatcaatttttttaacccggggggtgtgaaaatatatctttttttttggggcgcttaaaattaaat

SEQ ID NO: 3009 - DNA, 1119 bp, Zea mays
  unsure (1)..(1119): unsure at all n locations
  Clone ID: ZEAMA-23APR03-CLUSTER8652_10
gaacaagacaagacgggtgccagacaaattcagcaaacaacaaacaagcaaaaggcacgaccaccaccgccggccgggaagcaagctcaaaccctaatcgccgtccgcyggcgacgccagcacgatggcccgctacgaccgctgccatcaccgttttctcccccgayggccacctcttccaggtggagtacgctctcgaggccgtccgcaagggcaacaccgccgtgggstnccgckrgcacggacaccgtcgtcctcggcgtcgagaagaagtccacacccaagctccaggactccaggtccgtgcgcaagatcgcgtgcctagacactcacatagctctggcgtgcgcggggctgaaggcggacgcgcgcgtkctcatcaaccgcgcgcgggttcgagtkccagagccaccgactcgccgtcgaggaccccgtcaccgtcgagtacatcacccgctacatcgctgggctgcagcagaagtatacacagagtggtggagtccgccctttcagcctctccacactcattgtcggcttcgacccctacaccgacaagccagcgctgtaccagaccgatccttctggtaccttctctgcttggaaggcgaacgccacgggaaggaactccaactctatgcgtgagtttctggagaagaactacaaggagacctccggcaaggagaccatcaagcttgctattcgtgcacttctagaggttgttgaaagtggtgggaagaacatcgaggttgcagtgatgacaaagaaggatggtctccgggaacttgaggaggctgagattgatgaatatgttgctgagatagaggcagagaaggctgcagctgaggctgcaaagaagggtggtcctagggacacctagtccctgtattgtggtattcctccctttgtgtgtcttgtttttatgttccatagcaccatcttaattgttttagaagaaggatgcttatatggctgtggctgccttgtgacttgtgtgggtctgtgggctgcggggtggttctaaagctctgcagccccgagtgtttatttattaattattgttgaggttgagagaagagggatgacaccacaccatggtttctccaaaaaaaaaaaaaaaaa

SEQ ID NO: 3010 - DNA, 1202 bp, Zea mays
  Clone ID: ZEAMA-23APR03-CLUSTER8736_2
aaggccgagctcatccaatccagtcgcctgattgcattgggatcccatggccaagctcgccgtcctcctcctcctcgccgtggccgcgtccgccacagtgccggcgcacggccgcgataccccgactgagatcaaggccgggacggacgcgaacgtcacgctggagctggccgccgcggacggcaacggcgtggggatctcgaacctgcccgcctggggcgggctcatggggcagggctactcctacttcgagcgcagcaacctggacatcttcagcggccgcgggccctgcatggcgaaggcgccgtgcgtggatgcggctggccaccgacggcaccggcgaccaccacgggtggtactgcaactacgtggaggtcaccaccacgggcccgcacaaggggtgcgggcagcagctgttcaccgtcgagcagtggctcgccaccgacgccccgcccttcaagctcgaggccgttcgcgactactgcagcggcgacgccaagggcgcctcggcggcgtgatgtggccggcggccggtaggaggagagcacagcacacacgcctggactggacctgctgggtggcttggtttggttggttggtgacgagtcgtaataagttgtgggcgcatgggcgccgcgctcgtgagtggcgtgcgccacgatgcatgcgtgtatggtgatgaactgaattggagccgtgcagcaagtcgaataatcgggagccacctcgcgtgatgtgtagtggctagtttttgtacatggacgtgttggatcttgatccatgttttgatctgatctttgagaaatggtaatccgcgttatcatgcgtaaaaacccacgcgcccgcggacgcgtgctgggacgcgtgggaggtcgcgtgggcgggcccgcacaaggggtgcgggcagcagctgttcaccgtcgagcagtggctcgccaccgacgccccgcccttcaagctcgaggccgttcgcgactactgcagcggcgacgccaagggcgcctcggcggcgtgatgtggccggcggccggtagaggagagcacagcacacacgcctggactggacctgctgggtggcttggtttggttggttggtgacgagtcgtaataagttgtgggcgcatgggcgccgcgctcgtgagtggcgtgcgccacgatgcacgcgaggtggctcccgattattcgacttgctgcacggctcc

SEQ ID NO: 3011 - DNA, 1414 bp, Zea mays
  Clone ID: ZEAMA-23APR03-CLUSTER873_34
atacccgcccgctcgcctccctggtacgcttcgtgccgccgccgcaacctcctcctccccgtcacagattgcagatcatttaacataaatggctgactcagaggacattcagcccctagtctgtgacaatggaactggaatggtcaaggctggctttgctggagatgatgctccccgtgctgttttcccaagtatagttggtcgtccacgccacactggtgtcatggttgggatgggacagaaggatgcttatgttggtgatgaggcccaatccaagaggggtatcctgactttgaagtatcccatcgagcatggaatcgtaagcaactgggatgacatggaaaagatctggcatcacaccttctataatgagcttcgtgtagcaccagaagagcacccagttcttcttacagaggctcctcttaaccctaaggctaacagggaaaagatgacacaaatcatgtttgaaaccttcagtgttcctgctatgtatgtggctagggaagctgtcctttccctatatgctagtggccgtaccactggtatcgtcctggattctggagatggtgtcagtcacactgtcccaatctatgaaggctatgccctcccacatgccattcttcgtctcgatcttgctggtagggacctcacagattccctcatgaagatcctgaccgagaggggatactctttcacaaccactgctgaacgggaaattgtccgtgacatcaaggaaaagcttgcatacgtcgcgctcgactatgaacaagaactcgagaccgccaagagcagctcatcagttgagaagagctatgagctgcctgatgggcaagtgatcaccataggcgcagagcgcttcagatgcccagaggtgctcttccagccatccttcatcggtatggaagctccaggaatccatgagacgacctacaactccatcatgaagtgcgatgtcgatattagaaaggacttgtacggcaacattgtcctcagtggtggatccaccatgttccctggcatcgccgaccgcatgagcaaggagatcaccgcgctcgcgccaagcagcatgaagatcaaggtcgttgctccgccggagaggaagtacagtgtctggatcggaggatcgatccttgcatccctgagcacattccagcagatgtggatctcaagggctgagtatgaggagtctggtccagctattgtccacaggaagtgtttttagacatcacctagccttatgctcttcgtggaaatatctttgtttgatgacatatctatgggtggttgctctgctatagcttgcagtttttgtgtatgccatatatatatccatgccctgtaacgttgtggagtcagctgagcactatatgaagtatgtagtttggtttgatatatattgattggattattactc

SEQ ID NO: 3012 - DNA, 1601 bp, Zea mays
  unsure (1)..(1601): unsure at all n locations
  Clone ID: ZEAMA-23APR03-CLUSTER88056_1
cctttttaaaacaccggccaatgggggggggtaatacgccccccataagggggaattggggccccgggcccccccccaagggntttttttttttttttttttttttttttttttttttttttttttttttttttttttttttttttttttttttttttttttttttttttttttttttttttttttggagataacctagacatatcattgaagaaatgctttcagtatatcagtacttattgcgaaacagtgaaagcgctgcatgaccggtaggaccaatagtaccacgaaagaaaagactatccaaaggggggaaaaggtactcctctacagttccactctatcccgttggtgcattgattcttatgtttatttctttagcaaagttcttatgcttatcgcctggttttcttgagaaatgacaagatgttactcccatggttgcccttctttttgtgatcgcctagaacaacgtgaacatcctctgctctaaaagagaatgaccttcttatggtccttgggttgtcctcaacgttttctgataccacggtatgttcttttccgatggctggttgaacatcatatggcttgagagtgagggtagctccagatactgttgagccagtaatttgcggaagtcgtggaccattttcactcgagccgattccgtttcccagtttggacatttgagtagattgtgagatgtaacggcgatgatatcgactggcgtcagggtccccctcgtacagacaaaagcttcagagaaacggcgtactgctcgcatgtcaaaagcctccttgccgcatgcagatgtctatgctgatctcctgataaaatcgcagtgacagagaagaatgaagctctggtccgaagatcacctgtttcaagaagttgatctttcgttccgtctgtgcgacttcagtcctctcctgcagcttgtgctcaagcttggacgaaactgtccccaggtgatcgatcacagctaccaccgcatcgcatatgtaaccctttgtaccctccagaatcatcttcttcttgtcggtgctgaggaacgccttggcgcagcagtccgccgcttcgtgcagctgagaccgcagatccttgagctccctgagcgcgccgtcgaagctctcggcgcccggcgcgcctagccgcgacgacgacctgtcgaacggcaccgccgcggtgctcgtggacgccgccccggccggctgctgcacccccgcctcgccgggcctcagcgtccatctccgaccaggacgagagcactgcagcacagcaggtaccaatgtgtcgccgctccctcggcttcacgatgggtgcaagctaccttgcacagaaatggcaaacgcagacgagcgcgaagttgtgagcgttcggggacaaataaaccgggggcaaggagacaaggcgcgcaggcggtcgcgtgacctccctttggcgcggggcggcgggtccgcacacgcgatggcgcgaagacgacggggtttccttccctcctcgagctcgaggtcgaggaccgaccgagaggctcggacggcgcggcgccgtgcgcaggggcagggctcgtcacgggcgcgctggtacttgctcagatggtt

SEQ ID NO: 3013 - DNA, 1167 bp, Zea mays
  Clone ID: ZEAMA-23APR03-CLUSTER8843_6
aggaagcaggggctaacctccgagcggcgaggatgaggggcggcggcgggatgattgacgatgaagagcgggtgggccacgcggagatcccgaccagcttcggccccgagctgcgcgcctgcctccgatgccgcctcgtcaagacctacgaccaggaacccttctccgctggcgccgctcccctcccccctcctcacgcctaggcctgcggtctaggttcaccagcctcccgttgaagggagggttcgaggactgggggtttcgtttctcctggtgcggtccgttctcggcggcggctaaggtaggttcattccgggttgctacacacttgctgtttcggaggaacttcaagaagagtatcaggggagccaagacaacaacatgtagtatgtgccacccaagcgatgtctagagctcctgaagcagtatgaataatttagcttatataaaaaagtgcatgtgcttgttgccaagcgaactgccctgctttgttgtatctgagtgctaatcaggacccctaattaaccctttcgtgctacgaatgggttttttagccaagatggcataaaacattagcacaaatgtcagacacatgaccaagacaagttcataggccagcaattctgttcaacaaacacctcgtcttcgtcgtacacggatgtggataccaatttgcagattgcgagccacgagcccatctaccagtagcctctccagtgtccatactgagaaatttatcgcaccagcaccactgtcacaatacaatggtacaggtactgcaccgtgcacgtgcccacaagctttcgacatctgcgtgtcagcatcggttatcatcaatcaccaagaatgactggaccgtggcgcgctggtcctctgcgctggtcctccgggaggtcagatgatacgggcgtaacttatctaagaacaatcaaataaataatttaattcggctgagcacaaagtaacatttgacccgattaataatccaacagtcaatgtttaccagtactttaaagagaagaacacagcactaccaaatgctgaagtaattcacacaaacagatcaaaagctagtcttacaaaaccatcggtagttacacagcttgatcggtcgacggactccacaaatgacacggtacgaatttttgcggcaaatctcacccggga

SEQ ID NO: 3014 - DNA, 2526 bp, Zea mays
  Clone ID: ZEAMA-23APR03-CLUSTER8866_1
cgcgcccccctggcccctgcttcttctccttcccctttcattcccaacgaggcaacgacccgccctgccccgcctcgcgatccccacccgcggcggcgcggagggccggaacccaaaccctaaccctagcggcccgggcgccgcctccggtctcgcccgcccgccgcgccgggccgcgatggggcagtgctacgggaaggcgcgcggcgcgtcctcgcgggcggaccacgacgccgacccctcgggggcggggtcggtcgcgccgccatccccgctgccggccaacggcgcgccgctgcccgccacgcccaggcgccacaagtccggatccaccacgccggtgcaccaccaccaggcggcgacgcccggcgccgccgcctggcctagcccgtacccggccggcggcgccagcccgctccccgcgggcgtgtcgccgtcgccggcccggtccacgccccggaggttcttcaagcggcccttcccgccgccctcgcccgccaagcacatcaaggccacgctcgccaagcgcctcggcgggggcaagcccaaggagggcaccataccggaggagggcggcgcgggggccggggccggggccggcgccggcgccggcgcggccgttggtgccgccgattccgccgaggccgaccgcccgttggacaaaacgttcggcttcgccaagaactttggggccaagtacgatctcgggaaggaggtcgggaggggccactttggccacacctgctccgccgtcgtcaagaagggcgagcacaagggccataccgtcgccgtcaagatcatctccaaagctaagatgacaacggccatttccattgaagatgttcgtagggaggtcaagattttgaaagccctatcagggcacgataatctcgtcagattctatgatgcatgtgaggacgccctcaatgtctacattgtcatggaattatgtgaaggtggagagttgctagacagaattttagcaagaggtgggagatatacagaagaagatgccaaagcgatcattgtacagattttgagcgtagtggccttctgtcatcttcagggagtagtgcatcgtgatttgaagccagagaattttctcttcacaacaagagatgaaagcgctcctatgaagttgattgactttggtctgtcagattttattagaccagatgaaaggctcaatgatattgttggaagtgcttattatgttgctccagaggttctacacagatcatacagtatggaagcagacatttggagtataggtgttataacatacattctgctctgtggcagtcggccattctgggcaaggacagaatctgggatcttccggtccgtattgagggctgatcccaattttgacgattcaccatggccttcagtatcggctgaggctaaggattttgtgaagagatttctgaacaaagattaccgcaaaagaatgactgctgtccaagcactgactcacccttggttacgagatgaacaaaggcaaattccattggacatactcattttcagattagttaagcagtatctccgtgctactcctcttaaacgtttggcattaaaggcactatctaaggctttaagcgaggatgaacttttgtatcttaggttgcagtttaagctgcttgaacccagagatgggttcgtgtcactcgacaactttcggacggctctgacaagatactcaactgacgccatgagagaatcaagggttcttgagtttcagcatgcgttggaaccacttgcgtacagaaagatggactttgaagaattctgtgctgcagcaatcagcccgtaccagctggaagctttggaaaggtgggaagaaattgctggaacagcttttcagcacttcgaacaagagggcaaccgagttatatcagttgaggagttagcacaggaactaaatctcgcgccgacacattactccattgtgcaagactggatcagaaaatcggacggcaagcttaactttcttgggttcaccaaatttttgcacggtgtcacgatacggggttcaaatacaagacgacactaaacagatgcaaactgtattcgcttctaatttgaagcctctcatcgattatatggccctgattgctgttacctcctgcctggcctgccctgccccctgagtctggtcaatgaccatccttgtttgtgatgcccctcccgctgttgccgtcgtagcttttgtagagtacatgtaaagatccttgtaatggcgaaatcatatggtttgctcaagaaatatatagtgtcatttgttctttttttttggctcgctaattttggacctttatccgtgggcagtcttttgttgacgttggcgctgaagttgataccgtcgcaggaacctgtaaggatgtaactttgtatgcacatacttgtatattattggcgtaaatttagttgtacactatcaacttataactgggttacaaagaaatgccagatatgtttgggatgaaaaaaaaaaaaaaaggatcccgagctccagaattcgtc

SEQ ID NO: 3015 - DNA, 1366 bp, Zea mays
  Clone ID: ZEAMA-23APR03-CLUSTER8918_1
atagccttagcccggcgcgagaagaaatcgtatcctcgccagctcttcaccaacagattcgtctcctcgcctccgccgggtttcgaccagaacgccgccgccagcccaccagtaattcctccgggcactggtctccacctcctctgggatcaccacccaagaaaagggtgcgcggcgcataggcgaccactgagattttattctctatataacatttggctgtaagtggattataatctctataactcttaaataagtgcaaatatctcaatgtcaagtgtttcaaattctattgctgtgggtcttccaagctatgggctatatctagagacaaggtttctcacgcagacctataggaacttcgcacagaaatcctcttacaagtattccagaatccgtgcagtgcagggaaatggtgggcgtcgaaggctggttgacataatccgaatcattccagaactctcaagggactattttaaaagtcgatcgaggcgagctctttttggtggcatctcgttgcttggcggcttttacgttgcacagacaatctcgctctctttcggtaccttgggtgtgaatgatgttatagcagcggttgtttgtgtcctgctgacagagtatgtgacaaagttctattacagtcggcctaaggttaccttccccattgctctcctcaacaatttcaagatgggtttcacatatggcctgtttattgatgccttcaagcttgctagctgagctgcactatgtcctgcttggctacttctttgcacgctcttgatcaccacaaacatgactatatatgacatacatcatttttgtattgttgtatgtgaagattgaatccagtttacatagccttttagtttacatggaattcatctctgctgtgcaattttgcaaacttgaggttaatccaagctaattctgaactgagcggcagtaaagttcctattgggttactgtctgttactgttgcctgccaaatttataaagtccttcagtaatatcagtgtgtcttgattgctagcagcaatgcgacaaacatggcagattccagtgatgctgtatcaaaatgtgtttgcctgtttggtctgtgcacagctttaggtggtttcttggcaccatgctgtattctgattattttgggtatttctcagaatctctaatagttggctgtgcgttgagaagaggcgacgatattattgtagcattattggaaatggatgtacactgaggcattgggaatggatgccattttatgtttgaaaattacacttcgtgaataatgatctgctttgggacgcgatatcaatagtcatgttctttgtgtgctgattttccccctcgaaaaaaaaaaaaaaaa

SEQ ID NO: 3016 - DNA, 1674 bp, Zea mays
  Clone ID: ZEAMA-23APR03-CLUSTER892_2
acatcctaatcgaaaactctgcgcgctgcttcctgttcggccgtgcctgcgtgccgctcgccccagctcccagctatggcgtctggccgagagagcttctctcatctcctccctgctcaatctccagccacgcgccctccagttctgagctcctctgcgcgcgcgaagtcctctgcgccgcaccctgaagccccctgctcggcgcccgagatccctcccatggccggtgttcggtccctgcgctcgtccgaccgaactccctggccatcgcgcttgccgtttccccacgcgcaggaattcaccagtgttcggtccgcgcgcagcctccctcccagctcagccgcccatctccatggccagagctccttcatctccctcctctcagcgtcttctccgtgctcccgctcggctccacccatggccggaatccccttcctgccgagctcccatggcggcgcccatcccctgctccctccagttctccctaccacgcccaccgccggtctatgcgcgcgcgctctgctcccatgccgcgcgcctagaccggcggtggtggaggtcgggcccgaggtggccaagtacggcgtcggcgacgtggtaggcgtcggggtgatcgttgggtgctgccgcgagtgcagcccctgcaaggccaacgttgagcagtactgcaacaagaagatctggtcatacaacgacgtctacactgatggacggcccacgcagggtggattcgcctccaccatggtcgtcgaccagaagtttgtggtgaagatcccggcgggtctggctccggagcaagcggcgccgctgctgtgcgctggcgtgacggtgtacagcccgctgaagcactttgggctgacgaccccgggcctccgtggcggcatcctgggcctcggcggcgtgggccacatgggcgtgaaggtagccaaggccatgggccaccacgtgacggtgatcagctcgtcgtccaagaagcgcgcggaggcaatggaccacctcggcgcggacgcgtacctagtgagctcggacgccgcggccatggcggcggccgccgactcgctggactacatcatcgacacggtgcccgtgcaccacccgctggagccgtacctggcgctgctgaagctggacggcaagctcgtgctgctgggcgtcatcggcgagcccctgagcttcgtgtcgcccatggtgatgctggggcggaaggccatcacggggagcttcatcggcagcatcgacgagaccgctgaggtgcttcagttctgcgtcgacaaggggctcacctcccagatcgaggtggtcaagatggggtacgtgaacgaggcgctggagcggctggagcgcaacgacgtccgctaccgcttcgtcgtcgacgtcgccggtagcaacgtcgaggcggaggcggcggcggcggatgcggccagcaactgatggcaccgcgtcgtcgagtcgaaccacgtctgtgcgccgcgtgcaacgttcgttcgggtcgagtctgcgtgcaacgttctgcttcctttactagttgttgtctttccgccttcttgccgttctgttctgggctttgagatgagacgatggatggtcagtttttaatgtcaaaaaaaaaaaaaaaaaaaaaaaaaaaaaaaaaaaaaataaaaaaaaaaaaaaaaagtaccgtgggaacgtgga

SEQ ID NO: 3017 - DNA, 1563 bp, Zea mays
  Clone ID: ZEAMA-23APR03-CLUSTER8931_1
gtcaattcagcaccgctggtccgccttccccagtcaattcagcaccgctggtccgccttccccatccccatcccccgccaccggcggcggccgttattcagcaccgccttcctccggcgaccgccgcgccgccgttccctggtctaggttctcgcctcttagcaaccagagcgcgcgcctaaatgaatgcggtggcggaggaggacagggcggcggagctggccggcccgctccgggacctcctcccgcctgtggacttctgctgcgcgtacggctccacgctccttcacgcacgccccgacgggacgtccatggtcgattacatcatcggcgtcgctgaccccctccagtggcactccgagaacctggaaaggaaccccgcgcactactcccgctggatggccggcttcggtgcaggcgccatcactggactggcggatcatgttggggtcggggtgtacttcaacccatttgtggaatggagagacaaggtaccatgaatcgtggtgccttgtgttcgatggcattgtgttccactggctgtgcgtgaattgagtacttgatgaagaaatctgtcttttggccgcagaggataaaatatggggtggtaaggatgagggacctggcaatggatgtcttgacctgggacaggttctacctcagtggtcggctgcagaaaccggtccatgttcttgttgacaactgggatataaggaaggtcaactcaattaacctagaaatggcaacttcagcttctctactccttttaccagcggagttcacggagtacgacctatatgctcaaatctgcagtctatcatatatgggtgatttgagaatgctgtttgcggaagacaaagataaggtgaagaagattgttgagggtagttttcagtcgttccaattgatgtacagccccctcttgcaagagtatattgctgaaggcctattgaagacatcatcccatggacaatataaaactttccggcaggattgcggtccatctacaacaaatgaactgttctctgttcttccgtggacgatccaaagccaaatgcaaggaaggcacacattgcacggaaaagaagtaccaccacgcaccgtagtttcttccaaggagatggcagcaaactgtgtccggagggccctgaggcaccgagtaatggtttcaagcgtgcggcaagcagtgtgtggtctgctcgcctctggcggtgcagttgctgctcaatacctcgggaagaagatggcgaaggcttggcgatctagagtggcttaagccaatgctgccccccaccccacacacccacacccaatggtgtacgctaggcttttgccagttctgggtttcatgcagtgtatggcaatcagtatcgtatgtttttcaccgctgaaagcctgataccggctgaaattttgtaggaccagaaacgtcaatgcttcagaatcaacaccacgcatatattagttataggcaaattcgtcttcactcagagcctagtttggaaattcaaaccatctttaaaattgaaggagatttgagcttccaaaaaaaaaaaaaaaaaa

SEQ ID NO: 3018 - DNA, 919 bp, Zea mays
  Clone ID: ZEAMA-23APR03-CLUSTER8966_11
aggcctctccaaaattcgaacaccctcgcctggaaccttctacgagccagctccgagcggttgccgtcccataatctgagagacggtgccgtgggtttgcggcgcctgggtcgccagtaaagtgcgggccgagatggagtcctcgtcgtcgggcggcgggctggcgcggcggcggagtagcggcggctggggcagcttcagcggcgacacggacccgttcgacatccccgcgaagggcgcacccctcgagcggcttaggaagtggcggcaagcagcccttgtgctgaatgcatcaaggcgctttaggtacacactcgattttggaagagcattggccttggtttcaagactcccagcgaagcaattgaagggacctacattgacaagaaatgtccattcactggaaccgtttctatcagaggcagaattattgctggaacatgccacagtgctaagatgaacagaaccatcattgttcgcaggaactatctccactttgttaagaaataccagaggtatgaaaagaggcactccaacattccagctcacatctccccatgcttccgtgtgaaggaaggcgaccatgtcatcattggccagtgcaggcccctatcaaaaactgtgaggttcaatgtcgtcaaagtcattccagctggatctgctgctgccggcaagaaggctttcaccgcagcctgagtttaagactatgttccatgagtattttatatagtgatgtctttttttgttaaaaaaactgccttctaggcttgtgcctttcgactatggtttggagattgttcccatcttaatgaagtccaatcatctgaacatgttactgtttattgtaccttgtcgtgcaaagttttgcaagatctgtattgtttcctcccaaaagaaaaaaaaaaaaaaaaaagcggcc

SEQ ID NO: 3019 - DNA, 789 bp, Zea mays
  unsure (1)..(789): unsure at all n locations
  Clone ID: ZEAMA-23APR03-CLUSTER8966_12
acggttcacggtnccntccagtgatgnctgcatggactgtgaaggcttnccncangcagncgaaggttttcctcagctnaaagaaatcngncaagggtaagaagactgngaagggcgncaaccgatnctgnaanagcattggccttgncttcaagactcccagggaagcaatcgaagggacctacattgacaagaaatgcccattcactggaactgtttctatcagaggcagaattattgctgggacatgccacagtgctaagatgaacagaactatcattgttcgcaggaactacctccactttgtaaagaaataccagaggtatgagaagaggcactccaacattcctgctcacatctctccatgcttccgtgtgaaggaaggtgaccatgtcatcattggccagtgcaggcccctgtcaaaaactgtgaggttcaatgtcgttaaagtcattccagctggatccgcagctgctggaaagaaggccttcacagcagcctgagtttatagactatgttccatgagtagtctatagaatgatgtctttttaattcaaaagaaatctctcttctaggctggtgcttttcgactataatttggagattgttccaatgtccgtgcaatcatctgaacatgttactacttattgtaccttgtcgtgcaaagttttgctaagatctctattgtttcatgttttttgataaaaaaaaaaaaaaaaaaaaaaaaaaaaaaaaaaaaaaaaaaaaaaaaaaaaaaaaaaaaactcgaggggggaacccgggtaccca

SEQ ID NO: 3020 - DNA, 1685 bp, Zea mays
  Clone ID: ZEAMA-23APR03-CLUSTER8981_1
cgggcgggcggcgcggatcgggggggtcgaatcgaatcgatggaccacaagccatgcgcggccgtccttgagccgttgctcccgtcgccggcggagggcaaggcggcggaggcgaagcggctgatgcggctggcggggccgatcgtcgccagctgcgtgctgcagaacgtggtgagcatggcgtccatcatattcgttggccacctcggcgagctccacctcgccggcgcttccctggccacctccctcgccaacgtcacgggctacagccttctcaccggaatggcgagcgcgctggacacgctgtgcgggcaggcgttcggcgcgcggcagcaccacctcctgggcgtgtacaagcagcgcgcgatggtagtgctcgggctcgcctgcgtcccgatcgcggtcgtgtgggcgtgcgccggccggatcctgctcctcctcggccaggacccgcagatcgcggcggaggccggcgcgtacgcgcggtggctcgtcccgtcgctggccgcctacgtgccgctgcagtgccacgtccgcttcctgcagacgcagagcgtggtcctgcccgtggcggccagctgcggcgccacggcgctctgccacgtgctcgtctgctgggcgctggtgtacaaggctggcatgggcagcaagggcgccgcgctcagcaacggcgtctcctacgccgtcaacctcgtggtactggcgctgtacgtgaggctgtcgggcgcgtgcagggagacatggaaaggcttctcgcgggaggcgtttaaggacctgtggcgattcgccgagcttgcctggccgtccgccatgatgatctgcttggagtggtggtcgtttgaagtccttgtgcttctatccggtcttctgccaaatcctcagctggaaacgtcagtcctgtcgatttgcctaaatactggtgctctgctctacatgataccattggggcttacttactccataagcacacgcgtttccaacgagcttggcgctgggcagcctcaggccgcgaagatggcagcaaaggtagtcatgtacatggctttgtctgaaggactcgttatatccttgacgatgaccctgctacgcaacatttgggggtacgtgtacagcgacgaggaggagatcgtgacgtacatctctaagatgttgccgatcctcgggatatctttcttcatagatgggctccatagctctctttcaggggtgctcacaggctgcggaaagcagaagatcggcgcggccgttaatctcggagcgttctacttgctaggcatcccagtggctgtactgcttgcattcgtcttccatctcaacggaatgggcctctggcttggcatcgtctgcggcagcgccaccaagctggggtttcttctgtttgtaacgtgttccgtagactgggacaaggaggcagtgaaggcaaggtacagagtgttagggtcatctctcccgttagcatgaaaaaaatgccagtgttacatggaaatcccatttgaaggcagttgaacagaacccggcaaagaaagtgtgggaacaaaaaactttctatagttggggacatctcaaagtcatagctatggggaaggcaagaagaaccagagccagtatttttggattcatctgtactgttaaattttgtagcactgcaatggtttttcaggaaatataattagctggattgagtc

SEQ ID NO: 3021 - DNA, 1391 bp, Zea mays
  Clone ID: ZEAMA-23APR03-CLUSTER8987_2
gcacgagaccattacctagaacatcctaatcgaaaaataaacaagtttcggttgctgcgaacgcgggcaaccccagttcgaatgcttccccctccggtcgcgcgggtttctctgcttcgctgggatcaagatgattggttcattcattaccggaatgctaacgcttgttctcggatacgcgtaccctgcatacgactgctacaagacagtggagctgaacaggcctgaggtcgagcagctgcggttctggtgtcagtactggattttactcgcgtttctcaccgtactggagagagttggggaaactttcgtatcatggttgccaatgtatagtgaagcaaagctcgcatttatcgtgtacttgtggtatccaaagacacgggggactgcctatgtatacgagtcattcttcaagccatacattgcaaaacatgaaactgagattgatcgaaatttgctcgagttgaggacaagggccggtgacatggcagttctttatttccagagggttacaaactatgctcagacaaggtcttatgaaatcttgcagtatattgcctcacagtcaccgactcaaagacaggcacatcagcagcagcaacgcccaccaccgccacggactcggcaggtcaaccctgcacctccacctattcccgcaccctccgcgcctccgatgccaccacagcctgcccaagcccaagttcctcccactccaccaaggcccctagttccagtggttcctcctggcgcagtgcctcctgccccgccaccaactgctcctgaagccaccgccaccaacggtcttcaggacaccgaaaccatgcaggtcgacccacctcgtgcttcactgagcggcccaccgccaccactaccacctgaggagacgctcatcgaggaggcgatccggctgacacggggccggctcaggaggcgcttggctgggggatctggaccaccgcaaaattagcgtcgatcaagatttccatctcacgcgaattgcaccacactggtctggttcttggtgattgactgagaagagggggaatgctgagttggttgaacagagtttgggtttcctcgcatgcgttctccgttgtacgaactggaaccggtttggtctcgaattgtgaatagtatcccagaaacagaagtggatgatcaattcaattcacagggtagcgctaggaaatatggttgggaaccatcttctgcaagacgcgaaggcgcgacatgtcatgagcatttagcaacgatgatactactggtcacagtagtgtagtctggaatccaaatgcgaagaacaaaaaagaacagcgccatgtatgtgctgcatacttgtagttaacgactactatgcaattagtccttatatgcaatcagcgatactatgc

SEQ ID NO: 3022 - DNA, 1391 bp, Zea mays
  Clone ID: ZEAMA-23APR03-CLUSTER8987_4
aaagcccatctcggtagccggagaacgagcagcagcggaggcgatggcgtccccggatcccggccacacgccggcgcaaggcgaggaatctgcctccccctcctcgtggcctccccgaaagctccaggtctcgttccctccttattagcacctcataggaaaaaaaaatactattggattcgtgttcgtgcccatccttcttcatctcagatgcagtatttggtatccttaatttcggttgaaatgatctgtatttcgcattacttgcgggcttggttcatacgtgttggaactacagttacgtttttctgtgttctagacttttctttaactaagttaatcctgtttgaatcatcctgtttcatttgcagtgagaaaattatagaacctatccattgatgtctcatttatctgtattgtgagaaaggtcccacaaatattcgttttagatgttgttggattagcggagaagaaacttgcagttcccctaaggccctaagatccattattttttgttcttttgttgtcacattcttcctgttgccttgtagagtttcacaccagggctgtggtcacaatacaaagcttatgaggatgcagttgtggagaacattaaaggaactattgcggatgctctggttcttgtgagagagcatcaggcggaggcaattggatgtgccactgttgcaggattcattctgttcagaggccctcgaagatttttataccgcaatacctttggccgtttaaagactgagaaggatttactgaatgatgccgagcaaagtatgatggagtaccaaacatctattcagaacttgaagaaagaatcaaaatacactcttgacaaagtagctatcggtgaaagcgatgtgcagcgtgggcgaactgatctgagatctactgggaagcagatacaatctcttataggttccatttacaaagcagaatctacagctgcaggtctgatggatagactaagaaccattccaaccaggcaatctctcgagctgcgagcagaggtggcttccatggcctccgatttgaagaaccagaggtgtgccttgcaggaaaggatcaacaaaatatctgaatatggtgtccgtgtctgaactgctgcaccgtctgtacatttcccctcatagagcctcttttggtcctcccgtacaataaactgtgaatccaccgtgaggtgcgcgttttggttagacaggttccgattctaaccatattttcttgtcagcattttgaatgctaggacagacatggtaactcatcacaaccataaattgttcctatcactttaacgttgagcattgctcgtttctgggaagcagatgggctgatggctactatcttatatatgcgattgcaaggaaaaactttgtccc

SEQ ID NO: 3023 - DNA, 1198 bp, Zea mays
  Clone ID: ZEAMA-23APR03-CLUSTER9031_2
ataaagacgaggcagtgaatcatcggatgggcaccggcatagcacagacctctctagctagctaccttctagctgcatttcatctgctcgctccggtcctgtggttgatctgaactgtcacagcaatgcaagccatcatcagtagcaaggaggcgacagcagcatccatggccaagtgcattgccaccatgctcgccgtcgcggccatgctcacgtcggtgcagccatcggtggcggcgagcaacccggcagacgccgacgcgctccggttcccgggccgcccgggcagcaggccgcgtaaccccgtgttcccggggtacccgagaccgaggccgtcgccgccggtgtccagcggctcgtcctccccggtggtgccgtcacccatgcccggcctgccgtcgtcgtcgggtccagtgtcaccggcgccctgcgccaggcctggcgcggtggtgccgcagctgccgggcttccccggcctgccggcgggcagcgtgggcggcggctccacgccgtcgtcgccgaccgactgcgtgaccccgctcgcggggctgatgacgtgcgggacgttcctgacggggagcgagccggagacccccacgccgcagagcgagtgctgcgcgggtctcggggcgttcctcaacagctccagctcggcggcggaaggcgacgaccgcatccttcggtgcctgtgccccgtcatcctcggggacgtgaacaagatgctgcccaagccggtggaccccgtgcgcatgatgtacctgcccatcgcctgcggcgtcgtgctgccgccacaggtcctctacatctgcttcactgggcagcaaaccgcgccgctcgtcggccgcattcctgacgtctgggagaagccgacttcagcagccttgtcgccctgatgagcaacttgaatctgaatggaggccggccacgaatgatccgatccagtcagcatcgtcatttatagttcatataagcacacaagatcaaatttattagcagctgcgtgcctctctacaacatgcatgcttccatatatatagttgacttgatacgtatataaatagttcctatataaatttgaatatatgacagtttcaagttatcagaaattagtagcccgagaaattgaccatcaggtctcatgtaagagcatgctcttttacacgaaagaattaatatataatgtaagccaggtaattgc

SEQ ID NO: 3024 - DNA, 2591 bp, Zea mays
  unsure (1)..(2591): unsure at all n locations
  Clone ID: ZEAMA-23APR03-CLUSTER9083_1
caaacttgtgcgtgcctgcgtcccctcccctgcgctgcacacccacggcccacgccacggcgcggcagaggagcagggatcaccgatcgagcgaggatgggcaactgccaggcggcggaggcggcgacggcggtggtgcagcacccgggcggccgcgtccagcgcctgtactgggccaccagcgccgccgaggtcatgcgcgccaacccaggccactacgtggcgctcgtgacgcaccgcgcgggcgccggcgacgaggggaagcggtcccagcagcagcgggagcaggagcagcagaggcacggcgccgcgcgcgtgacgcgcgtgaagctgctcaagccccgggacacgctggtgctcggccaggcgtaccgcctcatcaccgtcgccgaggtcgccaaggcgctgcaggccaagaaggaggagaagacccggaaggcgcagcagcagctgctgctgcaggtagctgagccgaagcacggcggcgggagcacgggctccggcgacgagttgcggccgcaggagcaggtggcggatggctgccttgatcaggagaaggacgggcaacggaggagcagcagcggctcaggcgcggcggcgcatcgccactggcgcccttcgctccacagcatcgccgaagccagcagctagctggtgtgtgtgcncggcgcgcgcgtggtcggcctcggtcaggcagaggaagggacgaatcggaacaatgggaagcccatgcatgtaatatactaacaacaagtcacagaaaaacttgggcgtccctcctccgcctcccctacgcttcatacccactgccacgcccccgaggtgcaggagaggcagggatcgccattggacgaaggacggtcagcggccaggaggggagggtgaggccgccggggtacccgcacccgggcggcaccgtccggcgcctgtacaggcccgccacccccgccgtggcattgcgctcgaaccaagccaactaggtgaccaacgggaccaactccccgggcgcaggcgactgggcgaaggcgccccagaaaggggttcgcaatcagagggtaacaagagacgggacagctttaggaggtgcactagttcttgccgatagggggatttggctcattgaggagcttgacgagatgaataatcaagatagggtaggtattcatgaggagatggagaaacagagtatcaagatatcaaaagcaggaatcgtcacatctcttcaagctagatgcagtgatattgctgcggcaaacccagtagggggaaggtatgattcatcaaagacattcactcagaatgtcgaattgacggatcccatttttatcaaaagcaggaatcgtcacatctcttcaagctagatgcagtgttattgctgcggcaaacccagtagggggaaggtatgattcatcaaagacattcactcagaacgtcgaattgacggatcccattatttcacgtttcgacgtcctctgtgtggttaaggatgttgtcgatccatttacagatgaaatgctcgcaaggtttgttgtagatagtcacgccagatcccagcccaagggggctaaccttgaagacagggtttcaactgatgtggatgatgatccactggctgctgcaaggcaagctgacccagatgtcctttcccaagacatgctgaagaaatacataacctatgctaagctgaatgtgtttcccaaaatacatgaagtcgatctagataagattagcatgcaaggtgcactgagagctacgtgtctcaggaagatgttgacatggccatccgtgtcttgcttgactcttttatttcgactcagaagttcggtgtgcagaaagcacttcaaaagaatttccggaagtacatgacattcaagaaggactacaacgagctgctcctgctgctcctgcgcacactggtcaaggacgccgtgcacttcgaagaaatcatggcaggatcagcctcacgtcttactcacgtcgaggtcaaattggaggacctgaggaacaaggcccaagaatacgagatctacgatctgaagccgttcttctccagcgcgtgcttcagggacaacggcttccttctggatgaagggcgtgggatcatcaggcatccactggcggagtaacaactgagaactgatcttcctcatgtctagaaccggcctttgtctgttacggccctgagatgaagagtgatgatatctgacctcatttgttataggcatacaattgacacttggctggtcgccttttggatttagtatctgttgtgtcttgtttgagagtttcgtactatatgcacttgctgccatttaggcgtgactgtatgtcggactggaagccaaaagaccctgagggttattgaagatgatgaaggcatcagttgccatgccttagaagaagagtatgctaaacttttccatccacccttgtctgacgaacatgtggctgccttagctgccctctttggctgttctgttcagttgcaacttattgtagatagaattgtagatcaactctccggatggaaatcatatttgatgacaaaaaaaaaaaaaaaaaaactcgagggggggcccggtacccaatcg

SEQ ID NO: 3025 - DNA, 1959 bp, Zea mays
  Clone ID: ZEAMA-23APR03-CLUSTER9094_1
gacctcactcactagctagcttccagcagcagcagccttgtcgtgcaacagcagcaccaggaccaggctaccaccagttagctgctggggacctggggtacggttgctgttccgtgactctcgtcgcacaacacaatgccggccatggtagaggaggggctcgtcaggcgggcggcgcccgagccgcacttcctggtggtgaccttcccggcgcagggccacatcaacccggcgcgccacctcgcgcgccgcctgctacgcgccacgggggcgcgggtcaccgtctgcacggccgtgtccgcgctccgcaagatgttcccgggcgccgaggcagacgcggaggaggagggccaccgcgacggcgcgggggtgcggtacgtgccctactccgacggctacgacgacggcttcgacggcgccgtgcacgacgccacgcgctacatggaccaggtcaaggtcgtggggtcccgcacgctgggggacgtcctggcccgcctccgcggcgcgggcaggcccgccacgctcgtcgtgtacacgctgctgctgtcgtgggtggccgacgtggcgcgcgaccacgccgtgcccgccgcgctctactggatccagccggccaccgtgctcgccgtctacctgcacttcttccgcgccacgggcggcgtcgacgcggccgtcgccgcggcgggcggcgacccgtgggcgggcgtccggttcccgggcctcccgccgctccgcgtccgcgacctgccgtcgttcatcgtctccacctccgaggacgacccctacgcgttcgtcgcggacgcgttccgcgagctcgtcgggcggctggacgtcggcgaggacagccccagcgtgctggccaacacgttcgacgccgtggagcccgaggcggtggcgtcgctgcgggagcacggcgtggacgtggtccccgtcggccccgtcctctccttcctggacgacgacgcggcggccggcggcaacaacgacctgttcacgcaggacggcaagggctacctcgagtggctggacgcacaggcgccgggctccgtggtgtacatctcgttcgggagcctgtcggtgatgcgcaggcggcagatcgaggaggtggcgcgggggatgtccgagagcggccgcccgttcctgtgggtgctgcgggaggacaaccgcagaagcgagggcgccgacgccgacgccgcgacgctggccggcggcgggcgcggcatggtggtggggtggtgcgaccaggtgcgggtgttgtcgcacccggccgtgggctgcttcgtcacgcactgcggctggaactccacgctggagagcacggcgtgcggcgtccccgtcgtgtgcgtgccgcagtggacggaccagggcaccaacgcgtggctggtggagaggatcgggaccggcgtcagggccgccgtcagcgacaaggacggggtgctggaggccggcgagctgcggaggtgtatcgacctcgctacctccgacatggtgcgcgccaaggccgccgtgtggagggagaaggcgcgcgccgccgcgtcgaagggcggctcgtcggagaggaacctcaaggcgttcgtcgccaagcagatcgccggcgggaataactaggccgtcagctctcgtgcggtcgacataggttatgggactcgatctacaactgtacttaattaattgttgctctaagcgcatgtgcaagtgcaaacatgtgtgtcaacgtgataatattgatattctctgcaggtgtgtgtatacgtgataatttatataattctcacttaatattaaaaaaaaaaaaaaaaagacctcgcgcgcgtcgtcgcatcgcatgcatcattggcttttcccccacaaggccacaacagctagctggcattagatagcgctatgctatacaaggcgtaggatatggtcatatggaaatctacgactgttccttcattggtgctgctgcttgatttggtt

SEQ ID NO: 3026 - DNA, 1728 bp, Zea mays
  Clone ID: ZEAMA-23APR03-CLUSTER9178_1
gcacgagaccattacctagaacatcctaatcgaaaaagatatttggaatacaccccgtttgcggttcctgtcccgaggcgggaaactacacatcggagctttcgcggggaggcggcggcggatccgcgctcggttcgccttgccttgccgacgccgccgacgtgccatgggaatcaagggcttgacgaagctgctggcgcagcacgcaccgacagccgcggtgcagcggcgggtggaggactaccgcggccgcgtcatcgccgtagacgccagcgtcagcatctaccagttcctcgccgtggttggaaggaaaggatcagagcttctgaccaatgaggctggtgaaatcacaagtcatctgcagggtatgttgaaccggacgataagaatgctagaagcagggataaagcccgtgtttgtgtttgatggcgagccacctgaaatgaagaaaaaggagcttgcaaaaaggtccttgaagagggatgatgctattaaagatcttaatagagctatggagattggggatgagaatgcaattgaaaaatttagtaaaaggactgtcaaggttacaggaaggcataatgatgactgcaagaggctgttaaggttgatgggtgtccctgtagttgaggcaccaggtgaggctgaagcacagtgtgcagcactttgtgaaaatcaccaggtttatgctgtagcttcagagtacatggacacactgacttttggtgcccgaaggtttcttcgtcacttaactgaccttggttataagaaatctcctgtgacagaatttgatgtgtcaaaggttttggaagaacttggactcacgatggatcagttcattgacttgtgtatccttagtggatgtgattactgtgagaatattagaggtatcggaggacaaagagccttgaaactcattcgtcagcatggttgcatagaagaagttctgcaaaatctgaaccagacgaggaattccagatttcacgtggacctcaccagatccagagggccttatggatttcttgtcaacagaaaacagtttcagtcctgatagagtaacaaaggcagtagaaaagataaaggttgctagggataggtattccccaggcagaatgaagcatttaacaccagttgctagcttacgaggatctcatactgagaaggaaccccagtgcatactaggttctccaggacaaactctgaaggtcatgtcatctccacaagtatgcaagagtccaagctctggtttcagatatggtagctcaaagccatttatgctgggcagacagtcaggatttcatggaatgccttatgctctctcttttatctaaaatctgtagctgctctggtttatgagaaggttgaccgaagctgtagctgcggctacatttttagatgatggaaaccgatatccggctttcacctcactgggaggatatggccaagtagctgtagctgcagctacatgaaaggatgctcacttataatatgttaatctcgtgctactattgtaatctttccatttctattgtaacgtagttaatcagctactgcagttcatcgttgacatctaatgctggttgctgctacaccggttgaccttaccttttgtcaatatattctgagttttcgggatggtgttttcaaaaaaaaaaaaaaaaaaaaaaaaaaaaaaaaaaaaaaaaaaaaaaaaaaaaaaaaaccaaaaaaaaaaaaaaagggcggccg

SEQ ID NO: 3027 - DNA, 1888 bp, Zea mays
  Clone ID: ZEAMA-23APR03-CLUSTER9225_2
cacaggtgcggcggcgcacactgctgcacactgcactccctccgtcccgcgtccccgttcggcgctctcggcacgaccgccggtagcccgggacgcacgtcgcacggccccatccctcctagcggccggtgacggcaccggcggccctttgctcggctgtgcccaagctgcgagggcgagatctacccccgcgtccgtgcatcttcgtcaggcccttctccggacgagcactcacaggatgtgttctgaagttcatgttgagggagatgcaagtgtcggacagaagggttgcaaggatataaggcgttacaaatgtgaattttgcacagttgtcaggtcaaagaaatgcctaattcaagctcacatggttgcacatcataaggatgaacttgataaatcagaaatatacaactcagatggggaaaagattgttcatgagcaggaacataggtgccaagagtgtggccgttgtttccagaaaccagctcatctgaagcagcacatgcaaagtcactcacatgagggcatagatagttaacagcgtgaagcattggatcccatttaaagaactccaaaatgcgacgaggtattttttattcttgcctgaactagtaacaggttgggatgacctcctgtgaagcttcaacaagattgcctcagtcacgctcactgagtagagactctttatttgcccactggaagactgccccttcagctataaaagaaaagatcacttgaaccgacacatgcttaagcatgagggcaaattgtttagttgcaccctggatggttgtgatatgaggttcagtatgaaggcagatatgcaacggcatgttaaggaaatccatgatagtaagaacccccatcaatttgtttgtaaggaggacggctgtaacaaggttttcaggtattcatcaaagctgaagaaacatgaggaatctcatgttaaattggactatgtggaggtagtgtgctgtgagccaggttgcatgaagatgttcagaaatgttgaatatctgagggctcataaccaatcttgccatcagtatgttcagtgtgagatatgtggagaaaagcacctgaagaagaacatcaagcggcatctgcaatcacatgacaaggtgccctctgatggaaggatgaaatgcacttttgatggttgtgaacacttcttttccaacaaatcaaatctgaccaagcatgtcaaggcatgccatgaccagctgaaacctttcaagtgcggaatcgttgggtgtggcaaggcgttcacctacaagcatgtcagggataaccatgagacatctggtgctcatgtatacatggaaggagactttgaagagttggatgagcagttgcgtgcccggccaagaggtggtcggaagaggaaagcattgacggtggaaacactgacacgcaagagggtgaccatctccggcgaggcttcatccttggatgatggagtggagtatcttcgctggttgctatctggtggggatgattcaattgattgtcagtagccggcgtctttttgctatcaccgctgctttgtacatgggttagattatgtaatgtaagttgtttggtagactacgatggtgttcatgacgcgtttgatatattgtcagcagtatggtagtgcagggctctcatagtaaagcttgccatttttgttgtatctttaacccacgtgggtccagatgatgtgtttattcctatgtatttacttatctacatgtatccacatgtgcgactttggcgtttgtttgagattataatctgttaaaatatgttggattatataatttgggcagattataattccaaacaaacactgactaatgctctatttgttttaaaaaaaaaaaaaaaaaacaaaaaaaaaaaaaaa

SEQ ID NO: 3028 - DNA, 1642 bp, Zea mays
  unsure (1)..(1642): unsure at all n locations
  Clone ID: ZEAMA-23APR03-CLUSTER9227_3
ccggggagtcaacttacgcgtggaaagacgcccagcctcttgacgtcgggccgctatccctctggcctcgtctcgtcttctcttctcgcgaatggcggcgctgtgcgatctccgtcgctgccccctccgccggtgatttctgggacgcgcgacgaacatgagttggaaggaggtggtcgtgctttgggcggcgagggacctgggcgctagcagcctcggaccctgacagatcacaggtgcgtcgaaccctaccagatctagacttgtctcgcctcctatcgatcacgccgttgcagttgcagttggagcgacgggcgctaccaaaagcgacgggcggccggcggcggcattgcagttggagcgagcgagcgcggtgcctttcggacgacactgagcacaagtcgcacattgtcacatggagctagactagaggtcatcgccatcctgtcagtgtctgctcgtgatcaaactgcctgctgcctgcccgccccaatacacccaaccagatttcaattcacttcttggaagctgctgcttcgagcttttgagtagcacccctgcttacagacatttcatatccatatatatgctcctagtcctggatctccttgggnnattttatattggcccccacaccacccccgactcccacgaccattaatctgaagaagtgctttggtgtaggcctgctgcttgctcatcagctcgcgtataaacatgtctcttcccacgcggacgtagagctagctagctagctagatgtgtgtgtgcatagaatagcgccagtagatcccggccaaccttaagaggaggggagacacaaacggctctggcttttttcggaagggtgtctggaactcttccggttgccgacagagagggaaggggacatatggggaggaagctgggcggcctggacagggtcctggactgcttgtcgctctccctgctgtgctccggcgcctgcgcctgcgtacactccatggatgaagaagaggaggaggacgacgagcggaagcaggccctgctgctgagcagccagctggtgcagcttaggggcttcgtcgatggagccgccgccaagactctcgctttccatctggagcctaagaccgtggagctgaaggtgtccatgcactgctatggatgcgccaagaaagtccagaagcacatctccaagatggacggcgtgacgtcgttcgaggtggatttggagagcaagaaggtggtggtggttggggacgtcacgccgtacgaggtgctggagagcgtctccaaggtgaagctcgcgcggctatgggtggccccggaccccaagcagcaagccgcagaaaggttgcacttgcaggcgtagaggatctctctcatcacatcagcgctccatatttcgtcgtgctacagcattgtatctcgcgtagatactattagattgtctttccgattatcgtaggttgccaccggtcttctcctttattactattagattttctttccgatgaagtgctcccggccagtacttctttttgccaacttcagcattgtatctacgcctgcgcctcgataagcattgtgcctacccgatctcattaaagcacatacctgacaaaggattgcaataggatctggtactttcttttttggc

SEQ ID NO: 3029 - DNA, 1381 bp, Zea mays
  Clone ID: ZEAMA-23APR03-CLUSTER9227_4
gcacgagaccattacctagaacatcctaatcgaaaaaatcgactgcactccacggccaccatctccaccagcatcgcccacaccgctgtcatccgctccgtcgctgtgccatcgtcgtccactgtgccgccatccgctccaccgtcgtgccatcgtcgtccactgagccgccattggaagataatgggttcttgggaggagcatgttaggcggtttttgttggaggaggaagaagacgatgacgaactattctttgttattcttcttgctataatcccatacctctcggaagagaaaaggcccatccacacaacctccctcaccggtgctaaaaaggttaaagaaattcttgaagggcatgagagctggtgcaaatctgggttcagaatggagaaggaaatattcaaagccacatcaaattttcttagaagagagaatttactatgtgacacgcgaggagttagcattgaggagcagcttgggatgttcatgtatatgatctcccacaatgctagtaaccaattctacaaaaggcttttcaacacagtggagatactatccatcaaaatatccgaggtttttgagatagttcccatactaactcaacgatttgtgaagctttctagtcagttcaaactcatgctaggattgcaacaggttctaggttcatgccctttttcagaattgccttgtgccattgatggcacatatgtacccatcactatcgcagaagacagggcccctccatatagaaatagaaaaggaactctttcacacaatgttatggtagtttacgacttcgatcttaatttcacatgtctcatgtggatgggaagggtcggcatcagacgcaggggtgcttcgatctgctattagcaaatgatttattgtgccagaaggaaagttttattttgtagatggtggctatgcaaatacaacatcatacattgcaccatacaaaggagttcggtaccatctcagtcagcttaggaggcgtcgttcatcacaaagtggttatgcaaactacaaagagttgttcatcatcgccatgcaattcttcgtccatgttgtattattgttttttagttttcactcatgactttggaaactttgaagctccttaactaaacctaagtaaatagattgtaatagcttttgtgatctcttgtgattgatctaatataatttgagctattagcttctatatttggatggaatgatcttttaataatttgagcacttgtttctttcaatggatgggaatgatctatgatgtgggggtttggaactgaagttgagcatgcataatggagaaccaggagaatcagattgtggtgttgtattgttgttgctataatttttcatttgtgagcttttgtcc

SEQ ID NO: 3030 - DNA, 1835 bp, Zea mays
  unsure (1)..(1835): unsure at all n locations
  Clone ID: ZEAMA-23APR03-CLUSTER9248_22
aaaaccgggttttcccccctggaaacgggggcaggagggcccaccccccataaagggggtttcccccccccccaaggcccccccggggtttgccctttactctttcccgaatggaaattttgggtgggattatggggggggattccaatttctccccctgggaccaggtaggccccttgatttggcccaagcttggaattgaatcccccactgaaagggacccaaagcctggaaattgcaacggggcgggcggcaggtgttgaattagtggattcacccggttgcaggtattttgcatcgaggagagagagagcttactagtccccccccccccccccatttttgtccttcatctctgctgatacaggaaaggtgagtgcaaaaacaaataaggcaaatgtcaggaacggaagttgcaaatggccggatcccatctatgaagcaacacggcctcttcaggatcctcggactaagacatacgatgacaagctatataagcttgttgtgaccatggggacgtcacggtctagtattcttggtgaggttgatgtcaatcttgctgaattcgcagaagcactgaagccgacttcaatagcacttcctcttcgtggttctgacttcgggacactgttacatatcacagcacaacttctcactacaaaaactggtttcagagaatttgagcagcaaagagaaactggcactagaagctctcagcagttattgaaccaaagaagtcatgatcctgttgaagttgctgcggcctcatcagacattggcactgataagaattgcgatgaggaaatggaatcgccaacaaagaacaatttgaatagcaacaatagcatcaaagatatttctcaagagcacaagaaattagcaaatggattcaaccttttccagaaggagctggaaagactgaaagatgagaatctgtctcctcttcttcccctagacgtcaatctaactgacccatcactcagtggtttggaaaggacattgtcacaactcgatatggcaaatgagcatttgcaaagtatttttccatcatttaaagagcttcctggttctggcaatgctttggaaagattactcgccttggaactcgagcttgcagaggctctccaagcaaagaagaaaacaaacatccttttccagagttcattcttgaagcagcacaatgatgaagcggcgatcttccaaagcttcagggacatcaatgaagtgatacaagatacgatcgagctgaagaggaggcagatggcggtagaaaacgagctaaaggagatgcagggcaggtattcagagctcagcgtgcagttcgccgaggtggagggcgagcgacagaagctcgaaatgaatctgaagaaccgaacaccatggagatcatagggaaccaccaatcaaagcgaagaaaactaacgagagaagaaaaaaaagtgtcagccagctgcaggctttgtatacaatcttgtgcgacggcagtgggatacattttgtagtgtatatatatcagctgtatcgattgtagagttgtagtgagcgagtgatatgcataaaatgtaacacagcaccttgtacaagaaacaagccttgttatctgattgttccttgccaacaaaaaaaaaaaaaaaaaaaactcgaggggggggcccggtacccaatcgccatatatggagtcgataacattcactggcgtcgttttacacgtcggactgggaaaccctggcgtacccacttatgcgctgaagcaatcccctttcgcagtgggggatacgaaaagcccgaacgatcgcttccaaaaantggccacctgatgggcaaggcaaatgtag

SEQ ID NO: 3031 - DNA, 1707 bp, Zea mays
  Clone ID: ZEAMA-23APR03-CLUSTER9255_20
tttttttgtttggatgagatcgctgcaacattgttcttgatccacacttgcctgatcttaccgtctcgttcgtgttcgtgccagcaaccagcgaaaatgggtgccggaggcaggatgaccgagaaggagcgggagaagcatgagcaggagcaggtcgcccgtgctaccggcggtggcgcggcagtgcagcggtcgccggtggagaagccgccgttcacgttggggcagatcaagaaggcgatcccgccgcactgcttcgagcgctccgtgctgaggtccttctcgtacgtggcccacgacctgtcgctcgccgcggcgctcctctacctcgcggtggccgtgataccggcgctaccctgcccgctccgctacgcggcctggccgctgtactgggtggcccaggggtgcgtgtgcacgggcgtgtgggtgatcgcgcacgagtgcggccaccacgccttctccgaccacgcgctcctggacgacgccgtcggcctggcgctgcactcggcgctgctggtgccctacttctcgtggaagtacagccaccggcgccaccactccaacacggggtccctggagcgcgacgaggtgttcgtgccgaggaccaaggaggcgctgccgtggtacgccccgtacgtgcacggcagccccgcgggccggctggcgcacgtcgccgtgcagctcaccctgggctggccgctgtacctggccaccaacgcgtcggggcgcccgtacccgcgcttcgcctgccacttcgacccctacggcccgatctacggcgaccgggagcgcgcccagatcttcgtctcggacgccggcgtcgcggccgtggcgttcgggctgtacaagctggcggcggcgttcgggctctggtgggtggtgcgcgtgtacgccgtgcccgctgctgatcgtcaacgcgtgggstggtgctcatcacgtacctgcagcacacccacccggcgctgccccactacgactcgggcgagtgggactggctgcgcggcgcgctcgccaccgtcgaccgagactacggcgtcctcaaccgcgtgttccaccacatcacggacacgcacgtcgcgcaccacctcttctccaccatgccgcactaccacgccgtggaggccaccagggcgatcaggcccgtcctcggcgagtactaccagttcgacccgacccctgtcgccaaggccacctggcgcgaggccagggagtgcatctacgtcgagcctgagaaccgcaaccgcaagggcgtcttctggtacaacagcaagttctagccgccgcttgctttttccctaggaatgggaggagaaatcaggatgagaagatggtaatgtctgcatctacctgtctaatggttagtcaccagtctttagacaggaagagagcatttgggcttcagaaaaggaggcttactgcactactgcagtgccatcgctagatttaaggcaaattcagtgtgtctgtgccccatggctgtgagctttgggtactctcaagtagtcaagttctcttgtttttgtttttagtcgtcgctgttgtaggcttgccggcggcggtcgttgcgtggccgcgccttgtcgtgtgcgtcttgccatctcttcgtgctcccttcgtgttgttgtaaaacactagtctggtgtctttggcggaataacagatcgtcgaacgacaaaaaaaaaaaaaaaaaaactcgagacctcgtgc

SEQ ID NO: 3032 - DNA, 583 bp, Zea mays
  Clone ID: ZEAMA-23APR03-CLUSTER9265_24
atcctactgtcacacacacacagagagagacaagtggtttccaaagccaagtgtgtactagcagtctagcaaccagctagctcgggcggcasaggcagccatcatgtcggaggagaagcaccaccacttcttcaaccaccacaagaaggacgaggagcagcccgccggcgagtacgggtactccgagaccgagctagctagctccggcgcacacaaccacacacctgtttaattctgtactgcatgcgtgtgtaatttgatggttcacaataatgagtccctctccggaccttggtagctgcttgcttgtggtgagtgagagtgtgagactgagggagaagaggtggtgggcgtggggctacgtcgagagaggcgtgttcctgtactcgcttcgttttctctgcatgcgtgtataattgtgttcaataataagtgagagcggtgtgatgtgtggctccccttgtcaggctcatgtgtatccgtattgaatcctggcaccatgcatgactgaggatctggatgtctatgaagcaccgtgtatctatcatcacttttgtaaaaaaaaaaaaaaaaaaggccccta

SEQ ID NO: 3033 - DNA, 885 bp, Zea mays
  Clone ID: ZEAMA-23APR03-CLUSTER9265_29
aaaaagctatagctagccagccatcctactgtcacacacacacacagacaagtggtttccaaagccaagtgtgtgtactagcaaccagctagctcgggcgtctgcaggcagccatcatgtcggaggagaagcaccaccacttcttcaaccaccacaagaaggacgaggagcagcccgccggcgagtacgggtactccgagaccgaggtggtcaccgccaccggcgagggcgagtacgagaggtacaagaaggaggagaaggagcacaagcacaagcagcacctcggcgaggccggcgccatcgccgccggcgccttcgcactctacgagaagcacgaggcgaagaaggaccccgagcacgcgcacaggcacaagatcacggaggaggtcgctgccgcggcggccgtcggcgccggcggctacgtattccacgagcaccacgagaagaagaaggaccacaaggacgccgaggaggccagcggcgagaagaagcaccaccacctcttcggctgaccgtagtaccggccggcgcgcgaccgagctagctagctccggcgcacacaaccacacacctgtttaattctgtactgcatgcgtgtgtaatttgatggttcacaataatgagtccctctccggaccttggtagctgcttgcttgtggtgagtgagagtgtgagactgagggagaagaggtggtgggcgtggggctacgtcgagagaggcgtgttcctgtaatcctgtactcgcttcgttttctctgcatgcgtctataattgtgttcaataataagtgagagcggtgtgatgtgtggctccccttgtcaggctcaaaaaaaaaaaaaaaaaaaaaaaaaaaaaaaaaaaaagggcggccgccaccgcggtgga

SEQ ID NO: 3034 - DNA, 1444 bp, Zea mays
  Clone ID: ZEAMA-23APR03-CLUSTER9287_2
actacaccgccccaaaccaaaaaccttccccgtattggagtccgcatcgctcgctagtcacctaccgcaccgccaccgccaccgccgccgccgccagcgcgcccgtctcgcacgcgcagcacaggacgcgcgcgatcccctcgctccggatcgccatggcctccacggcgttcgccgccgccaagtacttccccgcgcacctcgactcctccccgcgcatcgcgccccgccgcgccgcgcccaccgcgagcctctccttctccccgctctccgccagcccgtcgtccctgctccgcctccggtccccctgcccgtccggcccggggggcaggctgcccccgcccccgccgccgcgatcgtacggcggcggcggcggatctggtggcgacgccgcggactccggcggcggccgccgcggcgggggcatcctcgggctcttcctcgccgggtgggccgcccgggtcgccgcggacccgcagttccctttcaaggtgctcatggaggagctcgtgggcgtcaccgcgtgcgtgctgggcgacatggcctcccgccccaacttcggcctcaacgagctcgacttcgtcttctccaccctcgtcgtcggctccatcctcaacttcgtcctcatgtacctcctcgcccccaccgccgccgcgtcgtccgccgcctccgcgctccccagccacatgttcgagcccggcgccttctcgctcggctcccgcgtcgccacgctcgtgtccaagggcgccaccttcgcggtggtcggcttcgcagccgggctcgcgggaaccgcgctctccaacggccttatggcgatgcggaagcgcatggacccggcgttcgagacgcccaacaagccgccgcccacgctgctcaacgcggccacctgggcgctccacatggccggcagcagcaacctgcggtaccagacgctgaatggggtcgagtacatgctcggcaaggtcgcaccggcgccggtgttcaaggcgtccgtcgttgttctccgctgcttgaacaacgtgcttggtggggtgtccttcgtgctgcttgctaggttgaccggggcgcaaaaatcagataagccggcgacggtcgcggaagagaaggagaggttgatagctgtgggcaatgctgcagcagatgccatcggtgaggcaagagatggagaggagggtaagtaagtggtagaggagaggaacagtaagatgatggtgcatcgtcccacgctcttttgcaagaaacctgtagagttggttggaatggaataaggagtgaggctcaacttcttttcttaaagtcggtttgtggtttgtcgctgttgatgattacttcctccgtttcgttttagttgtcgctggatagtataaaattaaactattcagcgataactagaaagaaacaaagaaacggagggagtatatgcttagaatgaagtttttctctc

SEQ ID NO: 3035 - DNA, 1191 bp, Zea mays
  Clone ID: ZEAMA-23APR03-CLUSTER9309_2
ctcctcctcctcttcacagagccgagaagaaaggcagggtggtgggcgaagagaccccagtcagtggatcgttaatcaaagaaaaaaaaacagcagcttatatcaacaacaaggccaccccacccgttggacgacatggcccgcctcggagccggcgccgtgttgacgctcctgctggctgtcgcggcggcggccgcgttcctcgcggtgccggcctcggccaaggtcggggacctgagcgcggtggagttcgtggcggcgcggggcagcagcatcccggggcagcgcagcagcaagtgttcgggcgccgtgggcgagtgcggcgtggacgaggaggaggagctcgggctgagcggcggcggcggcatcggcgccggcgacgcgctgcggcggacgcttgcgcagcgcaagccgaccaaccggtacatcagctacgcggcgctgcgcgcggaccaggtgccgtgcaacaagcgcggccggtcctactacaccaactgcgcggcgcagacggccgccaacccctaccgccgcggctgctccgccatcacgcgctgcgcccgcagcatgaactgagcgccaaggcggcggccggcggtctgatctgcctgctggctggctgggcagggggcacgcagctggcctggctcgatcgcacaccatgcattgacgtcgtcgcggccggccgccatgccgttggacggtggggtcggacgatgacggaggaggaggcggcggcgcgacgatagtatatacaaacaccaatgaccaaccatactaccagttctattgtcgctgtggcgtagcttctctataaataatatctaactccaacaagatatgtttgattatggatcgcgatctatcatatgtatgccattcattcgttaatttggatgctgaaaattggctggctgggcagggggcacgcagctggcctggctcgatcgcacaccatgcattgacgtcgtcgcggccggccgccgtgccgttggacggtggggtcggacgatgacggaggaggaggcggcgcgacgatagtatatacaaacaccaaccatactaccagttctattgtcgctctggcgtagcttctctataaataatatttaactccaacaagatatgtttgatcatcgatcgccccctatcatatgtatgccattcattcgttaatttgacaaaatgatgctg

SEQ ID NO: 3036 - DNA, 1320 bp, Zea mays
  unsure (1)..(1320): unsure at all n locations
  Clone ID: ZEAMA-23APR03-CLUSTER9309_3
cgagaagaaaggcagggtggtgggcgaagagacccnagccagtggatcgttaatcaaagaagaaaaaaagcagcagcttatatcaacaacaaggccaccccacccgttggacgacatggcccgcctcggagccggcgccgtgttgacgctcctgctggctgtcgcggcggcggccgcgttcctcgcggtgccggcctcggccaaggtcggggacctgagcgcggtggagttcgtggcggcgcggggcggcagcaagtgctcgggcgccgtgggcgagtgcggcgtggacgaggaggaggagctcgggctgagcggcggcggcatcggcgccggcgacgcgctgcggcggacgcttgcgcagcgcaagccgaccaaccggtacatcagctacgcggcgctgcgcgcggaccaggtgccgtgcaacaagcgcggccggtcctactacagcaactgcgcgtcgcagcaggccgccaacccttaccgccgcggctgctccgccatcacgcgctgcgcccgcaacatgaactgagcgcgcgcgcggcggccggcgggcgcgccgtcgagccggtcggtctgatctgcctctgccggccggcctggctgggcacgcagatagcctggctcgatcgcgcaccatgcattgacgacgtcgtcgcggccgtgccgccgttggacggagggccggacgacgacggcgacggaggaggaggaggaggaggcgctgacgaaattatatatatacacacaaaccctaccgccatttctgttgtcgttgtgcgtagcttctctctctacatatgcttatgtttatatatttatatatctatatccaaaacgagatatgtttgatcatcgatcgcgatctgtcatgtatgtcgtctactatctgttaatttgacaaaaagatgttgaaaaaaaaaaaaaaaaaaaaaaaaaaaaaaaaaaaaagggcggccctcgcgatctagaactagttggctggctggccagggggcacgcagctggcctggctcgatcgcacaccatgcattgacgtcgtcgcggccggccgccatgccgttggacggtggggtcggacgatgacggaggaggaggcggcggcgcgacgatagtatatacaaacaccaatgaccaaccatactaccagttctattgtcgctgtggcgtagcttctctataaataatatctaactccaacaagatatgtttgattaaaaaaaaaaaaaaaaaaaaaaaaaaaaaaaaaaaaaaaaaaaaaaaaaaaaaaaaaaaaaaaaaaagggggccgctcgcgatttaaactggacgcgtgtctcgacc

SEQ ID NO: 3037 - DNA, 837 bp, Zea mays
  unsure (1)..(837): unsure at all n locations
  Clone ID: ZEAMA-23APR03-CLUSTER93101_2
aaaangaaacacttaatcataaataattcaaattatagtttattttttggtacatgcaanatacggnngaacaccttnataatgtttagnggagtgcaccgagagtttagttttaagggcacttggctacaagctganaaagtgtgacctctaagcagtcctttccaccttagtgcatggtcgaaggcaacgcaccaagcattcagccaagcgcctatagtatgtattagtccttttgcagtagtaccatccaataacccaatcatgatcagaggatagtcggttagaagatgcaccatcattgccaattatgttgcttgttgccctcattgtggtaatcatcgtgcttccagtgttgatgtcatctttggtttgccctctgttaagttctccgccgccgccagtcatgttgtagctcgccgacgacgacctcgtcatgttcatgctcgtcacactcgttgcgttgatgtcctctttggtttgcccatctaccgccatgcttgcacagacaagagaggacgacgctagaagaaccatggaaaggagccaaagtccttggatgctcgcgcgcttctggcacttcgtcatcatgggtgaaaagggtaagagctaatgccgacaatatatgtatttgtttgagtttagagtgtctcctcgtctgtatttagccttggacggagtttaccgcccgatttgggtgcattcccaaacaacccgactcgttgacggcgcctcgtggtgcgacagggccgggccggacggggctctcaccctcccaggcgtccctttccagagaacttgggcccggaccgtcgctgaggaccggacgcgtggcga

SEQ ID NO: 3038 - DNA, 1942 bp, Zea mays
  Clone ID: ZEAMA-23APR03-CLUSTER9311_10
ctgttctatatcgccccattgctcgctcgctcgccaagagttcttcttgttaggcaaggcaaaagcagaagcaaaaaaagaaaggaaaaagaaaggtcttgttgccgatggggagctcagggttctcgtggacgcttccggaccaccccaagctccccaaggggaaaccggtggctgtcgtcgtgctggacggatggggcgaggccaaccccgatcagtacaactgtatccatgtcgctcagactcctgtcatggactcgctaaagaatggcgctcctgagaaatggagactagtgaaggctcatggaacagctgtgggtctcccatctgatgatgacatgggcaacagtgaagttggtcacaatgcacttggtgctggtcgaattttcgcccaaggtggctaagcttgtcgatcaagctcttgcctccggaaagatttatgatggagatgggttcaactacatcaaagaatcttttgaaagtggtactcttcaccttattgggttgttgagtgatggtggtgtccactcccgtcttgatcaactgcagttacttctgaaaggtgtcagtgagaggggggcgaaaaaaatccgtgtgcacatccttaccgatgggcgtgatgttttggatggaagcagtattggtttcgtggagaccctagagaatgatcttttggagcttagagcgaagggtgttgatgcacagattgcatctggtggtggaaggatgtatgttacgatggaccgttatgagaatgactgggatgtggttaaacgtggttgggatgcccaagtgcctggagaagcaccctataaattcaaaagtgcacttgaggctgtgaaaacactgagagcacagcccaaagctaatgatcagtacttgcccccatttgtgatagttgatgacagtggcaatgctgttgggcctgtattagatggtgatgcagttgtcactatcaacttccgagctgatcgcatggttatgcttgcgaaagcactagagtatgcagattttgacaactttgaccgtgttcgtgtccccaaaatccgatatgctgggatgcttcagtatgatggtgagttgaagcttccaagccgttaccttgtttcccccagatagatagaacatctggggagtacttggtgaagaatggcatccgcacctttgcttgcagtgagacagttaaatttggccatgtcacatttttctggaacggtaaccgttcgggatactttgatgcaactaaggaggagtatgtagaagtacctagtgacagtggtattacattcaatgttgcacccaatatgaaggcgcttgaaattgctgagaaagccagggatgctctcctaagtggaaagtttgaccaggtacgtgtcaacctgccaaatggtgacatggttggtcacactggtgatattgaggccaccgtagttgcttgcaaggcagctgatgaagctgttaagattattttggatgctgtcgagcaagttggtggtatttaccttgttaccgccgatcatggcaatgctgaggatatggtgaaaaggaacaagtctggcaagccgttgctcgacaagaatgaccgtatccagattcttacctcgcatacccttcagccggtcccggttgccattggaggccctggccttcaccctggagtgaaattccggaacgacatccaaacccctgggctcgccaacgtagccgcaaccgtgatgaacctccacggatttgaggcccctgctgactacgagcaaaccctcattgaagtggctgacaactaaacactggccacctgtgtccaattttggttatatgtagttctgagaatggacattcaataatttatgtttgcaagcacgttgctcaaactcactaaaacatcgagggatgccttttgactttggcatttacagagaaaaaaaaaaaaaaaaaagcggcc

SEQ ID NO: 3039 - DNA, 2090 bp, Zea mays
  Clone ID: ZEAMA-23APR03-CLUSTER9311_12
gttctatatcgccccattgctcgctcgctcgccaagagttcttcttgttaggcaaggcaaaagcagaagcaaaaaaagaaaggaaaaagaaaggtcttgttgccgatggggagctcagggttctcgtggacgcttccggaccaccccaagctccccaaggggaaatcggtggctgtcgtcgtgctggacggatggggcgaggccaaccccgaccagtacaactgcatccatgtcgctcagactcctgtcatggactcgttaaagaatggtgctcctgagaaatggagactagtgaaggctcatggaacagctgtgggtctcccatctgatgatgacatgggcaacagtgaagttggtcacaatgcacttggtgctggtcgaattttcgcccaaggtgctaagcttgttgatcaagctcttgcctcaggaaagatttatgatggagatgggttcaactacatcaaagaatcttttgaaagtggtactcttcaccttattgggttgttgagtgatggtggtgtccactcccgtcttgatcaactgcagttacttctgaaaggtgtcagtgagagaggggcgaaaaaaatccgtgtgcacatccttactgatggacgtgatgttttggatggaagcagtattggtttcgtggagaccctagagaatgatcttttggagcttagagcgaagggtgttgatgcacaaattgcatctggtggtggaaggatgtatgttacgatggaccgttatgagaatgactgggatgtggttaaacgtggttgggatgcccaagtgcttggagaagcaccctacaaattcaaaagtgcacttgaggctgtgaaaacactgagagcacagcccaaagccaatgatcagtacttgcccccatttgtgatagttgatgacagtggcaatgctgttgggcctgtattagatggtgatgcagttgtcactatcaacttccgagctgatcgcatggttatgcttgcgaaagcactagagtatgcagattttgacaactttgaccgtgttcgtgtccccaaaatccgatatgctgggatgcttcagtatgatggtgagttgaagcttccaagccgttaccttgtttccccaccagagatagatagaacatctggggagtacttggtgaagaatggcatccgcacctttgcttgcagtgagacagttaaatttggccatgtcacatttttctggaacggtaaccgttcgggatactttgatgcaactaaggaggagtatgtagaagtacctagtgacagtggtattacattcaatgttgcacccaatatgaaggcgcttgaaattgctgagaaagccagggatgctctcctaagtggaaagtttgaccaggtacgtgtcaacctgccaaatggtgacatggttggtcacactggtgatattgaggccaccgtagttgcttgcaaggcagctgatgaagctgttaagattattttggatgctgtcgagcaagttggtggtatttaccttgttaccgccgatcatggcaatgctgaggatatggtgaaaaggaacaagtctggcaagccgttgctcgacaagaatgaccgtatccagattcttacctcgcatacccttcagccggtcccggttgccattggaggccctggccttcaccctggagtgaaattccggaacgacatccaaacccctgggctcgccaacgtagccgcaaccgtgatgaacctccacggatttgaggcccctgctgactacgagcaaaccctcattgaagtggctgacaactaaacactggccacctgtgtccaattttggttatatgtagttctgagaatggacattcaataatttatgtttgcaagcacgttgctcaaactcaccaaaacatcgagggatgccttttgactttggcatttacagcattttcgtttggctttaatccttatcggtttctattgcttctgtttcatttctatgtatcatagctgcagtagttcgaacaactgtctttgcacaactcattagatgctctatttatataccgttgacgattgcctccaaaaaaaaaaaaaaaaaagcggcctcgagtacca

SEQ ID NO: 3040 - DNA, 2671 bp, Zea mays
  Clone ID: ZEAMA-23APR03-CLUSTER9326_2
gcacgagaccattacctagaacatcctaatcaaaaaaacccatctatctagggttggaagcttgtacatggccacctcggtggttgtggcacgcctcgcgggcgaggcctcgcagcccaaggtcctaccttctgcgaatggagtctcatccgagagctattggcgggtagctgctacgcgccgttggcagggccgcggtgtccggtgctgcgcggccggtttccgcggtgggggcgccgacgccgacgccgtgatcgccagcgaggactttgtggggttctttcgggaggcgtggccgtacatccggggccaccgtgggagcaccttcgtggtggtcatctccagcgaggtcgtgtgtgtgccgcacttctaccgcgttctgcaggacatatcacttctccatggtctggggattaaatttgttcttgttccaggaacacatattcaaattgataagctgttgtcagaaagagggaagaaggccaagtatgttggtcagtacagaattactgatgaagatgcaagaaaggctgcaatggatgcagctggtagaatacgattgacaatagaagctaaactttctcctggtcctccaatgttaaatcttcgtaggcatggtgttattggacgctggcatggtcttgtggatagcattgcaagtggcaatttccttggtgctaagagaagaggggtggttaatggtattgactacggattcaccggggaagttacgaaaatagacgtttcacggataagagaaaggcttgatagtgatagcatagttgttatcagcaacatgggcttcagttcatcgggagatgtgttaaattgcaagtatattttcttaattatttttaagttttttcgtatgattgtacaatgtatacatcaaaattgtgtagttgtatgcttgctaccaagtcaagcataatatcatatgaatgcaaataattttcgtaaaacttgttcctttgcatatattgcagctaccatactaaacaaaattgatttgtgttgtttgcaataattcagcacctacgaggttgctactgcatgtgctttagccttggaggcagataaacttatctgcgttgtagatggtcaggtatttgatgatcatggacgggccattcaatacatgtctattgaggaggctgatttgttgattagaaagcgtgctaggcaaagtgatattgctgcaagttatgtcaaggttgtggatgaggaaggcatcaattctttgcataaaggggacgacagaccatcattgagtcccaaggcttacataaatgggtatgctgcttcttttcgaaacggattgggttttaacaatggaaatggtatttattctggcgagcaagggtttgctattggtggtgaagagcggttaagcagatcaaatgctgatccttttaaaaacgggttgggttttaacaatggaaatggtatttactctggtgagcaagggttcgctattggtggtgaagagaggttaagcagatcaaatggctatctttctgagttggtcgcggcagcatatgtgtgccatggatgtttatgaaggaacaaggatggctacagcggaagatcttcctggcattagaaaaattattcggccgctggaggattctggtgttttggtgcggagaacagatgcacagcttcttgaagcgctagagtcattctatgttgttgaaagagatggttcaatcattgcttgtgctgctctatttccattccctgaggaacaatctggtgaagttgctgcaattgctgtatctgaagaatgccgaggaagaggtcagggggacaagttacttggtatgttctttgcttacatggataatcagaatccattctcttgattggttgttgcaacccctctaccaggttgccacaaccatttctccaacacatgcccacatgttcctgtgtgcactttctcacatgcacatacaatccctaaatattataacaagataacagaccgcctaccagtaatgtggtgttaaagtgggggttctctgttttttcagtaagcgtatcttctcacccattttaaaggggtttcagtcttgtggcatttatactagaacaagctaagaagtcctttttttgttactcatggtggttgccattcttcagattacgtggaaaagatggcattatccctgggtctcaagaaattattcttgcttactacacgaactgcagattggtttgtgcgacgtggcttttcagagtgctcaattggatctatccctgagcagaggagaaaacgtatcaacttgtcccgtggatccaagtattacataaagcagctgtagccaaagcctgctgggattatcgccaacaattttgtcatcaggtgactcagcagcatgcacagagtttggttccacacttccacttaattaagatggtaccagccaagattacaccaatttcgcggttgcccaaaggcatataattgcacaaagaaacaaaacaccattttactgtcactgtgtttgaaagatggttgtctttgtttaagtatgtgacagaagtttgttttgccaatagaatcaaggcagagaagaaatagctgattgaattatatgtagaccctatttaacaagcaataccaaagatgaagtgctcgtacagtatcaaaaaaaaaaaaaaaaaa

SEQ ID NO: 3041 - DNA, 834 bp, Zea mays
  Clone ID: ZEAMA-23APR03-CLUSTER9353_16
aggacaggttgcatttgcatctgagttcctgatcgttgtattccagtttcttccgtgagttttgtgggatcgcgaggaagaaggatgtcgtgctgcggaggcaactgcgggtgcggcgccggctgcaagtgcggcagcggctgcggagggtgcaagatgtacccggacatggctgagcaggtgaccaccaccaccaccacccagactctcatcatgggtggtggtggtggtgctcctcctgctgttggcagcaagaggaagatgagcagtggcagtggtggtttcggggagctagcgagggcaattgagactttcgcggatatgtacgagcgcatggaagccgctaagcagcagcacgcggaggagatggagaggcagcgaatcaagttcctcaaggatctggagctgaagcggatgcaggcttttgtggacatgcagctacagctcgcgaggacaaagcacgccaggaagggtgacgcttcctcggatacgctcatgtctctcgctgcactgccattcctcagcagccctgcttatctctaaattggaagagttaggtaaaggaatgctttggccttaaattaggatacagtctgttggttgatgtgatagagttgttagtggattgtttatgtgcttgctaagatactgtcgttgtttcatacgaacgacagaggtactaggtctttaaattttaatctttaaatgtaccttgcaatgcactatgctcaagtttttcttagatgagaaggaatttttactggtttgtgacatgtaacttccaatgtattacgaatttaatctcagctaccttttgttctgtatcatttaaaa

SEQ ID NO: 3042 - DNA, 708 bp, Zea mays
  Clone ID: ZEAMA-23APR03-CLUSTER9353_25
aggacaggttgcatttgcatctgagttcctgatcgttgtattccagtttcttccgtgagttttgtgggatcgcgaggaagaaggatgtcgtgctgcggaggcaactgcgggtgcggcgccggctgcaagtgcggcagcggctgcggagggtgcaagatgtacccggacatggctgagcaggtgaccaccacccagactctcatcatgggtgttgcaccatccaagggcgggttcgtggcggccgccggagctgagaacggcgggtgcaagtgcggcgccaactgcacctgcgacccctgcacctgcaagtgagacgacggcggcgatgacgctgcagggcgtgatggggtcctcggaaggactctttatctctagctaattaataagctctagtatataatattgtagcagtgtcgttttttgtgttttgttcgagtcagtcagacagtcagccgcgcgtgccatgggccatggcatagcatgcctcgctctatctgctccatcgccttgttctagtggtggtactgatgggggaacgaataattgtaccgagatgttggcgccgtgtcgtgtcgtgtcgtgtcctgtcctgtccttcctggggctcatctagcagtcagactgtgttgtgttgtgctgtgtgggccgagtgtgcagtacagcatcaggccatgccccctgttccatcaaaaaaaaaaaaaaaaaagc

SEQ ID NO: 3043 - DNA, 829 bp, Zea mays
  Clone ID: ZEAMA-23APR03-CLUSTER9353_32
tcgagtcagctacgtaggccccccccccccaggacaggttgcatttgcatctgagttcctgatcgttgtattccagtttcttccgtgagttttgtgggatcgcgaggaagaaggatgtcgtgctgcggaggcaactgcgggtgcggcgccggctgcaagtgcggcagcggctgcggagggtgcaagatgtacccggacatggctgagcaggtgaccaccaccaccaccacccagactctcatcatgggtgttgcaccatccaagggcggggtcgaggcggccgccggagctgagaacggcgggtgcaagtgcggcgccaactgcacctgcgacccctgcacctgcaagtgagactacgacggtggcggcgatgacgctgcagggtctgcaggccctgatggggtcggaaggactctttatctctctagctaattaataagctctagctagtatataatattctagcagtgtcgtttgctgtgttttgttcgagtcagttagacagtcagccgcgtgccatgggccatggcatagcatgcctcgctctatctgctccatcgccttgctctagtggtggtactgatgggggaacgaataattgtaccgagatgttggcgccgtgtcgtgtcgtgtcctgtcctgtcatgtccttcctggggctcatctagcagtcagactgtgttgtgttgtgttgtgctgtgtgggccgagtgtgcagtacagcatcgggccatgcccctgttcgatctgtctgcgactttaatttgtttgtgctgtgtcatctatctatctaatccatctatgcgaaaaaaaaaaaaaaaaaagcggcc

SEQ ID NO: 3044 - DNA, 951 bp, Zea mays
  Clone ID: ZEAMA-23APR03-CLUSTER9368_4
gcacgagagagagagagagagagagagagagagagagagagagagaacggcacacgtctcggcagccacaagaaaccacccccttccggcacacgggctcgaccacctgactccatcaccgtgcctgtctgtgttctagggacaagaagagcagagatatacaggagcgagcagaggcggggagaagaggatgagcaccacaacggcgtcgtcgctgaaccccaacgcgccgctcttcatcccggcggcgtaccggcaggtggaggacttctcgcccgagtggtgggagctcgtcaacaccaccgcctggttccgggaccactgcttccggcagcgccagctccacgaggccgcctgcgacgacgtcgccgcgctcctccccgacgacctcctcgacaccaacgacctcttctacgcgcccgacgtcgtccaccaccaaccagcgacggcgctgctgcccgggtacgatgtcctcgacgtgctcgcggcgctgagcctcagctcccccagggccatccgccagcctcctaggagaagcctgctcatggcgcctggcgggccaccacctccaccacggctgctgtgcctagtgtaaccccaagcaaggctagtctgtttctgtgtatacaatacgactgaaaaactaggagaggggggattcggccaaggcggccggtgctctctcctctcctcgtagctagtttttcctcctgttccagctcagttcttgttcatccagccgtgttaggaaaacaaacccagccccgtgcccatgttgttgaaaaatatattagtctggtatttacaactcttcgccaggtgcttcttgttcctcgagatttttttttcctctgtttcaacagtgtgttctctgatttgagagctgcaaggtgtgttttttgtctgtctcaacttcggtgatggtgggggcctgaaaatgggatgtgattg

SEQ ID NO: 3045 - DNA, 1746 bp, Zea mays
  Clone ID: ZEAMA-23APR03-CLUSTER9375_4
agctttgcgtctgtggccaaccaggcgcctccctggctccctcccaccacccggctctccacgccgccgccgccgccgccgccacaagcgaccgcgcatccgctcttctccctcccttcgctctcggcggccggcgatgggggagaccgtacgggcgggcgacgttgcaatcacgactcacgagatggagagccacaacccatcgcactctcagatcgccgaagtgacgatggacatcgcagcgtcagcttctggagcggcagggagcaagttctgcaagggcgcagcctgcgacttctccgacgccagcaactcctcgaaggacgccagggagaggtcggcgtcgatgaggaagctgatagtcgcggtggtcctctgcgtcgtattcatggcggtggaggtggtggggggcatcaaggcgaacagcctggccatcctgaccgacgcggcgcacctcctgtcggacgtggcggcgttcgccatctcgctgttctcgctctgggccgccgggtgggaggcgacgccgcggcagtcgtacgggttcttccgggtggagatcctcggcgccctcgtctccatccagctcatctggctgctcgccggcatactggtgtacgaggccgtcgtgaggctcgtcggcgagagcggcgacgtgcgggggtcgctcatgttcgccgtgtcggcgttcgggctggccgtcaacgttctcatggccgtgttgctgggccatgaccacgggcacggccacggccatggacatggacattcgcatgaccatggccacggccatggggattcggacgatggccattcccaccacgacgacgaggagcaagaacagggccgtgtccatcaccacgagcacggccatggaggcgctatcactgtcacaacccaccaccaccaccatcatcacgatcacgatgttgaggaggcgctgatcaagcatgagggtacccagtctgctggcagagctggtaagaagcctcggcggaacatcaacgtgcacagcgcatacctccacgtgctcggggactccgtccagagcgtcggggtcatggtgggcggggcgatcatctggtacaagccggagtggaaggtcatcgacctcatctgcacgctcgtcttctcggtggtggtgctgttcaccacgatccggatgctgcgcagcatcctcgaagtgttgatggagagcacgccccgcgaggtcgacgccaccaggctggagagcgggctctgcgggatggagggcgtggtggccgtccacgagctgcacatctgggccatcacggtgggcaaggtgctgctggcgtgccatgtgaccatcgccagggatgcggacgctgatgagatccttgacaaggtgatcgggtacatcaagacggagtacaacatcagccatgtgaccatccaggtcgagcgcgagtagggagctctgtctttggctgctgtcttgggcataaatggctggcgccattcgagctctggtgtgctcggtggtgttgtctattgctagtctattaggcaggcgggggaattgtttgcgtcgaggtggtggtggtggtcgtcagtaagtcagtcggtgcataaacaaggatgtaattttcggtaatgctattgacagcatcgtggttcatcgaactgcatattctagtacgctgtgtcgtcacatcttgtgtaaggtcacgtttctgtgctgcggtatggaagatgtgaagttcgtggttggcatgttgctatttgttt

SEQ ID NO: 3046 - DNA, 1012 bp, Zea mays
  unsure (1)..(1012): unsure at all n locations
  Clone ID: ZEAMA-23APR03-CLUSTER9388_2
gctagctagctagcaagcaagcaagcaagctgaaatggaacgctactcttgctgccgttgggtgcttgcgtgttctatccttgccctgtgcctcggtgggcagggcgcgaggtgccagctgacgtcggatttctacgacagcacctgccctcagctgtactacgtcgtgcagcagcacgtgttcgacgccatgagagacgagatgaggatgggcgcctccctcctcaggctgcatttccacgactgctttgtcaatgggtgtgacgcttcgatccttttggacggcgacgatggcgagaagtttgcgctgcccaacctcaactccgtcagagggtacgnggtcatcgacgccataaaggccgacctcgagagcgcgtgccccgaggtggtgncgtgcgcggacgtcgtagcactcgcggccagctacggagtactcttcagcggagggccttattacgatgttcttctcgggaggttggacgggctggtggccaatcagtccggagccgacgacggcancgagaccgccgcgctcgacgtcagctccccctacgtgttcgacaacgactactacaagaacctgctgacggagcgaggcctcctgtcctccgaccagggcctcttctccacccccgaaggcgtcgccgccagcaccaaggatctggtggaggcctacagcagcgacggcgaccagttcttctacgatttcgtctggtccatgatcaggatggggaacatcccgctcgccgccggctccgacggggaggtccgcaagaactgcagagtagtcaactaatagcatgtggcgatcagcaaatttcgatcgccgttcactgttatttcttgtgtgtgtgtgagagagaggggtacgtgaactgttaagagtctcctatatatgtaatgtaaggtttgtgggtgcaacgttgagcagctagctacatgcttacgaagatgaggaataagaactgtacactgccaaattggtcccacaataagaactactatgagatca

SEQ ID NO: 3047 - DNA, 837 bp, Zea mays
  Clone ID: ZEAMA-23APR03-CLUSTER93_3
aacaaacagagcatatattccctcttcactagctcgtggtaataagggaagcttgatcatctttccttatggcggtgatgaagagcagcacaatcgtcgcgcttctattggctgttgccattctgtcctcactgtctccatgctacgaagccggcggctgtaggcgccttcgatctctgcttctaattacttacgcaatactgtagttactatttcgttctaagagccggcgataattatctattaattaaccggccgatctcgtttggactgcgatgtgtgtgcaggcatcgggaaacccaagaagtcaccgccgccgccgagaaggccatacttctcgtcctattccgaggaccaccagaaggaccaccagaattgccgcttgatctgtagctccaagggtttcaaggacggtggctggtgtgacgaaagcgtggagcacaaagtgtgctgctgctcccattagaaatataatagcgtatgttatgttgatgcatatatatatgcatcgtccatctacctctgtggtgcaaaattctgaataaaatctgaataaaacctgattgatcaaaaaaaaaaaaaaaaaaaaaaaaaaaaaaaaaaaaaaaaaaaaaaaaaaaaaaaaaaaaaaaaaaaaaaaaaaaaagagagctaaatatagagggggcttttaaagggagagaatctaaactaaaaaaacaaagcaaatgaaacagctatagctgtagtataaattaaaattaaattgactgcaatgtccaatgacttgaaaaggggctggactaaacaaaaccctagcgtaacccaattgattcgctttacatctcatcccccttt

SEQ ID NO: 3048 - DNA, 985 bp, Zea mays
  Clone ID: ZEAMA-23APR03-CLUSTER9408_6
accccacccattcactcgccttgcgcttcctcgccgccccagttccccaccccctgctcacccacccgtcccctcctgctcgcccatggctcccatcgctgtcggcgacgccctccccgacggccagctcgggtggttcgacgagaacgaccagctgcagcaggtctccgtccacgcgctcgccgccggcaagaaggtcatcctcttcggcgtccccggcgccttcaccccgacctgcagcaaccagcatgtgccagagagagcaggaggaggcggagacatgggtagcttcgctaagctggcgaggagggcggtggagacggaagctccggtcatggtgaagatacaagaactgctccgaggggccaaggatgtgatgtcgcttgcgcagggagttgttttatggcaacctcccgagtcagctatggataaggtcgaaaaataattagggaaccaacgcttagtaaatatggctctgatgatggtcttcccgagcttcgagaagcacttcttgaaagttacgcagagagaataagcttactaagtcatcagttatggtcactgctggtgcaaatcaagcttttgtgaacttggtcctcactctttgcgatgctggtgattctgttgtcatgtttgcaccatattatttcaatgcctacatgtcattccagatgacaggtgttactgacatattagttggtggttctgatcacaagacacttcatcctgatgttggtaagatgactctcctcttcttcctgttgcattggaaaaattggtgagatgtcttatatcagtctgctctaagaaatttgttgtactcagtgttgattcaagaacatctgcttcattgggacatgttcaatttcccttataagtctacattatattttagctgatgagaaggatatgcttttgtaaaatgcaacgcgtctagtataagaaattatgcattggccgtaattgatatcatttcattttggaa

SEQ ID NO: 3049 - DNA, 3369 bp, Zea mays
  Clone ID: ZEAMA-23APR03-CLUSTER9528_7
gaattcggggcggtggaacagaggaggagcccgactgaggctaggcggcggaggcctgggcggacggatccatgagaagaagcggacccttcctttctcgcacgggaagagtagcgaggaggcgcgggccccgtgcgggtatgcccgtgcctgccgtcgcgtccgcctctaggactagggtccgctccagcgccagccgtccgccatgggtgggctcgaggagatcaagaacgaagccgtcgatctggagaacatccccatcgaggaggtgttcgagcagctgaaatgcacccgcgaggggctgagctccagcgagggccagcagcgtctcgagatctttggccccaacaggctcgaggagaagaaggagagcaaggtcctcaagttccttgggttcatgtggaacccgctgtcatgggtcatggagatggctgccatcatggctattgcactcgccaacagtggtggcaagcccccggactggcaggacttcgtcggtatcatcgtgctcttggttatcaactccaccatctccttcattgaggagaacaatgccggcaacgcggccgccgcactcatggccaaccttgctccaaaaaccaaggttctgagagatggccgatggggcgagcaagaggctgcaatcttggttcctggtgacatcatcagcatcaagcttggcgatatcatccctgccgacgctcgtcttctcgagggtgatccactcaaggttgaccagtctgcgcttactggagaatccctcccggttaccaagggcccaggggacgaagtcttctcgggttccacttgtaagcagggtgagatcgaggccgtggtcattgccaccggagtgcacaccttcttcggcaaggccgctcatcttgtggacagcaccaaccaggtcggacacttccagcaggtgctgacagcaatcggtaacttctgcatctgctccattggggtcggcatcctcgttgagatcatcgtcatgttcccaatccagcaccggaggtaccgcagcggaatcgagaacctgttggtcctcttgatcggtggtatcccaatcgccatgcctaccgtgctttcagttaccatgccgattggttcgcacaagctgtcacagcagggtgccatcactaagaggatgactgccattgaggagatggctggtatggacgtgctttgcagtgacaaaaccggcacactcaccctcaacaagcttagcgtcgataagaacctcgtcgaggtgttctgcaaaggcgtcgacaaagaccatgtgttgctgttggctgcaagggcttcaagaactgagaacctggacgctatcgatgccgccatggttggcatgcttgctgatcctaaggaggccagggctggtataagggaaatccacttcttgcccttcaaccctgttgataagaggactgctctgacgtacattgatgccgatggcaactggcaccgtgtcagcaagggtgctcctgaacagattcttgacctgtgccactgcaaggaggatctgaggcggaaggtgcactctattatcgacaagtatgccgagcgtggtcttcgttcgcttgctgttgccagacaggaagtacctgagaaaaacaaggagagtccgggggggccatggcagttcgttggtctgttgcgggtgtttgatccgcctaggcatgacagcgctgagacaattcgcaaggctcttgttcttggtgttaacgtcaagatgatcacgggtgatcagcttgctattggtaaggagactggaaggaggcttggcatgggtaccaacatgtatccatcctctgcgctgctcggccaaaacaaggatcgtacgcttagcgctcttcctgtagatgagctcattgagaaggccgatggttttgccggagtcttccctgaacacaagtacgagatcgtgaagagactgcaggagaagaagcacatcgttggtatgactggagatggtgtcaacgatgccccggctcttaagaaggctgacatcggtattgctgttgcggatgctactgacgctgcgaggagtgcttccgacattgtccttactgagccaggtcttagcgtaattatcagcgccgtcctcaccagcagagcaatcttccagaggatgaagaactacaccatctatgcagtttccatcacaatccgtatagttctcggatttatgctcattgcgttgatctggcaatacgatttctctcccttcatggttcttatcatcgctatcctcaatgacggtacaatcatgaccatctctaaggacagagttaagccatctccgttgcccgacagctggaagctaaaggagatttttgctacgggcatcgtacttggaggctaccttgctctgatgactgtcattttcttctgggctatgcacaagacggacttcttctcggacaaattcggtgtgaggtcgatcagggacagcgagcatgagatgatgtccgccctgtacctccaagtcagtatcgtgagccaggctctgatcttcgtcacccgttcccgtagctggtccttcgtggagcgccctggtctgctcctggtcaccgcgttcgtcgctcaacttgttgccacccttatcgctgtctacgccaactggcgtttcgccaggatcaagggtatcggctggggctgggcaggtgtcgtctggctctacagcatcgtcttctacttccccctggacctgctcaagttcttcatccgcttcgtgctcagcggcagggcatgggacaacctcctcgacacgcgaattgcattcacgcggaaaaaagaccttcggaaaggagagagggaggcgcagtgggccaccgcgcagaggacgctgcacgggctccagccgccggagtccaacacgctgttcaacgacaagagcagctaccgcgagctgtccgagatcgccgagcaggccaagagacgagctgagatcgcgaggctgagggagctcaacaccctcaagggccacgtggagtcggtggctaagctcaagggcctggacatcgacaccatccagcagaactacacggtgtgagagcccctctctgcgatgtcgacgacaacacctttgctgcccgacgggagccatctgattacagataaaaattttccgtaagctgtaaagctctataccaccagatactgccatatgatggtatggttcggtacccgtctttctagggagtttcttttctctctctctctctttttctattgttatgtttttcaatagtggagtgtgcgcgtgttgtaatcgtttttacctgcgttttcctctaactagccggtgactgccgggaagcgaggtgaagaaataatgcaactaaaattctctgccaaaaaaaaaaaaaa

SEQ ID NO: 3050 - DNA, 647 bp, Zea mays
  unsure (1)..(647): unsure at all n locations
  Clone ID: ZEAMA-23APR03-CLUSTER9539_11
catcacccaaaacacaakwagggttaggaaggcggcggccagcggcgagaggaggaggggtcggccatgacggggaaggcgannagaagcacacagcgaaggagatcgccgcgaagatcgacgcggcgacgacgaaccggggtggcggcaaggccgggcaggcggaccggctggggctctgcgcaccccggcgcccgacatcaagtccatgcagatccaccacgaggcgcgccaccccaagctccccttcgagccggagaagctcctcaacctgcactcctccgcccccgctgctgctgctgccgccgccgccgccgccgccgccgctgccgaggccaccacctccaagcccaagcccggcgtccgcggcagcctcawgaagtaagcttgctggcttggttggctcgcccgcctgcatggggcacaattcccttcggtttcaatcccatccgccgacccgatctataatcaatcaaaccgccgccctccggcctggcggctgccgcagtcggcctgcggtgtactgttaatctgctgctgatttccgttgttatactgctggtacatgtgtcgtgtgataaatgtgtcaactatatatcaaatctctcgccggcaactctggcatgtttgaatatgtgttgcttctc

SEQ ID NO: 3051 - DNA, 990 bp, Zea mays
  unsure (1)..(990): unsure at all n locations
  Clone ID: ZEAMA-23APR03-CLUSTER9539_12
aagtagggttaggaaggcggcggcagcggcgagaggaggaggggtcggccatgacggggaaggcgaagccgaagaagcacacagcgaaggagatcgccgcgaagatcgacgcggcgacgacnaaccggggtggcggcaaggccgggcaggcggaccggctggggcaggaagggcgggcatgcgaagctggcgtgcccgctctgccgccgccgccgccgccgccgccgctgccgaggccaccacctccaagcccaagcccggcgtccgcggcagcctcaagaagtaagcttgctggcttggttggctcgcccgcctgcatggggcacaattcccttcggtttcaatcccatccgccgacccgatctataatcaatcaaaccgccgccctccggcctggcggctgccgcagtcggcctgcggtgtactgttagtctgctgctgatttccgttgttatactgctggtacatgtgtcgtgtgatatatagttgacacatctatgccacatataactcagctcatgatgttgctcctggttctgacatcattttcaccgatgatgttagcttccaggtcttctgtgagcacctacaaaggctggctgttcagtcttgaggacctacctgtatgcaaaggttgtacaccctatttgatagttgctcataatgcactgggttcttaggttggagttgtgagaatttcccttttctgtttctctttggccatagttttctgagatcagacaattttttcgggaaactgccctaaaggaatgtgtaagttgcctacagaggtctattatctacatatatagtatatatacttatttatgttgacatcacccagctttcttctgcaaggtggttgcatgaattgagttgtgtgtcaagttccctttcccgaattccgcaatgttggttagcaaggcgtttttttcccccaaaaaaaacacacaaaaaaaaaaaaagttatgagggtgattaccaaaaggt

SEQ ID NO: 3052 - DNA, 1848 bp, Zea mays
  Clone ID: ZEAMA-23APR03-CLUSTER9554_1
ttttttttttttttttgtggaaatagattcagctcgttaactggaaccggacaacaaaacaaacaggagtatgaaagtaaaggggagcagctttcaccaaacagagaagaactttagctagaaacaaacactccatggcgagctcagcaagcaacaagttctggaggtccgaatttcacctactcaggcaaaaaccaaacgactctgggcgcttgctgccacggatatccctattgaactagtgaacaactaataccacatcagcttcttctcaacaagacaaacaaatcatgccggttccctggataagccattttctacatgattcgtgtatcattgtgatgatggagacaaacaaaagaataattcatctgctacaaggaaaagcgggtcttgtctcattcaagcgaaccaatgttgctaccacatctaccactgttgctccgaacctctatttttaagttttgaaggttgtgacagctccttagcatggtaaacatggacaaaatggagtgaatttcattgaaatccacacataactgcaatttcttcaagttataaaaggtgaatggaagtgtataaggcatcttaacatcgacagccttttgaacgtgagcaaaccgagcaaggaaaactccaaaatcatgttcatgctgcggacagtggaacgcatgaatgttggcatattcgagacacgacagctctccaaatcgccatcgatagtcatacggtgaatagattgacaggacacggagattgggcgcctcgatcactgagtctgggtattcaccagggatgaacacgtcaaacatatgcagggtatgaagcaagggtgagcgacgaatgatagcctccaattgtttgaacccgttcgatgggaagataacataggcgaggactagcttctggagcgcggggaagccggggaatcctacggggaggggtgggatgcggcagtttttcagcagcagagacacgagatcacctaaggagaagatggaggagtagagattgaagttgccgagtgatctgagtgtgccacacatgtcgatggactcgacacggtagcgggagagcgcgatgagccagtcgtcgatgcggtcggcacatgcgtcgtcgacacagatgcggaagagggagacgcgggggccgatgtagcggaggaggacgctgtcgacgacggaagggtgcgtgccgaaggggaaggagagggagatcaccgagagcgacttccagaggtcccgccaggtgcgggagagcgcggaggtgcgcacggcgtccctgaggtcgaggcggatgaggatctcgtcctgcagctccgctgggagggaggagagccggtcgggcgccgcctgctttgcctccatcatgcctccagtccaagagtctccgtctctccgtttcgcagcgactccagtgtactaggcagaggctgccgccggtaaatgctccgcctccaactccgcctccctctctcatgagtcatctcgggattaggaggttcgaggtaatggtctcgtgccgacggaagggtgcgtgccgaaggggaaggagagggagatcaccgagagcgacttccagaggtcccgccaggtgcgggagagcgcggaggtgcgcacggcgtccctgaggtcgaggcggatgaggatctcgtcctgcagctccgctgggagggaggagagccggtcgggcgccgcctgctttgcctccatcatgcctccagtccaagagtctccgtctctccgtttcgcagcgactccagtgtactaggcagaggctgccgccggtaaatgctccgcctccaactccgcctccctctctcatgagtcattttgattatcggcctat

SEQ ID NO: 3053 - DNA, 1346 bp, Zea mays
  unsure (1)..(1346): unsure at all n locations
  Clone ID: ZEAMA-23APR03-CLUSTER96014_1
ncttttttttttttttttaantttttttttttttttttttttttttttttttttttttttttttttgtggtctttttttttttttttttttggttaaatataggattcttttaatccacaagtgtcactgtgtcacaaactataaacattacaacctccctagagaatatttgcatgttttaatttcaccaataaacaaaaacgttcaagtcaaattacactataaccacgcaacaacatgctaaccttttgtacggtgctacgcacgaccctcacctctcgatttcgacaggcctcgtgccgctaaccacgtgtccgaaaccgccacgttttgcggcctcgacgtcgtcctcatcgtcgtgatcatcatctccgatgctgaaccggccatcgctgccgctgccgcctcccttcaccagcggcaggtactgcggctcctcggggtagagcttcgccatctggaggtagaacaggacgacgaacaccaccgtgccggtgaggtaccagctgaactggaggttgacgagcgacttggcgcggtcgagcgcgtcgtcagtgcggcaccggacgacgtcgtgcccttcctcgaagttgaggaagcagcccttgggtatgagcgccggcgtccacagcatgacgcccatgacgacgaaccagacgccctggaacacgaggctggcggaccggaccaggctcaccgcgaagctccgccgggtagggggatacccagcagcgtggtcgcgagcgtgacggcgatggccgtctgcagcagccagtggaactgcccctccacgcccatgtggtccgccgagtggaggtggaagatgagcagctgctgcgcgaacgccgcggcggccacgagctgcgacacggcgtcccgcatgggcgccctcgccctgtccaggtggatggtcaccgccgcgaagacgagcagcgccagcgagatggacgcgtgctcgaagttgtggaggtggtcggacgggatggtgccgtcgtcgtcgaacggctggtgcttcgcggggccgatgacaagctccatcaggatggacagcaccgtgccgatgattatgagtatgagctccaggtgccgcacgcccggcaccgggaaccagaccggggcagagtacgagctcggccgcagcaggaacaggcgggtgtggctgaacagctgccacaggccgatgaggaggaagccggcgcccggcgcgacgtgcccgacgagggtgcccatggcgtgtgccgccgcgctgtgccttttgcgtgcgactgcggaagtggacgacaggggaagaagttggtggtggcgtgtggagaggggaggttttcgccggccgccggctcccaat

SEQ ID NO: 3054 - DNA, 967 bp, Zea mays
  unsure (1)..(967): unsure at all n locations
  Clone ID: ZEAMA-23APR03-CLUSTER9646_2
attttccctcctgcagtcctgctgctcctactgacctccacctcctcatcatctggcacgagcatccaagtaaatataaattcagcggccaccgacgaccggccggccgtgcacccttcgcactactactgcgcccgcggacggcgtcagaggagcagcacccagccagcagcatggcctgcaccaggaggcagttgtggtgggcatgcctgctggcggcgtggtgctgcgccggcgccgccgcggccgcccagccgccggcggcggancgcggacccgctgcagagcaggtgccagggggactttgggaagctgacggactgcatggactacgcgacggggcacgcggcgtcgccctcgtccacctgctgcggcgacgccggcggcacgcagaaggcgcgcccggagtgcctctgctacatcatccagcaggtgcacgcggggcgcgaccaggtgcagtcgctcggcctgcgcttcgaccgcctcctggcgctccccgccgcctgcagcctccccaacgccaacgtctcgctctgcatcaacctgctgaacctgaaaccgggctcgccagactacgcgctcttcgccaacgcctccaagatcacgccatcagccggaggcagcccggcgagcgacagcgccgttatcaggctccaggctggggtccgaggcagcgtcgcgctcgccgtggtctctgcgatcgtctcgtcagtcttctgatccgaccgatctcctcagaggactagaggagaagaagcggttcttacactccgtgtggattcgtcgttctcatgttgcgttccactcgtcgatgtctattttgtatttgtaccccacataaaaaaaatagatccagatgatacttgtttcccccgtccctgtggctttaactgtaacctcggatgtttgaattagctaattatgtataactctcataaaaaaaaaaaaaaaaaaacccacgcggccg

SEQ ID NO: 3055 - DNA, 830 bp, Zea mays
  unsure (1)..(830): unsure at all n locations
  Clone ID: ZEAMA-23APR03-CLUSTER9646_5
atgtaccctctccctctccagccgccgcgccattcagcccgccggtgccgccgatgcttcactctgttcgccggtcgccgtctcgacttcccttgctgtgtattcgaaccgtagctgtcctgccgtcctcccttcccagcacccgatggatcacgtggggctgctctgcatggactacgcgacggggcacgcggcgtcgccctcgtccacctgctgcggcgacgccggcgacacggagaaggcgcgccccgagtgcctctgctacatcatccagcagacgcacacggggcgcaaccaggtgcagtcgctcggactgcgcttcgaccgactcatggcgctccccgccgcctgcaacctccccaactccaacgtctcgctctgcatcaccctgctgaacctgaagccgggctctgcggactacgccctcttcngccaacgcctccaagatcacgccgtcagccggcggcaaccctgcgagcgacagcgccgcgggcagcggcgtcaagctccgggctggggtcaacggcggcgtcgcgctcgccgtggtctccgcgatcgcctcgtcactcttttgatggaccgacctcctctcaaaggagcagcggcggtttttttttaccctcctgtggattcgttctcgtgctgcgttccgctagcccatgtctactctgtactatctcataaaaaaaaatagatccagctgagacgttgttccctccctccttccctgtaccgtgtttcatgatgacttgtgacaatggatggtttcgtccttgtgcgtcgccaaaaaaaaaaaaaaaaagggcggccctcgcgatctagaactagtc

SEQ ID NO: 3056 - DNA, 606 bp, Zea mays
  Clone ID: ZEAMA-23APR03-CLUSTER966_55
gcacacaggaaaagaaagggcatatcgaggaggtttttagggcggtggtggtgttgtgaggagctgctgccgctgctctccagtctccaccgatggcgatcaagaacatgacggtggcggcgacgacgcggtcgctggacgcggacatgacggtggacgagttcaaggagtggctgcggcggttcgacacggaccaggacgggcgcatcagccgcgacgagctgcggcgcgccctgcgtgccatccgctcccggttcacggggtggaggagcaggcagggcatcagttatgccgacacagacggcgacggctacatcgacgacagcgaggtcgatggcctcatcgagttcgcgcagaagaacctcggcctcaagatcgtcgcctactgatctcacatggagcgcggcgcgtggcgggcggggggtgggacgcactggctcgccatgagctatagctatagcgacaatgcaactcaccatcactctctctccggctaaaataagagctgcttgatctatcatcgcttgtctgttaaaattgctttccatgtacttagtctattcgagttcgggatcacgcactagctctctaaaaaaaaaaaaaaaa

SEQ ID NO: 3057 - DNA, 1518 bp, Zea mays
  Clone ID: ZEAMA-23APR03-CLUSTER966_69
agaccattacctagaacatcctaatcaaaaacgcgcaaaccgaatccatccaacgtcaaacgaccgcaccaaccaatccacttcgccggcgatccgtctcatctcgtcgcgtctccggcgccggcagacacgggtaacgcggctccgagatcggcgggcaggatgatgatgctgatcgattgctcggggtgccgtaccccgttgcagctgccgcacggggcgccctgcatccgatgcgccatctgtggggccgtcacgcacatcgcccccgcccctcccgccgagcccaaccgcggcgccgtacaaccggcgccggggtgggcgccgccgccgccgccggtgcacggacggaagcgcgccgtggtgtgcgggatttcgtatcggtactcgcggcatgagctgaagggctgcatcaacgacgccaagtgcatgcgccacctgctcatgacgcgcttcaacttccccgacgactccatcatcatgctcaacgaagaacaaacggacccctacaaatcccaacaaagcataacataaggatggccatgtattggcttgtgcaaggttgtcaacctggagattcattggtgttccattattctgggcatggatcacaacaaagaaattacagtggagatgaggttgatgggttcgatgaaaccctctgcccgttggattttgagacacaagggatgattttggatgatgagataaatacagcattagttcgaccacttcctcatggagttaaacttcatgcactcattgatgcttgtcatagtgggactgcacttgatttgccttatctctgcagaatgaacaggagtgggcaatatgtatgggaagatcaccgaccgcgatctggtgtctggaaaggcactagtggtggggaagctatttcctttagtggttgtgatgatgatcagacctctgcagatacctctgctttatcaaagatcacttcgactggtgcaatgacattctgcttcatccaagctattgaacgtggacagggcaccacctacggtagtatcctgaactctatgcgttccacaatacgcaacacaggtgactcagcgggtgtaggtggcggtgctgttacatcactaattacaatgcttcttactggagggagcctttctgctggtggtctgagacaggagccacaactgacggcgtgcgagccatttgatgtctatgcgaagcccttctccctatgacgtgttcatagtattgcccaatgtactatatatctcctcccatttcacgttatcattatgtacatttcggtattaaaccttgttcgtttgtgtcggattgcacctgtaatcgttccagctaatcaaagtttatataaattagagaagcaatccggcacaaacgaacaagaccttagaagtcctccatccatccagattgttaacaacgcgtggaattgccctttatttccatgccctcacaatgttcagtgcacagttgttaaaggagagtacaatttgatgccgaaaaaaaaaaaaaaaa

SEQ ID NO: 3058 - DNA, 1294 bp, Zea mays
  Clone ID: ZEAMA-23APR03-CLUSTER967_15
atccgaaagcccaagacactgagctggtctgtttagttggaaagccatctgtacgtttttcgccgatcatggaggatgagaggaacacccagcagcaccagggcggtgagcaggcccaggaccaggagaacgaggtgaaggacaggggactcctggacagccttctcggcaggaacaagcacgacgaccaggagaagaagaaccagcagcagcagcaggcggaggaggaggagctggcgaccggcatggagaagaaggtcacggtggccgagcccgaccacaaggaggagggacacgaggccgccgagaagaaggacagccttctcgccaagctgcaccgcaccagctccagttccagctcgtcgagcgacgacgaggaagaggaggtgatcgatgagaacggcgagattgtcaagaggaggaagaagaagggccttaaggagaaggtcaaggagaagctggcggcccacaaggcccacgatgagggcgaccaccaccagacggccgtaccggccccrrcgcccgtggtggtggacacgcatgctcaccaccaggagggagagcacaagccgcacttcccggcgccggcgcctcccccgcacgtggagacgcaccaccaccccgtcgtcgtccacaagatcgaggacgacgacactaagactcagaccccaccacaggcaccggaggaggagaagaaaggcctgctggacaagatcaaggagaagctacccggtggccacaagaagccggaagacgctgctgccgccgccgccgcgccggccgtycacgcgccaccgccgccggcgccgcacgccgaggtcgaagtcagcagcccggatggcaagaagggcttgctgggcaagatcatggacaagatacccggctaccacaagagctcgggtgaagaagaccgcaaggacgccgccggcgagcacaagaccagctcctaaggtcgcagcgtgtgcggtgtccgtcgtacgttctgaccggccgggccttattgggcgcgcgatcaraagcgttgcgttggcgtgtgtgtgcttctggtttgctttaattttaccaagtttgtttcaaggtggatcgcgtggtcaaggtccgtgtgctttaaagacccaccggcactggcagtgagtgttgctgcttgtgtaggctttggtacgtatgggctttatttgcttctggatgttgtgtactacttgggtttgttgaattattatgagcagttgcgtattgtaattcagctgggctacctggacattgttatgtattaataaatgctttgctttcttcc

SEQ ID NO: 3059 - DNA, 1193 bp, Zea mays
  Clone ID: ZEAMA-23APR03-CLUSTER968_24
tttttttagatgtgcccggcttttagcattttttttaactccagaagatacagcctcactcctccgacgtacaccccttcccccaaacctccgacacctaagccgaccccgccgacgtacactccaagccccaagccaccggctagcaagcctcccacgcccaagccgaccccgccgacgtacaccccttctcccaagcctccgacacctaagccgaccccgcctacgtacactccaagccccaagccaccggctaccaagccgccgacgcccaagccgaccccaccgacgtacaccccttcccccaaacctccgacacctaagccgaccccgcctacgtacactccaagccccaagccaccggctaccaagcctcccacgcccaagccgaccccgccgacgtacaccccttctcccaagcctccgacacccaagccgaccccgccgacgtacaccccttcccccaagcctccgacgcccaagccgaccccgccgacgtacactccaagccccaagcctcccacacacccgacgcccaagccgaccccaccgacgtacaccccttccccaaagcctccgacacctaagccgaccccgccgacgtacacgccttcccccaagcctccgacacccaagccgaccccaccgacgtacactccaagccccaagccaccggctaccaagcctcccacgcccaagccgaccccaccgacgtacactcccacaccgaagccgccggccaccaagccgcccacctacactccgacgcccccggtgtctcacacccccagcccgccgccaccttactactagaaaccgatgcctaccataccacactgctgtcagtctctggagcatttaggtggtctcgatcgatggaagaattgtgtcctagccagccggcaaaggtgacctgctgatgatgatgatgagaggcgagtcctacgccctagtcctactactaccctctttgtgtgctgccatccatccgtccccgctagacgatcgaggagagaataacgcagagctctgtgctcccggcctctgtcttctcctcccggccgtttaatttatagtctctactgtgtgttcgtcccatgtgtttagcagcagcagcagtagtgtgcgggtatgtaatggtattgcaactatattgggtgtaaaaccataataaatgtggaaaaaatgcaagg

SEQ ID NO: 3060 - DNA, 1035 bp, Zea mays
  Clone ID: ZEAMA-23APR03-CLUSTER968_27
ggtgcmgtgsaggacgagcgggtgctggtggtcagcggcgagcggcgccgggaggagcgcgaggacgacgccaagtacctgcgcatggagcggcggatgggcargttcatgcgcawgttcgtgctgccggacaacgccgacgtcgacaaggtcgccgccgtgtgcagggacggcgtgctcacggtgaccgtcgagaagctgcccccgccggagcccaagaagcccaagaccatcgaggtcaaggtcgcctgagggagcaagcagtagctgtgcttctgaaactttgtgtgtttgtgtttgcttccccaagcctccgacgcccaagccgaccccgccgacgtacactccaagccccaagcctcccacacacccgacgcccaagccgaccccaccgacgtacaccccttccccaaagcctccgacacctaagccgaccccgccgacgtacacgccttcccccaagcctccgacacccaagccgaccccaccgacgtacactccaagccccaagccaccggctaccaagcctcccacgcccaagccgaccccaccgacgtacactcccacaccgaagccgccggccaccaagccgcccacctacactccgacgccgccggtgtctcacacccccagcccgccgccaccttactactagaaaccgatgcctaccataccacactgctgtcagtctctggagcatttaggtggtctcgatcgatggaagaattgtgtcctagccagccggcaaaggtgacctgctgatgatgatgatgagaggcgactcctatgccctagtcctactactaccctctttgtgtgctgccatccatccgtccccgctagacgatcgaggagagaataacgcagagctctgtgctcccggcctctgtcttctcctcccggccgtttaatttatagtctctactgtgtgttcgtcccatgtgtttagcagcagcagcagtagtgtgcgggtatgtaatggtattgcaactatattgggtgtaaaaccataataaatgtggaaaaaatgcaagg

SEQ ID NO: 3061 - DNA, 2222 bp, Zea mays
  Clone ID: ZEAMA-23APR03-CLUSTER9695_3
aactgaaaaacctcgtctacattcgcatctaggcgcccctccacctcgttccgatccagctcgccggcgcccggcggccatgtcgcagcccacggcggcggtggccgcggaggcgcagccgcagggtcgcggcctcgcggggcgccagggcggcggtggcggccttgggcagagcatctctggcatcgtgcggatggcggtgttctggtacttcgcggccaagttcttcgggcccaagcgcccgcccgcggaccccgggattctcatgtccaacctcttccagaagggcgagccaatggatatgtggatgtatttatcagagagtgacaagttcaacgattttgctaatgaggacgcacttatttggcatgaggcaaacataccatatgcagtatggggacctaccagtactagaacacggtcattaacatactacccttcagaggctctcaagcataatggatctttgtatgctcatgtttactttgcccgctcgggttaccctgtggacccaacagatcctgaatatgagcagaaatctgcatttgggaggacgcaccctgttgtggcattcttgccaaaatcaaaagctggtaaaaagaagagcttgcttggggattcagaagagcctgaagagcaagcaccacctaaggggaataaagaatttgaggataaagatgagggtccgactgaatatttatcttattggaaaccaaatgtaacagtaaatcttgttgaagacttcacacggtataccaacaataatgtaccggccatcgttgctccatatctgaatgtggatccagctacaggcgattattatcctacagtattcttcaacgagttttggcttttgagggataaattaatagcgctcaatgagactgtgaaggaattggccttaaaccttgaagttggtcctattagcatgaccaagtggcagttgtttttacagattgagcagtccttccaggttcatcgtagttatggaagtatgcttgaaggcgaggctgatgaactcaagagggttttccttgaaggaaatccttatcttcttggattgaccatgattgtttctctattacactctctgtttgatttcctggccttcaaaaatgatattcagttctggaacaagaacaagtccatggaaggtctatcggcaaaatctgtggttctgaattttgtgtgtcaactaattgttttcctgtaccttcttgacaatgacacttcatggatgatccttgctagctctggaattggtgtttgcattgagttttggaagatcggaaaggcgatgcatattgaagtcgatagaagtggaaaaattcccatgttgaggttccgagatcgtgaatcatatgcacagaataagaccaaagagtacgatgctattgcaatgaagtacctcacctatgtcctcttcctccttgtgatcggtttctctatctattcactaaagtatgaaaagcacaagagctggtactcatggatactttcttctatgacaagttgtgtgtacatgtttggtttcatcatgatgtgcccccaattatttatcaactacaagctgaagtctgttgctcatatgccatggagacaaatgacctacaagttcctcaacactataattgatgacctttttgcattcgtcattaaaatgccaatgcttcatcgtctctcggttttcagagatgatgttatcttcttgatatacgtctaccagaggtggaaatatccggtcgacaagaagcgtgtcaacgagtttggcttcggaggcgaggaggaacccgcagcccaggagactttggaaggaagtgatccagcagctgcagcagcagcagccgagccaacggaggacaagaaaaccaagtgatctccaatcgttcgatcatccaaatgtagcacgccactcagcagcacctgccctcccacagcggttgtgaaatttttcgctgaactggatgctggactcttgcggtcttgccttactgagacactgacgataagataagttgtgtgtgtaacagcctaacaggggatacaatagtgctgcctagggcagcgggcgaacaggcacactatcgctattacgtttctagcagccattactaggcgatatgcttgtttatattgttttttttgtacaattttgtgcatcatttttcaaaatacataacggcgattcttagcttcctaataatgttgcaacgaatgcccat

SEQ ID NO: 3062 - DNA, 1561 bp, Zea mays
  unsure (1)..(1561): unsure at all n locations
  Clone ID: ZEAMA-23APR03-CLUSTER9695_5
gccaagcgcgcaattaaccctcactaaagggaacaaaagctggagctccaccgcggtggcggccgctctagaactagtggatcccccgggctgcaggaattcgcacgagaccattacctagaacatcctaatcaaaaggcgacggcggcggcggcgacgacgagcagccacctgctggtgttcggattcttcgtcagcggctggcgaggacagctagagcgcccgccaacaatctcaggactcaggttatggggggcagaggttcctctttctttaggccttgttcggcaggggttgcatggattgagaggggaagagcaggtagcaggaaatggcggcgttcctgaggtcaaaatgttcaccagttggacgtactttgatgggaagccttggaaatagtttgtttggggctgccaactcttctgttggggcaataacaaggccttctcattgcgatgctatcagtcagcaaatcagaacattcatccagatgaggactaacctgaaggtggtcgataactccggggccaagcgggtgatgtgcatccagtccctgagggggaagaaaggagcaaggctcggggacatgatcatcggatccgtaaaggaggcccaagcctcgtggccaaggtcaagaaaggagacgtagtctacggcgtggtcgtccgcgccccccatgaagaaagggcgcagcgacggcagcgaggtccagttcgacgacaacgcggtggtcctcgtgaacaagaagggtgagctgatcggcacccgcgtcttcggccccgtcccccacgagctgaggaagaagaagcacctcaagatcctggccctggctgaacacatcgtttgaggtgtgtcgcagagccaagaaccaagtgtttatgggaatgtttttttgtgtgttctctgtttgaataatgcattgtgaaacgatagcatggaccgtttgaactattttgatgatattgctcgcccatttggatggccaaaaaaaaaaaaaaaaaaaaaaaaaaaaggaaaaaaaaaaaaaaaaaaactcgagggggggcccggtacacttttattttttttacaattattagagaaatttgcaccatgctttctcaactacttgctgcacacatgtgaaacacatttgaagtacaattgtantcacatgggctgcccagggcgcactaaccaccantacaaattttgtgggtaaagaggaaactaggctcggatcatccctaaaggacagcaaaactgaaagcgctgncaaccacctcccaaaactaattggtcattgatttcattccataacaagatccancggacaaacaagtcnacccncccttctgataacaagatcctgcnnactancaantcnactctnccttctgaggccctgtttgnattcnntagagctaaagtttanttgnactaaactttantcctnctaatgttancccattanctattaatcacnnngcttttaaacactatnnactaatannttntttntgtgtttagtcctgattanctcatatttgtggactaatttttanggaagctaaagtttagt

SEQ ID NO: 3063 - DNA, 1898 bp, Zea mays
  Clone ID: ZEAMA-23APR03-CLUSTER9708_1
aaaaaggagctagcactagccaggaaacacacagagagacgaaataagcagcgaggcaatgggcaactgcttcaccaggaaatacgacgagcacgagcacgagataccaatcaccacggacccgccgcggcggacgtcgatgccggtgtaccggccgccccggccccgcgatgacaaggcgcaggaggtgccgctatactcgggctcggaccgccggccgtcctaccgtccgccgcggcttccggtcttcccgtcgggcccgggatcgacgggccggcggcggccgcccaccggccagacgggcacggtcctggaccggcacacggtggacgtgcggacgctgttccacctggagcggaagctggggagcgggcagttcggcaccacgtacctgtgcacggagcgcgcgacggggaagaagtacgcgtgcaagtcggtgtccaagcgcaagctggtgcggcgcgccgacatcgcggacatgcgccgggagatcaccatcctgcagcacctcagcggccagcccaacgtggcggagttcaagggcgcgttcgaggaccgcgacgacgtgcacgtcgtcatggagctctgctccggcggcgagctcttcgaccgcatcaccgccaaggggagctactccgagcgccaggccgccgccgtgtgccgcgacgtcctcaccgtcgtcaacgtctgccacttcatgggggtcatgcaccgcgacctcaagcccgagaacttcctgctcgccagccccgccgacgacgcgccgctcaaggccatcgacttcggcctgtccgtcttcatcgaagaaggcaaagtttacaaggacgtggtggggagcgcgtactacgtggcgcccgaggtgttgcgccggaactacggcagggagatcgacgtctggagtgctggcgtgatcctatacatccttctatgcgggtcgccgcctttctgggaagaaacgcagaaaggcatatttgacgcaatattggccgacgagctcgatctggtctcctccccgtggccctccatatctgaaagcgcgaaggatctcattagaaaaatgctgaacaaggaccctcagaggcgcattacggcttcacaggccctagaacatccatggctcaaaggtggtgcacctgacaggcctatcgacagcgcggtcctgtcaagaatgaagcagttcaaggcgatgaacaagctaaagcaacttgcactgaaggtaatcgcagagaacctaacagaggacgagatcaaggggctgaagcagatgttcaacaacatggatacagacaggagcggcacgatcacggtcgaggaactcaaggacgggctggcgaagctcgggtccaagattagcgaagcggaggttcagaagcttatggaagcagttgacgtggacaagagtggcagcattgactacaccgagttcctcactgccatgatgaacaggcataaactggagaaggaggaggatttgttccttgcttttcaacacttcgacaaagacgatagcgggtacataacaagagacgaactggaacaagccatggcggagtatggggtgggtgatgaagcaagcattaaggaagtgctggacgaagttgataaagacaaggatgggagaatcgactacgaagagtttgtagaaatgatgaggaagggaagttatacctgaggaagctctgttctcatggtgggagaggttgtgtatatatgtttcagcaaatgtgtcaagtacaagcaacgaagcaagtttaacttagaacaagttgcttctgcagctatggtccgaggcaagcatgtacagctatttatttattgaccgaatatgcaacgagagagaaaatgtccagtttacttgaaagaaaagttcagagttcgtgctaaaaaaaaaaaaaaaa

SEQ ID NO: 3064 - DNA, 2435 bp, Zea mays
  Clone ID: ZEAMA-23APR03-CLUSTER9709_1
taagaatgtgcaaagtgatgtttcagatgtgcctgacagaattgtttctaaggaaccaacagagttggaaactgataatcgcataaatgagaatgtacagagtgttgctgatatgtctgacagaagtgttttaaaggaagcaacaatgcctgatgctgacagtcgcatatctgaaaatctgcaaagtgctgcaaatttgcctgccagcagtggccccgcgcctatgcgtgaagacatgtctcagcctgtagatggaaaggaactgcctggggatgtagacgtctgcgcagtccagcgctcttatgcgtccctgcaagctaacctgccagaggtgctgatgaaagttaaaactgatggagccgacataatcggtgcgaagcctacactcaacgatgagtgtcaaaacaatggacaaccggtcaggatagtgaagcttcctgcgcaagtggacgactttccataggacgctgagggatttctctgtttgtttagaagcacaacatttgttcacggtgctgactatgagtcttgtaaggcatatgaatgtccactcgtgcgtggctctggaaaagttggcatggaaattgttgtcgctctagcctctgattcacatgcttttctgaatcaaggcagttgtgtgttgaagaggaccaggaaaaaagatgaagctgtgagtggtagcccttccatcaagaagaagcgggagaagacctctcttgccagcgctgatataccaatcgctcctgctattcctattaggcagttgaaagcagaagatatgagaaccctcatgaaggctgaaagtggtctaaggggtataggattaggagttaagaataataagggcaaaccttcacctttgaaagttcctatttcagctgcggatcctggagcagtggaattaggacacgaacatgcccaagcaaatgttctggctgtgtgcaatacgcgtccggaacagcccgcaaaagaaaacgatgctactaacttggaagcaacaaggtcagaaatgaatatgcaaaatggtactgtagatgtgcctatcagaagtgttcagacagaagcaatgaaattgcaagctaataatcccatagatgtgaatgcacaaagcgttgctgtagatgtccctgtaggaagtgtttctaaggaagcaacagagccagaaactagtgtacacaaggacaagaatgtgcaaagcgatgtttcaggtgtatctgacagaattgtttctaaggaaccaacagagttggaaactgatgatcacataaacgagaatgtgcagagtgtcgctgcagatgtgtctgccagaagtgtttcaaaggaagcagcaatgaccgatgctgatattggcatacatgaaaatacgcaaagtgctgcagatttgcctgacagcagtgggccgtctcctatgcatgaagacatgtctcagcctgtggatggacataaggagcctgggagtgtagaagtctgcatagtccagcaatcttacgcttctctggaagctatggtgccagaaatgattaagaaagttaacgctaatggcgcaggcacaatcggtgtgaattatacactcaaagacgagtttcaaaaggatggacaacctgtcgagaaagtgaagctaccagcaggagtggcgaaccattcctgtggtggcggtaccaatggcacttggctggaccctgctaaccttacacctaagaaaaggaagaaagtcgcgcagcacttcagcaatccagcagccgtcatagtggaattcgcacccggtgccactgttccgtccagacaggagctgctctccacattcggcaagtacggcgacttgatcgagtctcagaccgatatttcggaaactacccgcagcgcctctgtcgtgtatgggaaaagcgttgaggccgaggaggcgtacaggaacggttgccagtaccttcttggtcagtttgggcctccgttcgctacgctaaggcttgatttctccccaatcgtgccttcaccgtctcctcccgcttcgaaacctccgctccgagatattcggaagaacctcgaggacatgatttcgtcccggcgctcggctttgaacaaggcgacctcgtcggcagacgcccagctggaccctgttccagataagcttctgggggagatgcaggggctgttggcaaaagtcgacaggatgcttaccaggcctcatgctaatgctccttagccctgccaatctggagggttgtggctgtaacctattcggtagttaggcaactttggtgtctgctctgttagctgtgaatggcggggcttgttttgtggctgcttcgtgtactatatatatgccaataaggtcgcagcttcttttcgtgcccctgattttgatgttatgttagtagtatggcattgccattttgtcagagctgttggagtttgcaccggaaccctaaagtgcactt

SEQ ID NO: 3065 - DNA, 1633 bp, Zea mays
  unsure (1)..(1633): unsure at all n locations
  Clone ID: ZEAMA-23APR03-CLUSTER9729_1
actttgaaatttgtccgtccatacgaactcaccgcaccgcatcgaccagctacacgaatcacacggcggcatggccggcgcgtgcgcccacgtcgagttcctccgcgcgcagcgggccttgggccgctggtgctggccgccggtcatgtgcccgttaaggtcgagccgcgggcagccgctccgcacagcaccgcaccgcactgcatcggtcgccagccgagccgagccgagccctgctctctcctccagctccccaaatcacactccgccatggccggcacgtgcgctcacgtcgagttcctccgcgcgcagccggcgtgggcgctggcgctggccgcggtgggcctgctcgtggccgtgcgcgccgccgcccgcttcgcgctctgggtctacgccgcgttcctccgcccgggcaagcccctgcgccgccgctacggcgcctgggccgtcgtgacgggcgccaccgacggcatcggccgcgccgtcgccttccgcctcgccgcgtccgggctcgggctcgtcctcgtcggccgcaaccaggagaagctggccgccgtcgccgccgagatcaaggccaggcaccccaaggtccccgaggtgcggactttcgtgctcgacttcgccggcgaggggctggccgccggcgtcgaggcgctcaaggactccatccggggcctcgacgtcggcgtgctcgtcaacaacgccggcgtgtcctacccgtacgcgcgctacttccacgaggtggacgaggagctgatgcgcaccctcatccgggtcaacgtcgagggcgtcacgcgtgtcacgcacgccgtgctgccggccatggtcgagaggaagcgcggcgccattgtcaacatcggctccggcgccgcctccgtcgtgccttctgatccgctctactccgtctacgccgctaccaaagcgtatgttgaccaattctcaagatgcctctatgttgagtacaagagcaagggtattgatgtgcaatgccaggtgcccttatacgtggcgacaaagatggcatccatcaggaagtcttccttcatggtcccatctgctgacacctatgctcgtgctgccgttcgtcacattggatacgagcctaggtgcacaccatactggccacactctgtcgtgtggttcttgatctccattcttcccgagtcccttatcgacagcgtgcgcctgggcatgtgcattaagatccgcaagaaggggctggccaaggacgccaagaagaaggcgctgtgattgatgtttcagaatgcatgttcagattcgcacatttcctcatcacctgtagtagacacgtgccttgctgtagtcactttattagctaccattacctcctgagtctgttaagaatcgagaatgtcattgttccatccgcggttatgatgatgaaaaatacgattcttcaattcaaaatgtaacactaatacgagtaatgatgcatgaaattaacttgaagaagttgtgcaactcagttgtttttctgaaccatttcacatttttgtaaaaaaaaaaaaaaaaaaaaaaaaaatcccttcttccattcaaaatgttacactaatacgagtaatgatgcatgaaattaacttgaaaaaaaaaaaaaaaaaaggncgncggccgt

SEQ ID NO: 3066 - DNA, 2597 bp, Zea mays
  Clone ID: ZEAMA-23APR03-CLUSTER9736_1
gcacgagaccattacctagaacatcctaatcgaaaagtttgttttcgtcgtaaatctccgtcccgctgggcgcgctgccggagtcgccgtcgcccagcccccagccgattattcttattctctttgcttcgcctcgcctcctgtcgtcgtcgtcatcatcatcgcccccggctgctaaacaccaacaagtgcccttgccccacatggccacccggccacattaccccacaaccggcagggcacgggcaacttgacatgcatggcaacgacgcacagcagcttgctcacacacaccgtcgcgagctagctctagccacaccacaccttcctcctcactcccaattccatatagttcctctgcccacgcgcgcacaaaggccatggcgacgacgcggcctcgcggtgggggtggggcggcgagcggcgcgctggtcatggcgatcgtcgtgctgctgctactgccgccatatggagccggcgcggaggagtgcgaggacggcggcatcagcagccgggcgcgcgcgggcgaccgcgtggaggcgctgccggggcagccggcggtggcgttcgcgcagtactccgggtacgtggcggtggaccgggaccgcggccgcgcgctcttctactggctcaccgaggccgtcggcgacgacgcggccgccaagcccctcgtgctctggctcaacggaggttagtgagtgacccctccacctgcagtcagagcttagctcctttcttttcatgcaataatcagcaatcacgctcgtcctccgtggtcaacgacgatgccatgtgtgcagtgcatgatatgatgttaccatcatatgggagttattacgtcgtcctcgatcagtcagtcggtcggtctttccatgcgagggaagctaggtagctacggagctctttttcttacctttgctgtggggggtttggagtattagtattttttttataaaaaaggaaaccaagacagacgagaggaccgctcaagacgcgctgcagttcctggtcagctggatgtcacggttcccgcagtaccggcaccgagatttctacatcgccggagaaagctacgcgggccactacgtcccccagttggcaaggaagatcgtcgagtacaacgaggcctcgcctcaccccttcatcaacctcaagggaatccttgtgagtatcgtatctatgcatgctgctgccaaacacgagcaggccgccggccggccggctccagtctaatcttaacccctccaaaaaaaaaacaccgatcaggtgggcaacgcggtgaccgacaactactacgacaacatcggcacggtcacctactggtggacgcacgccatgatctccgaccgcacctacaaggccatcctcaggtggtgcaacttcagcagcagcagcatctcgcgcccctgcaaccgcgccatgagctacgccatgaaccacgagttcggggacatcgaccagtacagcatctacacgccgtcgtgcgccgccgccgcggccagggccaacgccaccgtgctcaggttcaagaacaccctcgtccgccgccgccgctcctccggctacgacccctgcacggagacctacgccgagaggtactacaacaggatggacgtgcagagggcgatgcacgccaacaccacggggatcccctacagatggactgcctgcagtgatgtgctgatcaagacatggcaagattcagagttctccatgctgccgacgtacaagaagctgatgaaagcaggactgaggatatgggtgttcagcggcgacacagattcagtcgtcccggtgaccgcgacgaggttcgccatcagtcatctcggtctgaagatcaagacccgctggtatccgtggtactcagctggacaggtaggaggatggtctgaggtgtacgaagggctcacgtttgcgtcggtgagaggcgcagggcatgaggtgccgttgttccagccccggagggcgttcaggatgttccggtcgttcttggccggggagccattgcccaagtcctgaaggttcctcacatgtgactgaggccatgcatgcctacctgatcatgtctagctacggtcctgacgggtgagaaggtgacgttccccaggtagagaatgacttgttgataggcgcgcagttcatagctgaggagtgattgattggtctcgggagaaggatgtagagaataataaggatggctatgttatgccatggaaacccatgagcattgcaatgattagcgaataattttcagttaactcactctcaagagcgtaggttatgttatgttatgttatgccatggaaacccatgagcaatgcgacgaatatatttgaaggatctcactcttgaaccaacccatgggcatgtcatgccctagcgaaccatgtgcccttgccaactcttagcggctaatgttctctgtgccccctctcaagtgcttatgttatgttatgttatgccatggaaacccccgcgcgatgcggcgcatatggcggacggatctcactcgtgggccctccctcttgaaccaaaaaaaaaaaaaaaaagaaaaaaaaaaaaaaaaaactcgagggggccggtacaattcgcccttg

SEQ ID NO: 3067 - DNA, 1478 bp, Zea mays
  Clone ID: ZEAMA-23APR03-CLUSTER9758_3
gcaaatcgccccccaaaccaaccgggccggccgacacaagcagcatcccgtcggcggcgatggacctggtgtcgagcgacctcgcggcgctgggcgcggtggagctggtccgcgtctcggcgtcgatcccgcgcgcggctccgcgcaccttcgcgctgctcaccgcctgcctcgtcttcccgctctccttcgccgtgctcgcgcactccctcttcacccaccccatcctgctccgcatccggggcgccgcccactcggggttcgcgccgtggctcggcctcttcgcgtaccagttcatgtacctcatcgtcctcttcaccttctccctcctctccaccgccgccgccgtcttcaccgtcgcctccctctacgccgggaagcccgcgtccgtctcctcctcgctcagcgcgctgcgccccatcctgccccgcctcctccgcaccttcctctgggtctccctcctcatgctcgcctaccacctcgccttcgcgctcgccgtcctcctgctcgtcgtcctcgtcttcctcgggatccacgtctacatctccgcgctgtggcacctcgccagcgtcgtctccgtgctcgagccgctctgcgggctcgccgccatggccaagagcaggcagctgctccagggccgcaccggcaccgcagccacgcttgtcgtctcctacttcgcggtctgcggcgcgacctcgctgctgttccgtgccgctgtcgttaagggacgcaccgaggaggggagcttcggcctggccttgcctggccggctgcttgtcggcgccgtgctggtgtgcgttcttgtctctgtcaatctgctaggactgctcgtgcagagtgtcttctactacgcctgcaaggccttccacagccagcagattgaccgcactgcattgtatgagcaccttggaggctaccttggggagtacgtgccactcaagagcaatatccagatggagaacctttgagagttggagcataggacaagggtaatcttctcacctctcattgctacatactagcagttttctatggatctttctcaaaagatgactatggtttacttggagctatctggtcttgttgtttctagtatcctgtagtagtgtagtttagaatctgtacaagtgaaaatgcgcagtatggaaccaatctatggaatggaacgtagatgcatgaacaaggttgtctttcatctcattgcttcatactagcagtttcatgtggatctttatcagaatatgagtatggcttacaaggggctatctggtcttgttgattctagtaccatgtagtagttcgtaatctgtataagtggtaatgcacagtatggaaccaatctgtggaatggaagtatggaacagagatgcatgaacaaggttgtctttcatctcgcaaaaaaaaaaaaaaaaaaaaaaaaaaaaaaaaaaaaaatgaaaaaaaaaaacaaacattataaaaaattaaaagggaaaacg

SEQ ID NO: 3068 - DNA, 2015 bp, Zea mays
  Clone ID: ZEAMA-23APR03-CLUSTER9763_1
aaaacagaattccacgacgtctcacctgcacacgcgctcgtcgtcgtctcatcggcgcttgctgcgacaactcacgccggtggcttgagcgcgccatcgaccagggttgttacaccaagcgatggcggcggtggccggggatggtggtggtgggcccgaggagggcgtcggcgagagctcgtccccgcctcgcaaccccgtgctcgcgcccgcacccgctgcctctggcgggagcgggagcggtggcggcggccgcggaggtggcctccgggacatctgccgcgaggtgttcgagcgcctcgtcaacgatggccacagggcgggctccgagctccttgcccagctcgaggcccacttcaatcgactccccatcagctacaagctggatgtgaatattgacaaagcagaagatgtgttaatccatcagaaagttttggcagaagcacaggatcctgataggcgcccagcattcactgtccgtttcctcaggcttgaagaggtaaatgtggacgagacaactaactctgatgcacatgaagaaggggctgatattggtgaagctctttctaccaggtcaaagacatcatatgcacacattcatgagatactattctccaccaaggataaacccaagctcctgagtcagttgtctgctttgctttctgacattggactgaacatcaaggaggcacatgtgttctcaacaacagatggttattctcttgatgtttttgttgttgacggttggcccgttgaggaaactgatggtttgcataaggcactagaagtatcaattttgagaaatgagggttcctggtctggctctgaatcctcagcttccaaaagatcactgccattcctagcacaggattttgaatcagatattgacacaagacttctgaagcttgtaaataagattgcttctggatcttgtggggacatgtttcttgggacctacagtggtgaggaggttgctgttaaagttcttaatcctcagaatttgaacaaaaatgtatggagtgaatttaagcaagaaatcaacatgttaagggaagttgatcatccgaatattgtccgattcattggttcatgcacaaagccacctcagttttacataattacagagtgcatgtctagaggaagtctgtttgatttcttgcacaatgagcataatgtgttggacctcccaacgcttctgaagtttgcactagatgtatgccaagggatgtcctacttgcatcagaaaggcattatccacagagatttaaagtctggcaaccttttattggataaaaatgatgttgttaaagtagccgattttggtctagctcgttttcaggatggagggggtgatatgactgctgaaactgggacctatagatggatggcacctgaggttataaatcatcagccctatgacagcaaagcagatgtatacagttttgctcttgtactttgggagctcatgacatccaagattccatataataccatgacccccctccaagcagctgttggtgtgaggcagggattgcgaccacaaattccagaaaatacgcatccgaggctcataaacttgatgcagagatgttgggaagctactccgactgatcgcccttcatttgaggagatcattcctgaactagaggatatccaggcacaagcacagagaacatcaggggaaacgagccagacagaggaggaccactcatgcagtaaagattgattgaccccctctgtacatacatgttgacaattctctcatctgatcactaaaatgctgagaaagtagcatatcatcagttttgatgccatagaaaaaaagtagcgaatcattttgtcaagttttgtcagaaccttttggggccgacggccaaagctcttggtattatccttgcttcactcttaggtcccatttttcctgatatgatgatatctttgagttgcggcttgatatatgtgaatatttgaatgagaaatttactgctgcttgtcaaataaaaaaaaaaaaaaaa

SEQ ID NO: 3069 - DNA, 1180 bp, Zea mays
  unsure (1)..(1180): unsure at all n locations
  Clone ID: ZEAMA-23APR03-CLUSTER976_2
cgctgctagggttttctcgcaatccagcccctctgtcatggccaagacgaagcaagggaagcgggatgtcgacgcctataccatcaagggcaccaacaaggtggtccgagtgggggactgcgtgctgatgcggccagcggacacggacaacccgccgtacgtggcgcgggtggagcggatggagtcggacgggcgcggcagcgtgagggtgcgggtgcgctggtactaccgccccgaggaggccaagggcggccgacgcccgttccacggtgccaaggagctcttcctctccgaccacttcgacacgcagagcgcccacaccattgagggcaagtgcatcgttcactccttcaagagctacaccaagctcgacaacgttggtccggaggacttctactgccgatttgactacaaggccgccaccggtgcattcacccccgaccgtgtcgccgtatattgcaagtgtgagatgccgtacaacccggatgacctcatggtgcagtgtgaaggatgcaaggactggttccatccgtcttgtatgggaatgaccattgagcaagcaaaaaagatagatcattacatgtgctcggattgtgctaaagaaaatggtgcaaagagaccctcaaattcatactcagtttcaccaaactcagattctaagattgaatcaaagaggcgcaagagataaatgctgcggcagaagcacccctggcaaaggagatgcggtatttatggtgtcagctcctcattactggtgcatatttgagatgttgatgtgtacactgcgagagaagagccaagccaattgtagggcaaaacctatttgacttatcattcttctgtgtattctgcctagacattagtgtgatgagtaggtgagttccccgttgcggcgtgtgcatgatcagctgctggaggcgggatgtcgggaaatgctagaattatgctgactcttgtcgatgtaagtgtatcgtgtgtgtgtgttaacatatgcactggctggaaacgttcccatgtgtgaatggaggatgctgatgatagcttgactgttgtttcatattcagttagatgtttgcggagagttgaaataatgagtttgatcttgaaaaaaaaaaaaaaaaaggggcggccnnnnnnnnnnnnnnnnnnnnnnnnnnnnnnnnnnnnnnnnnnnnnnnnn

SEQ ID NO: 3070 - DNA, 1207 bp, Zea mays
  Clone ID: ZEAMA-23APR03-CLUSTER976_3
gggaggttcaacattgtccaaggacgtgcaacaaagtggcagattgccttgcgaagtatggggcgagcgtggtttgctctggttcgaatgttttcatgagccaagtccccgcctttgtttccaatttagtctccggcgatctgcctggagatgttgtttaacagtctctatgagtctgtgtttcaaaaaaaaagtcttcttcgttcttccaatctccttcctattcctctgttagggtagccagtagctaacagctaggtcctgctctgctggtacgctgtcatcctggatctaccgcgcgtcatcctccttgcctaggcgtagcgctcgggcggaaccgagctgcggccttaagcatcgacaccgtcctcgacttccccaccagtacctacagtgaaggccgaccagattgaagtgaagcgccaacgccgacctgtagatctcgcctccaccgccgctagtgccctccatcccctgtccgcgagtctcggcaaccaaatctgagtttttgaagctttgaaccccagggcggttactgttgtcgtagaccccatatagagtgtgaaggggaaagtagttattgatgtattccgcctaattaatcctcagaccatgatgcttggccaggagccacggcagacgacatcaaaggtcgggcacctaaataactcatcgattcaggctcttatccatgggctgaacagacactactaatttgcaatcaattaccgcaaaaatgagctcgagaagaaaatgttgttgaacttgcacaaaaagaaatggatagatgggctaattttgaagaggtttgacactcactcaaaaaaccaacgagcaaactgtccaggttccatccgtcttgtatgggaatgaccattgagcaagccaaaaaattacatgtgctcggattgtgctaaagaaaatggtgcaaagagaccctcaaattcatacccagtttcaccaaactctgattctaagatatggacctcggtggttttctccacgttaggaaagctggaagagtcttttctactcagttttatgataacagtggtgttatggtcaaacaaagtcttgcgtgtatgtaccaacagctaaactgtaaacacgacattaccatagttgattacatgaataattatcttttatatcttattgtaaaatctgaaacagttgtcatgtagatggttagcttgcattttacgct

SEQ ID NO: 3071 - DNA, 2254 bp, Zea mays
  Clone ID: ZEAMA-23APR03-CLUSTER979_3
aaaatggctttatatactactggcttggcttgggcgtcgatggatgtgcgtggcaacgtccaaaatccagaccgctggtaggagtatctcgtagacattgaacaacggctgcatggcgagcgcctgcgccacctccatccccctcgtctcggcgccctctgcatgcccgtccaagaagaccaccgtcgccaggttccggcgccgcacggcgacgtgcagggccagcagcggcggtggcggtggccggggcggcgaaaatgatggcctcctttggctgcccccggcgggacgtgatgctcaacggcctgtccagtgtcgccgccgggctcgcctggtacccgggcgtcgcgtccggcgcggatgcggtgtgcaccagggccgacaaggtgaacgagaagaccgtgcagtgcacggacccggccgggcagcttccgtgccctctggtgtcgccgacggaccccgtggacttcaagccggaaagcaaggtgacgcgcatccggcagccggtgcatctcctgagccgggagtaccaggagaagtacaaggaggccgtcgcgaagatgaaggcgctaccggaagagaacccgctgagcttcgcggcccaggcggccatccaccaggcctactgcgacgcctactacaagtatgacccgacggccaaggacgcgccgttcgacgtgcacttctcgtggatcttcgcgccgtggcaccgcatgtacatctacttctacgagcgcgccctcgggcagctcatcggcgacgacaccttcgcgctgccgttctggaactgggatacgccggccggcatggtggtgccgccactcttcaaggactccatgggcaacccgctgtacgaccccaacaggaacccgtcgaacgtcgacgcgctggtggacttagactacctcaacgacaggaatgcggagcccatccctttcaagggcccacgggacgaaaagtacaaggaacttgtgaacaagaacctgtgcaccgtatacacccagcaaatacgtagcggcaagggcgccgagtcgttcctgggcgagaagtactgcaccgacatcggggtcaagcacgagcagcatgggttcgctggagcggatggcgcacactgccgtgcacgtctgggtcggcaaggcgggcccgacgccttcgtcggaggcgtgcagtgccgctaccggcggcttcccgaaccacaccaaaggcgggtacagctgcaacaacgacatggggttcctggggtcggcgggacacgacccgctcttctactcgcaccactccaacgtcgaccgcatgtggcacatctggtcgaccaggctcggcggcgggcagggcatcacggaggcggactggctcgacaccagcttcgtcttctacgacgacgtcaagagcccgcggaaggtgcgcatcaggttccgcgacgtcctggacacgcgcgacctcggctacacgtacgacgccgagtccgacaaggacctgccatggctgcgctgcaagatctcgtcgctggtgccccacggcaaggacagcccgccgaggtcatcgtcggcgaggaaggcggcggcgccggtgttcccgctcgccctgaccaagggccaggtggtggaggtgccggccgtgcctgtgccggccaaggacccggggaaggagcagctgctggtgatcgagggcatcgagtacgacccccaggcgaacaataagttcgacgtcgccatcaacctgcccgcggacaaagcgttgcaggtaggcccacagtacaaggagtacgccggaagcttcgccgtcgtgccgggctccggcgccgggaagacgcggaaagtgaagctctccctgtgcatcaccgaagtgctgttcgatatcgacgctgacggcgataaaaccgtcgacgtcgttatcgtgccgcgcacaaatgctaagatcacgctcaacgctcgccccaccatcaagaatcggaactaggagctagttgctactagtgctcatcaagcacactgtacgtacgtacgtatgtactcgatcgcgtggtcattcatcgaccatcatcgtttatatgctgtcacgcacagcgcgggccggcggtagggtgtcggcaataataaacccggccagtgttgcattattgtgtgttttatttcacaaggattaggagcgagccaatggtagattctaaggaataaataacattgttatgaatgatatggttatgttttagagccgatcgtggcttaccctgatatcattatgttttagcgcc

SEQ ID NO: 3072 - DNA, 2162 bp, Zea mays
  Clone ID: ZEAMA-23APR03-CLUSTER9804_1
gttgacccacgcgtccgatttcgtggcgtgcaatgccgctgcctcctcgtgctcatccctcctccgccttcctctgtctcgctccttgatcttgccagctcttggggactccggcgaaatcggtgcctgaagttgcgtcttctcagttcgaccacgcgcatgggctgttcttgatcgcaactgggcgcgccttgtcactctccgcttctcttcagttcactccattgagctggtagctccacaggcaccctcccccggactttgatcctccgatccttgcctgcatctttaacgcgccgtttggatcctcgaagtccgcccgactgagacactcacacacacacacacacacagaccaaagccccctcgccctcctcccggtcgcccaaccggtgcttagcggcaaggggagttggcctatgggcacggcgacggaaccccccgccaacagcctcagctgccgaggtccgcctccgccgcaggggccaccggcgtggcgcgcgcgtccatcaggagcaagcccgtgaagatgccgcagcgcggcctcggcgtggcgcagctcgagaagctccggatcgaggagcagaagatggagggatccatgccggtgtcggggcctacgaatctcagcgtcggcgtcggcggggtcttttatctccacccgatgcaccctccgccacacgcgccgcccgcgctgctgccgaggcccggcgcggtcggcgccgtgcactgcggatacccttcggtgctctgggaccctgcgacggcgacggtgtctgtggcggtggaccccttgaagcactcgaactacaacaggtgcctgttcacgctacctccgcttccaacggtgagcgtgggcctgtcgctgacggcggcgtcgtcgagccacccaacggagcccccttcaaaccaaatgtacagcagcggcggcggcggcggcgcggagactgcggcggcggaggacgacgacgacagggtacacgctgtcgttgaggaggcggccggcgtggacagaccctggcccttggtgttcgagggcttgaacacggccgccttccggacgacggcggcggggaaggcgcctctcgcagtcgccgccaggacgacgagagaggccgccgccgccgccggcttgcctgacgcctgtgccgccgccgacctgaccagatacgagttcagcagagccaccacaaactattacaggttaaatttgcagagagctcactctcatgtttgtggttttcccccagtgtgggttttgttgagtgtgtgcttttcatctgagctcgaatttctgcataaggactagcccggcctccgcctgcagcttgagcgcgagttatccagactggtcatcgtcggagttggggcactgcaagagcagcaaggagaaggagcctgcccctgcctacctcaccttgagcgcgcagcctcctgcgccacgcgggaagcagcagcctcctgcgctcccctcgatcaaactcccggagttgggtcacttcggcttcatgcagcctcctcagcacgggagcgcttcggcgtcgtcgtccgcgtcggcgtcgcggccgttctacagcttcatgccggctggtccggttcgcatcgagagaccccggatcgggatcaaggccgacgacgcctctgacggcgtcgacctggaactgaagctgtgaaggcgctcatcgctggacccctctgttcctagctggtaaatttgacgccgaacctgaagcgggaactgggaacagagctcgtcgtcgtcgagaagaaaagtttctggcgccgtgttctcggtttgtaacctgaaacacgatgtatcggtatttgcgttcttttttttttctcctcaacattttcccgctcccaataaacatctggtgcgcatggagatggagtgtgtgcagcgtcgagcaggtcttcagtgaggaaaggagagcacgtgcacgatcggggttgcaagcttgcagctggcctctgtggggggtcttttctgtacagatctagcaaggcagcgtcgtggcacacccagatacgcaccagacagtcaggtagatgtctgccaagatatgcaaatatggttgtagatgttctggttttcctttggatcatttgtgtttgtggatgtagtgctacgtgcaatggaatcaccacatttcccattc

SEQ ID NO: 3073 - DNA, 2134 bp, Zea mays
  Clone ID: ZEAMA-23APR03-CLUSTER98332_1
gaccacttttttttttttttttttgggaaagatcctactctcgacaaagtttgatgacgaaggacaccagagagcagggcacgatcatactgtcgttggcgacattgggtcaccatttgcacatttttttttttttttatgtgatgaacttctgatggttcatattatcatataccagcattcatagcaaatatgtggaggcacaaaaacagttggctacacaagatgctgaggtacgtagtagccatagttctgatttctgaacaaactccaaagacaatgaggaaaagatcgcattagtcaatagtcgtcgtccttaattctcttcagcagtctagcagcccatctgcgcagccttttcttgagtgtgaaccctgccacaacaccaatcgcaaagctaatggcactgacctttgcacatgttgacagagaaacaacccgtccggcggtcctggacacgagggcctgctgcgcctgctcggagaaggcgccggccgagcgcgacgaggacttggcggcgtcctgcgccgctgcctgtagcctctctacggccgacgcaaccgcagacggcgctggcatctccgggtatcccgggctccaccgccgctgtcgccggctagtagaggttcgaactagggttttatgcttttagctttcacagagcgacaatggcgcgggagccgcgtgagcgagaggggcgaggctgcaaggtgaaacaggggaaacatcaaataaaatcggagacaaagttgaacactggtcaaatattccaggatttagaactcataaaaaccttgatacaacggctttactgattggctgccacttaaaagtttaacctcaagtaactactaccttcatttccaatcttgcctcgataaatgaataatacctaaagttgccagtcgaactttttcatttttgaccgagtttataaaaaaagctacaaatatttgtgacaccaaatgagcatattctgaaaaagtgaaaatatagttcatggtgcatccaatccaataatgctaatgtagtgccataaatcttgacactcctttctataaattcagacaagctttaaattttttgacttaagaaaagtgtaagaattgatttattcaggcaaaatagtcctttgaaattcttaaacctataaaattcaatacatcaagctaccactttgagcttaacttgacagcaactgaagggttcactgaaaagggatttcttatgcttctcttttgggaatttggttacataagggttctggggaaaacatcttaaccattgaccacatgcccttgatataatttaagcgactataaacatgaagttaatagggattgaaacagtcggaaacgatatcgtttatacgaaaatgattgtcggtcggtcgtaaatttactcggtttcataattaatcaacttattgtcgattacaataaatgttgacagatatttgaaatttaaattttaaatatagtgattttcggaaatgatattgtgtttacagaaacgatacggttatgaggccctgattacgggattttcggttacggttttcatctgtggatgttataaatggagtacattgcctaccaaaccatgaattactcatatcgcacgatactacctggtactgctcgtgtaaacgtaagggcaaactggctggaagtgagctgaatccatgaagtacagtaataagatcatccgaagcacaattcaaatcataaatggggatcggaagaagcacgctgcaaattccgcgtggccataccaaatcagggcaaacaacagagcaagcataaagcctgcgaccgcggatgcatcgaatcgagagaagatggaggtcggtgtcagcggatacggcttacccggcggtcctggacacgagggcctgctgcgcctgctcggagaaggcgccggccgagcgcgacgaggacttggcggcgtcctgcgccgctgcctgtagcctctctacggccgacgcaaccgcagacggcgctggcatctccgggtatcccgcgctccaccgccgctgtcgccggctagtagaggttcgaactagggttttaggcttttagctttcactgaacgccgatccgccgagagccgcgagagcgagaggggcgaggct

SEQ ID NO: 3074 - DNA, 2384 bp, Zea mays
  unsure (1)..(2384): unsure at all n locations
  Clone ID: ZEAMA-23APR03-CLUSTER9837_1
ttttttttttttttttgataagccgatcgattatggttataaagcccatcacccgagcaggaacccacaccacaccaccgccgacacactctcgctcgctctcgctagctagcgggaaactactatggcgtgggcgtctccgcgcggcacagcacctcagctcctcctcgtgctgtcgctgctgctggccgnngnnaganncctccctgcttcccctgagcaataatgcgcccccgccgagacttccgccggcggcgaaggcaagggagggcggcgcctcggtgtcggcggggctgctctccacgctgcgcgaggcgctggacgcggtcaaggacgtcacatccatcatctcgtcgttccccatcggcggcatcctcggggacggcggcggcgacctccgcctgtcgtccgccgtcgccgactgcctcgacctcctcgacctctcctccgacgagatgtcgtggtccatgtccatgtccaccgactcgagcggggcgggcggcggccgcctcggcaccggcgacgcccggtccgacctgcagtcctggctgagcggcgcgctcgggaaccaggacacctgcaaggaaggcctggacgcgaccggctccgtgctgggctcgctggttgccgcggggctggacgccgtcacgtcgcttctggccgacggcctcggccaggtcgccggcggcgacgacgcgaccgctccggcgtcgtcgttgccgccctcctcctcccgccgcggcgccgccccgccgcggtggctgcgcgcgagggagcggcggctgctgcagatgcctgtggggcccggaggcctggcggtggacgccgtggtggcgcaggacgggagcggcaacttcacgacggtgggcgcggccgtggaggcggcgcccgcgcagagcgcggcgcggtacgtggtgtacgtgaggaagggcgtgtacagggagacggtggaggtgaagaagaagaagtggaacctgatgctggtcggcgacggcatgggcgccacggtcatctccggccgccgcagctacggcgacggctacaccacctaccgcagcgccaccgtcggtgagcgcaccgtgtctactaactgttcctccccctcctccctcatgaactccaaataaaaataactaaaaatttcatgaaaactttttcgattaggatgttctaggtaatggtctcgtgttgcaagggcttcatcgcgcgggacctgacgttcgagaacacggcggggccggcgaagcaccaggccgtggcgctgcggtgcgactcggacctctccgtcttctaccgctgcgccttcgaggggtaccaggacacgctgtacgcgcactcgctgcgccagttctaccgcgactgccgcgtcgcgggcaccgtcgacttcgtcttcggcaacgccgccgccgtgttccaggactgcgcgctcctcgcacgccgcccgctgcccggccagaagaactccgtcaccgcgcagggccgcctcgacgccaacatgaccacgggcttcgccttccagttctgcaacgtctccgcccaccccgacctcctcctgcagcagcagcaggcccagtccagcaacagcaacgggaccgcgcccccggccacgcagacgtacctcggccggccctggaagccctactcccgggtggtgttcatgcagtcgtacatcggcgacgtggtgcgccccgagggctggctcgcgtgggacggggacttcgcgctcgacacgctctactacggggagtacgccaacaccggccccggcgccgccgtcgccgcgcgggtcaagtggcccggcttccacgtcatgaccagccccgccgaggccggcaacttcaccgtcgcgcagttcatcgagggcaacatgtggttgccgcccaccggcgtcaagtacaccgccggactcacgtcctgatcctctcttcaaacccttgatggatgtaggcttagtactatacgtagtgtttgcaaccgtatactcctagcactttatatatgcttgttggaacttgctctctgctgctaggagatccaacgggggagtagtgacgtaaacagggttctcgcgtaagatggcaacatctctgttaacctagcctctcacggcactgtgcgggggtatttataggtatctaagcgccctgcgtcctgtgttaaggacgcatgtgccctcagacacctaagttatcctcagaatattcccataaagcagggttacagactgtccaatagtcctactacatgcatggtacctcgtatctgtggaggagaatgtaagggtgggttgattagttgtttgattgggccctttttaaacaaaagtactatgtggaaatggcggagattcaagtcccccagattaaaaccctcatatgttcccg

SEQ ID NO: 3075 - DNA, 3144 bp, Zea mays
  Clone ID: ZEAMA-23APR03-CLUSTER9839_1
ctgcctggacgcagcccaatccgggtcggatcccttctgaattgaaccctggcgtgatgcgcgacagcgcaatgctggcggcgccggcgcccaacaaccggccgcgcgccgccccggcgacgtcccaccccatcgccttctcagtgagacccacaccaacctttatagttgccgacggccaaccgtgcacgagggtgaatcaactcaaactccttagcttcgggtttcccaggcgcagctccgctataatttactggaatgtccggtgtgccaccggactttccggtgcaccagcgaagcaacgactacctgcgtgcaacggtcgattctgacggatgaacagtgcaacacagtaacgcggcaaaagtcagagcagaaggtcagaggggcactggactgtctggtgccgcatgaggacaaagcctccaacggtcgaccaagctccaagccctaacgacagggtgacatggtggcgcaccggacactgtccggtggcgcatcggactctccggtgcgcccatcgccagcagccttctccaacgactacaatttggttggtggctataaataccatcccaaccggccacttcaaggtgtgggagcccaagcaacattccaagtcatatacttgacatatccaagacctcccaaccacctctattcattgatccatcctatagacaagatttagaccgctacaaccaacacaagtgccacaaaagagagatcaagcaaaagagagattctcgtgtgaatttagcaatagagccttgtgagaatcattgagagaaagtgtgtgctacatcttgtgatcattcgcgcgtggagttttgactcccattgaacttcctccaaaagtttaggaggcttgtaaagctagcaagagacacctaagagtgtggtgatccttgcggggtcttaagtgatctttgagaagaagaagagctcgccggccttggtgatcggtggagagagggaaagggttgaaaaagacccgtccttagtggactcctcaacggagactaggccttcgagggccgaaccttggtaaaacaaatcacccgtgtctcttgtgtttattgcttgtgatttgtttgttctctccctttctaagttctcttgcgaactctttgctaaatctttttgtgttgcttcaagttaaattcacatttagagaagcaactccttgcaagaaagagcttgtgttactcctcttcttatcaaagtcctcttgcattattctccacttctagtagtattgctattgattaaattctgcactctttgaaaacaatattcgttgcaagcaaaggacttagttttacactccgataattgtgaatcttgttctaaccactaatcaagggatctagtttggatttagagttctaattttcaggtttcgcctatccacccccctctaggcgactttcactattcatcgttcatcctaatattcgttgttactattcatcaatcatccgatcacccaaatattcaactactcatccatcatgttgtccagctcacctaagaccttccggactaatactcatcgttactattcatcgatcatccgatcacccaaatattcaactactcatccatcatgctgtctagatcacctaagaccttccagaccaatattacagtcatacgaactccggtgactgtgattttctttccagtaagaacttcccatctggtcacccattctagatttctccaagttgagcacgcttaactttgagattctttcgaaccatgcttccaaaaagaaagacgaaccatgtttgtatggataaaccgtcaatcctataaaacctggcccaagataccacaacccactcggactagaataccatagtattctagctatttgggccccgccttactgttgtctcatgtgacacaataggtaggaacagttgccattaacataaacctctgcccaagaatagcccagaaataattcctggcactccactcaaaaatacatttatatttttattttccaaatatatctaaatatttaaattctagaatattctaggaatattacttttcccttttctttttatttctatgattataaaaaccagagctcctccatccaaactcatattccaataattattatttataaattcttatcaaattattccctatctaaccatatcatcccttaagcatggttcatattccagaaaactccaaaaatactcttgtcccatattctgtctgtaattttcctgttcatactaagtcagacgattcattcaccactattctcaccaagagcgaactctactgtactaaaccacaggtacccaactatagataaacccagctaccctctccctctccacacactcaacaccctcagccaaggcaaacccccacccactcagttaccccgctctgccggctacacacatagtgtcgcttcgcctccaatccaccctcctggtaagcacatccactccaccaccagtaatatcacaacaccacatgacacatattctgctcaagactctacccatccatatatcgacattctgaccactatactaaatatttgttgatatatttgctcgtttgtatgtttgcttgttcatgatgcatagttatcggagcattcgtgccatctcatgaaggccatatctgcaagtctacgccagatggtggtgctagaagcaagttccacgagctctcaccctttcatcggttaaagcacgacaagctcactggatccctttgatgcataaattacctatgcttttaaaccacaacccttagcctattattttatgcacgatatgattttgttgctaagagacatgttaatatggccacccaatcctagaactttgacgcaattcatctttatactcctcgacatttttgttacaatatgttttgggaaaaggtgtgagttttcaaaagaaaatgtttttcaaaatgggtatgatgaagggttgtcacccttatcacctttgagtggggtgatcagggactccctggtttgggagggccttaaggtgatggctcagccgggttaggtgtgagcatgaaggattgtccctctcgcctaaggactggtttgtcatcactccttacctatactcttatcaagtacaacca

SEQ ID NO: 3076 - DNA, 1574 bp, Zea mays
  Clone ID: ZEAMA-23APR03-CLUSTER98567_1
aatcggttttttttttttttttttgtttcgtagaatcgcagttatctatttagagacataagtattaataatattctatatacactgattttttttttttttttgctttttttttttcagtgactgaggcagcaaacatgttgttggctaatgcaaaatgtacgaatacgcaacatcatatacacatgtagcggctgtgaaaatggcaacacgcaaaaaaaaaaaaacgggtcaattcgagaaggcgcgaagagaaaagtaaaagaggaaaaaaaatggcattgagtggccaagaaatcaaaggcatacgtccaatcgtatacgaacaaggcgaacagtacggcgaggcagagcaggcgcagcctttttcttaatcaccacggcgccctgcctgccgtcgtgcccgtgcgagccctcgtggtaggcccgcggcggactgccgggcgctcagctcagcgatagatgcgcggcgcgggaacgcaagcgctgcgcctgcgctgcacacacgcgggcacggcacacggcagcgccggttcgcaggccgtctctgcccggtcggccacgcgccggtccaaggcacagtggcacacgccgcggtgccggtgctggtgccagtgccagtgccagtgccacgcgcgcgcacgggcgggcccgcggcgctggtcaggtcgtacgctcccggcgtcgcgactcgcagccattgggcttgggcagcgggcagggccgcccttggtcgtcttcgtctccagttggacgagcgtcgtccactcactgcatgtgacgacggtcacggcatgtagagctggttccggcacttgcaccgccacgcctccgggtagtactccgtggtgaccaggacccccggcggcacggacacgtgcaccgggtagcatgggttgcagctgccgcatttggacgcgcaccgcggcggatgcgagcccgggccgcccgacagcaggcgccgccgtccggtgtaaaccatctcctcatcggtcgtcgccacctgaccgccgggatgggctgctgccgctgccatggtcctcccgccggaatctgaagcgggggtgccgccacccaccagtgtccccgcgagacgacggacgccgatgaaggcgaagcagagggagacgacgagggcaaccaccaccgcgacgccgacggccagcgtccgcgcggatccggagccgccactccaccacctcgtcggctgcctccccatgggcaacggcggcggcatcacctgaactcccacccgccgtccgcgccgtacctctctctcttgctttcgcttcgctagcaccgccgaccaggccgatctgcgctgccggacggaacaagacggccactagctagctgcaagcgctaggcctcggaggtaggtggattagatagctctagctctgtgtctcaagctagcgtggatcagggctcgcgcgctcgagcggctggagaaggaagtagctactactactatagcaaggatcggagaggcaacagccaaatgcgtatccgaaacccggaaacggccggggggcctggcacgaacagcccggccggcctcgaggtacccaatg

SEQ ID NO: 3077 - DNA, 1721 bp, Zea mays
  Clone ID: ZEAMA-23APR03-CLUSTER99176_1
tcgagtttttttttttttttttttatgtgaaagattaatcgcatggatacattttttttttttttttgctcagaacacgctacctcaaaacgacgctaaactgagtacatgctactacactagcatgagtcagtgacacacgttttacaaactgaagcaagacaacaagtacaccatttagcaacaaattaaagttaaaaaaaacacgctagtgtaaagtcagaactcggtacagacgctgcaagcagaaactctccaggaacaaaaaatctcaagttgcacttgtcactgcacccaccaactaaaaggtctgaaaactgctccaggttacatttgctcaacgatcctcgaaggagtgtatatatcctactcaacgtcaccacctgctgcttccagcttcctcagctgaggttacaaactcggtgatcacccctgaaatttcctcaaaggcatcgacctgaggccatcggccgccggagtggtagatgaatttggcgtcaggcaatgcagccgccactttcttcccctcgtcgatccacatatctgaccaagaacccgaccacagcaccagcatcggcagcctcctcacctcctccgaagagaccctccactccccaagctggaagctgtggttcatcgacttccatgcctcgaccaccgcctctgccttcccctccccacgcatcgctgctcggtacgcctctgcctcctcggcgccgaccccccggacgcagcacagccgcaccaggccgcggaacagcgccggcacccggagcaccagcctccccagcacgggcacgtcgaagaccgcggccgggaacgccggcagggacgcggtggcgtcgaccagcgtcacgctccgcacggcccccgggttggcagacgcgaacgcggccccggccgcgagcgcggagtcgtggaggacgaggtggacggggcccacgccgagcgcctccgcggcgcgcgcgacggccgcggccgcctcgtcgggcgcgtgcggagaccgcgccgccgaggcggctggttcctcctcctggtacgggacctcgccggtctgcacgagatgctcgaaggcgtggaacacgcctcggttcatgatctcccgcagcgcgctggtccgggcgggcgcggtcgcggcgggcgacgccggggagaggccctggcctgggaggtcgagcgccgcggcgtggacgccgcgggaggagagcgacgagaggacgcggcggaaggacaaggagcccgcggcgaggccagggaggacgaggacgcggtgcgcgggggagtcgccggcggcggccgtggggcgggaggtcacggcgaacaggccgggggctggatcgagcttgaggaagcggcctgcggcgaggtgtccacggaggagaggcgggagaggcgcgggagaggagggaggcaggaggtgggggaggaggagcgcgaggagggagacggcggcggcgaagtagaaccagaatgggagcgcggaggcgagggagaggggccggggccgcggcggcggcggaggtggagatggtcggggagccgcatcttcatcggggaccgcgtcagtgacggggggatcggccgccggcattgctggttcgttcggtttgctcgccggttggcggcggcgcgtgaggatgagtggagtgggaactgggaagcgtaaagggaaagctgcccggtgctttgctacctttgttctcgtgctgactgctgaagtt

SEQ ID NO: 3078 - DNA, 1537 bp, Zea mays
  Clone ID: ZEAMA-23APR03-CLUSTER99294_1
ttttttttttttttttgtatggggctttgtggctaactgttgtcttgattagagtctgattaagaagcaacagattaaagcaacaccactgcatcgtctgtcgtttcacaagcacctgagcagagttagctctttggccgccgacggcggggagggctcgaagtcgaactcgaactcgccgccgcactgctgatccatctgccagccctggcggcccaggctcatctccaggctcggtggcgtcgcaggcggcagtccaagcaccctgacgctcatcacgccgctacagtgctgctgattgagccactccgagctggagaccgtgccgctcgtgttgttcggcgacggccgccgttgttggaagccgccgccgcttcctgcgtggtcgtcgcgagcctcgtcctccacgagacgatgtgccgcgatggcgtcgtctcagttccagccgtgatgacggtcgacgcgctcattgcccaccttgagtcccggcggcgtgcacgaagtgcgcgtgcagcgcggtggtccaccgcatccgcggcgccctggagcttctcctcccgccggcccgggcggcggcgttgcccgacgagcccttcttgaacccgtgggctgccgtctggctcggctggtgcaactgcagccggtgccgctgcgcgtgaaggttgtgctcccgcgccgccgcggccttgtcggcgtcctcctccgccgtcgtcgtcgccgccgccgcgtcgtcgtcgtcgagctcccgccccggcacctcctccaccaagcgcgcctgccgttcactgagaccggttaggagcaggaccaccatgtgtcggggacgcccacggcgtgctactgctgcacatggtctgtgtgcgccccgccgccgccgtctgctgtccatctgcgcgtcgcgcttcacatgtgccagtgtaagatccttcacgttcatcagctccagcacctactttggtgttgctctctcgtggccgccaaggagctcgacggcgtgcacgaagtgcgcgtgcagcgcagtggtccaccgcatccgcggcgccctggaacttctcctcccgccggcgctggcggctgcactgcccgacgtgcccctcttgaacccgtggcccgccgtctggcttggctggtgcagctggcgccgctgcacctggcggaggttgttgtactcccgcatcgccgccgcgttgtccgccttcttcgtcgcggccgccgcctccgccgccgtgtcgtcgtcgagctccaaccccagcagcagcctcggctccggtggcgacggagggctgatgtggagggagagatcaggagctgctgtcgtcgtcgtcgtcatcgtggtggtggtcatggtagcggttggggtttgttgcaacgtcgacgacggtgtgctagctgagcttcttggttgttcaaagccgagaaggaagagggaagcttgcagaagactaagccacagaggtagcaatggccggctgcggtcgactcgagcgatgaggtcatgagtggcatatcattcttgtatatatatttgggtttcccg

SEQ ID NO: 3079 - DNA, 1756 bp, Zea mays
  Clone ID: ZEAMA-23APR03-CLUSTER9958_2
aactcaaacccgtaggtttttatccacgtgccgccgcaccggccaaccccgcgcccctcgaccgtctccgtcgccgcgccacccgcaccgggacccagtatggccgcctccggcgcatatccgggcacggcgttcaagatactcctctcctgccccgacggcctccctcgctcccgcgtttcggtgaagtttggtcggtcattcgacaggattccccatcctgatgcagccttggaggaatctataagtgaggtgtgggaccaaagccttcagcggaacccatatctatacagcggtacaaagtttcgggtatgtatttttagctctaccttggtatgctcgtttttttctgctccgttgatacttgaagtcctgaagatgctacaatttactggtaaacacgtatttaactaaagaaaactggaagcttcttgcatgttaagtgatttggtgcatgctttatagaaagacaatctctctgtatatgtatctgttctactgcattcaccagcaggtagtagaatgtaaatactgacaacaatcaagaatttcagtatggaggaaatgccttgcactacaaagatgactcagatcatgatcttgagtactgtgtctcacttcatttgggtctcacagactacaggacatttgtgggaacaaatctcaatccattgtgggaattttttttggttccatctgaagatgattctgtacattgccaacacttgtcagatgcactgggaaatggtgctatagttgaaacatctgacaaaaagattattgtattgcaaaggagctacaatgtggcggactatccaggatactatgttttccctggaggacactcggagccgcaagaaattggaatcatgggtcatcaaactgatgaagaagactttgctagtctcactgaacgagtttcacaagaaatgtttgacggagtcatccgtgaagtggttgaggaaactggagttcctgctagctccctaactgatcctgtcttcattggagtttcccgccgagaagttaacgttaggccgactgcgttcttttttacaaaatgtaacattgattccagtggcgtaagcgagctttattctagagctcaagatggctatgaatctactaaactctacacagtatccgttgaagagctacaaggaatgaggcagcggatgcctggatgccacaacggtggtattgctctgtatgagttgatgaggaatgctgcaaaaaaaagtgaagatgtcattgatgaatagttctgatggtgttattacaccacaaacaagtgtggaggtattcgcatctcgtacaaacacccgtgcagaacactgcatgtgacatccatcagattgctgttctttgcagtagatatgtgccatttccatgtttgttgagcctgacataggtctccttagaccgctgcataagtgcccacaaagagcatgaagcttaaagtttcctctgaatactaccggaataaatttcatctccggatgtaccaccaaaggaggcacaccagagcggcatcatgatgctaatctacatggtgagatgacccgtggattgtaatgttctttcaggattgaatttcctgggcaagtgatgcctgaatctgtcagctgttcttctgttggtttctgctgtagcggtgtactaggagtatgtaggaaccgaaggtgaagcttacattactttgctctgagaacgtttatatacttgttacctttggtatggatatactagttcgtgc

SEQ ID NO: 3080 - DNA, 1719 bp, Zea mays
  Clone ID: ZEAMA-23APR03-CLUSTER9958_3
aaccgtctccgtcgccgcgccacccgcactagtatggccgcctccggcgcatatccgggcacggcgttcaagatactcctctcctgccccgacggcctccctcgctcccgcgtttcggtgaagtttggtcggtcattcgacaggattccccatcctgatgcagccttggaggaatctataagtgaggtgtgggaccaaagccttcagcggaacccatgtctatacagcggtacaaagtttcggtatggaggaaatgccttgcactacaaagatgactcagatcatgatcttgagtactgtgtctcacttcatttgggtctcacagactacaggacatttgtgggaacaaatctcaatccattgtgggaattttttttggttccatctgaagatgattctgtacattgccaacacttgtcagatgcactgggaaatggtgctatagttgaaacatctgacaaaaagattattgtattgcaaaggagctacaatgtggcggactttccaggatactatgttttccctggaggacactcggagccgcaagaaattggaatcatgggtcatcaaactgatgaagaagactttgctagtctcaatgaacgagtttcacaagaaatgtttgaaggagtcatccgtgaagtggttgaggaaactggagttcctgctagctccctaactgatcctgtcttcattggagtttcccgccgagaagttaacgctaggccgactgcgttcttttttacaaaatgtaacattgattccagtggcgtaagcgagctttattctagagctcaagatggctatgaatctactaaactctacacagtatctgtggaagaactacaaggaatgaggcagcggatgcctggatgccacaacggtggtattgctctgtatgagttgatgaggaatgctgcaaaaaaaaagtgaagacgtcattgatgaatagttctgatggtgctattacaccagaaacaagtgtggagctattacaccagaaacaagtgtggaggtattcgtatctcgtacaaacacccgtgcagaacactgcatgtgacatccatcagattgctgttctttgcagtagatgagccatttcatgtttgttgagcctgacataggtctccttagaccgctgcataagttcccacaaagaaataaggtagtgtttggttgaagaaccaattagaacggagccgttctatcccagttttgttgttgtttggttacaaagtaactagaacgtaatgacttcaattagagaatattctcctcagatccggaaccaccccgctccaaaaaaatcaaccggacggaaccgcttcgttcccagcccgctcgcacagtcacgctccgttcctaaaatcagggatggaagggcttcgttcttagaatcagggatggaacggatccgttctacttggctccttaaccaaacactacctaagagcatgaagcttaaggtttcctccgaatactaccagaataaatttcatctccggatgttccaccaaaggaggcacaccagagcggcatcatgatgctaatctacatggtgagatgacccgtggattgtaatgttctttcaggattgaatttcctgggcaagtgttgcctgaatctgtcagctgttcttctgttggtttctgctgtagctgtgtactaggcgtatgtaggaaccgaactaccgaaggtgaagcttacattactttgctc

SEQ ID NO: 3081 - DNA, 2095 bp, Zea mays
  Clone ID: ZEAMA-23APR03-CLUSTER9980_2
caccactacactcaagggttggcaccgcacggcaagccgcaagcggcggcgtgggccgtgggctgccgaaccccagtccccaatcggcgtcggcgcgtgggaatcgtcagaaaaacgcgacgaacagccgaaccggtcacaccgaaagcgcagttgcgaggctgttctccgctgtcacgtctctgcccgcatgtcccctccccctccaccgtctctctaggctctagtagtctagtcctagtcccccaccggccaccaccaggcaccacgccagccagccccaccactccatccgagtcagagtcttcggctccaagccgccccactgttcctcctcggctccgcgcaccgcgccggcagcgggaggagaggggtcagggtgacgccgatgcaccccaagctgtcgcgggccgcccgcaggctcctctgctgcggcagggccgcctccccggaggacctatctgatgaaggaagtggatcattgaggtgggtgttctcattgagagagcttcgatcagcaacaaacagcttcaattacgataacaacattggagaagggccacttgggagtgtgtattggggacaagtttgggatggttctcagatcgctgtcaagaggttgaagagtgcaaagaatggcacagaagcagaatttgcttcagaagtcgagatattgggaagaataagacacaaaaacctcctgagttttcgtggatattgtgcggatggacccgaacggattctggtgtatgactttatggcaaactcaagtctctatgcacatcttcatggaccacattctgctgagtgtctccttgactggcggaggagaatatctattgccaagcagcagcgagagccagcgtgcgagcgcgatgccgcactgcgatgtatacagtgctgggatcatactgctggagcttgcaagcggcaaaaggccagtcgagaggtcgggttctggcaaggcttgtggaatccgaagctgggtgctcccgctcgcaaggcagggcaggtacgacgagattgcggactcgaagctgggcgacaagttctctggacctgagctgagaaggatggtgttggtcggtctagcgtgtacacgttcagaacctgaaaagagacccacgatgcttcaagtcgtgccgttgctgaaaggcgagtcgaaagaaacgcttgttaagcttgaaagggaggagttgttgttcagcccagactcgacgacggtgagttcgcagggaacaccgaccccagatgggagcacggactctgcgccgccgaagaaagatcaagaactggttggggcgtgagttgcgatatattgctgttctaggcgattgtagagtgcgtatttgtggtattgatgattggtctgtgcggtttgacgtgaatgggaattgtataggcattgtttttttttctatgttttttttctgtcctttttgagggagtaaggaagagccagcgggctggagatactcccattggcctaattttgagaaatcaggcccaagcggtctctgttgctttgcaggttcttccgttcttggttgattatgcttcgtccatcgagcttgtcgccgagtcgggccgctgccttgcccgttttatctgatccaatcaaagctgttcataaggagtacatgcatgcatcatttctgaagaaactttgcgcatagatcatttccgatttccgaaggaacttttccttctcttgttcatatatgcagtgcattcagctcattgtcattttttttggaagagccctcccatgaccatgatgcagtgcattcagctcactgtcagagctccgacgaagaaggctagcagcagacaacagtataaaaatgaaagatgtcggcgagtattacacgaagcgcagacgctggaacaaccgctcaataccatcatgcacgacattcaggcctatccactaacaagttgcgagatcgaacaaaaatcagtagcatctattcttgacatccgtccaccacccaacaaaaatgaagatgctggtaactgcgaccaatattacttcgcagaatcattcatcatttaactccacatatcgctttttcagttttcaggttctcaactt

SEQ ID NO: 3082 - DNA, 932 bp, Glycine max
  Clone ID: GLYMA-23APR03-CLUSTER100252_1
acttagttaccctttagttttggttccaaattttcaagtaaaaaaaatataggataggagcttgcagtgatggaaggaagaaagtggtagatgcagcattagtgaaagatgagcacaacacggtttattaagtgtgtcacagttggtgatggggctgtgggaaagacttgcatgcttatctcttacactagcaacactttcccacggattatgttcctacagttttcgacaatttcagtgcaaatgttgtggttgatggcagcacagttaacctgggattgtgggacactgctggacaggaagattacaacaggcttaggccattgagttacagaggagcagatgtgttcttgctggccttttccctcatcagcaaagccagttatgaaaatatatctaaaaagtggattcctgaattgagacattatgccccaactgtgcctattgtactggttggaactaaacttgatttgagggaagacaggcaatatttgattgatcatcctggaaccacagctatagctactgcccagggagaagaactgaagaaggcaattggtgctgctgtgtacatagagtgcagctcaaagactcagcagaatgtgaaggccgtgtttgatgctgcaatcaaggttgttttgcaaccacctaagtccaagaaaaaaggaaagaagaagaacacgccttgtgttttcctctgattcaagttgttgaattgcaattgcagttgcagtggtattgttcaagttaaattcccatcctgtaacattcagatccttcttcccgggattctctttttcttttcattttgattcatgaatccattagaacatataagtactgtaaactatactatattgttctctaatatgtctatttgatgaaagtagactcaactcaagattatatgatatacatcacataacatgctt

SEQ ID NO: 3083 - DNA, 1607 bp, Glycine max
  Clone ID: GLYMA-23APR03-CLUSTER100518_1
tcacataggagagacacagatgttgaaggtgtacactgtgacttactgagaaaaggaacaacattatttgattagctatgtcatcatccttaatgttaccagctgcttcaatgctgagaccatgtaccacttcatcatcatcatgtacttcatcaagaagacttgctctctttcaccttgtctccactggtagcattgctctcccacaagctcagttatttggtgcaaaaggaccagagttgttaagagtagtagaggcttctgctgcagaaaaactagcccaaccagagaaagatttgtttgactgggtcaaaaatgacaacagaaggtttctccatgttgtgtaccgtgttggagacttggagaagactataaagttttacactgaatgccttggcatgaagctattgagacaacgtgatatacctgaagacagatattctaatgcttttcttggatatgggcctgaagattccaattttacagttgaacttacctacaattatggagtggataactatgacattggaagtggctttggtcattttggtgttgcagttgaagatatttacaaaagagtagatctagtaaaggcaaaaggaggaaaggttacaagggaacccgggcctgttaaagatggcagtgcagttattgctttcattgaagatcctgatggttataagtttgaacttttggagagaagacctacatctgaacccctatgccaagtgatgcttcgagtaggtgatcttgatcgtgccatagccttctatgaaaaagctgttggaatgaaacttctccgcaagagggacaaccctgagcagaagtacacagtagcttttatgggctatggtcctgaagacaagaatactgttctagaactgacatataactatggcgtcactaattatgacaaaggaaatggttatgcacagattgccataggcacaaatgatgtctataagactgcagaagcaatcaaattatgtggagggaagattatccgtgaacctgggcccttgccaggtatcaacaccaagattgtagcttgcttagaccctgatggttggaaattggcatttgttgataatgttgattttctgaaggaattagagtgacaataggcatggttctagatgactagatcccttacatctccactgaaatggtagtctcaacaattttgtcagtgaaatcttacagtggcactgtcaactctactccttaataaagtaacccctccaatcactgtgtgagggaaagggaaagaaaaaaaaaaggcatatatacagcaatctcaatgtcaatcgtatttttttttataatgttactttgacacggcaattcaacatatactggatcccctcaagccaaaactgtttgtctcctttacttccacattcaaattctattgtcctgtctgttgtttttattccaaaatatgccctcttttcactgatgtcttccctctcccttccgggccaagctgggatatcattgcaaactccagggactatatatttcttctttttcgggaatgttcctgccatatgcttgcttttcattttgactacaacctgttggcagtttggattaacccaaataac

SEQ ID NO: 3084 - DNA, 965 bp, Glycine max
  unsure (1)..(965): unsure at all n locations
  Clone ID: GLYMA-23APR03-CLUSTER10072_1
agaagacaatcaagcagagatggaaacaacactcgtgcgctttctttactatttgtccacggcaatattgttttggtgctgtgccaacattgtgcacgctattgaattaccaaactacacagtgatactgcctgaagaatcagattttcagctcagactctacaatgaatcatcatggatctcagcccgagtttcaggaacttccttcgagcagtcctacaagcttggattttccaggttgtatcaatatattcacggtgccaattctaactcttcaaaaatcgcattcactgctccagtcctaacgagtgtcccctcgtcaccccccggggatggctacatcgtaagaatgttcgtatcgactcactttcaagggaagcccccgcaacccaatcctgaactgaagttgcgcatagagaagtggaaaactcagtgcattgcagttagaaagttcactgggtatgccaaggatgacaacatcaacaaagaaattgaagctcttgtaacaaccctaaacaagaactcggcaacaatacaagacacgagcttctataccattgctaagtacaatgcttcttctcataataccgctgatcgcttaaatgaagtgtggattaaagtgtcaggagtcaggactgaatattgctaacggttgtttccatcggttaagtgcatgcagtatcctgttttagtgtcattgtgcttggagtggcttgtttcagtggtgttatgtgtgaaatgtgttgttttcgttgtgggtccaatgtaaataatgctagctcccgcttggaatatgcatgtatgacttgaatacgcattgctattaatagtaaataaatatagactttaaatatgtttttcatattaaaaaaaaaaaaaatttcatattgttatctattaatttttttttaataaaaaaaaactgttaattactatattgttcctaaaatagtnnataataaaag

SEQ ID NO: 3085 - DNA, 1879 bp, Glycine max
  Clone ID: GLYMA-23APR03-CLUSTER100776_1
tcagctacgtaggccccccccccccggtcttcctttctctctctctcctccttcttgaagtatcaactttcaatacattatccactatactgtgtgcacaaatccatgacttcatattctttaagtggctaacaggcaacgagtgctcggtgaaggaagaagtgagcatcatatatattgctgctattgtctgcaagtgcaagcaaccttacaacaacacagaggagcaatggaggagcaaaaccgatttggagtttatagaatgaaaggggagttttctgttgacttgaagcttggtcatcatgtggggaattctggcactgaatcagcactagccaacaagtccaaagatgctgctgctgcaggagtttccaaaatggcatcctcaccttcagggtcttctaagagagctagagccataaacagcacatccctcacagtggcatgccttgtggatgggtgcaattcagatcttagcaattgtagagattatcataggcgccataaggtgtgtgagctccattccaagaccccagaggtcacaattggtggcttcaagcaaaggttctgccaacaatgtagcaggttccattcgctggagcaatttgatgaaagaaaaagaagctgcagaaaacgtttagatggacacaatagaaggagaagaaagccccagccagaacctctctcgagacctggtagttttttgtcgaattaccaaggcacccaattgctacccttctcaagcccacacgtatatccatccactgccatagtgagcccagcttggagtgcttcacttgtcacttcctctgcagatgctaggttgcacaaccacaaccaacaacaacaccaccaccaccaacaagacctttttcttggatcttcccacaaagaagggaagcaagtagcattcttacacaacaaccatccctccacagctgcagcactcagcagccaaaccccgccaccttttccatcctcttccgttcgccacacccttctcaggaccgaccctctatcagaaacttgcggcggagctagaagcaaaatgttctgtgaaagcttaacaacaacaacaactaacaataattcggtgcatgacactactccttgtgctctctctcttctgtcatcatcacagacgcacacaccagggaatggcttgaaccaaatggtgcagcctcctccctcaatgtccctcatgcagcccttaggcctgagcttgcaggataataacagcttagagtctgtggatcattgttcctccatgtatagcttggcttctgatcatggatcccagtgcaatgaagcagcccctcaactgtttccctttcaatgggaatagatattaattactttatctcaaggattattcaccactttgtttgttcattcctaatgaattctttccccccaaggactagttaattcattctgatttcaccctccctttataatgaaggcaatgcctatggacaatcatggtatttctatttgtatcttagggagagaaaaaaaagctcaacaattttacataagattcatactgggagttgtaagaggaaagtgtatatgtgtaatcctttagtgggaataacgttacgtgtaacccacaaaatttagtcaatatcatggaatttctatttgtatcttcaggagagaaaaaaaaactcaataattttacataagattcataatatatgggagttgtaaaaggaaagtctatatgtgtacacctctaatgggaataatgttagatggtaactgactaaatttagtaatttacatggtaagttccaatcaagtccaacctcttattaggttatgggcttggtaatgttaaatccgattcttattttcatccaaaaaaaaaaaaaaa

SEQ ID NO: 3086 - DNA, 1415 bp, Glycine max
  unsure (1)..(1415): unsure at all n locations
  Clone ID: GLYMA-23APR03-CLUSTER101083_3
ttagatgtatcagatccaaggaacaaatgacggattatgcnaacttctgctcaacatgtagaacgttaacgtctcnggaatttgttcactgtgcactctcaacagattttattaatgcaatatttggctctttngtcatagagagagtacaaaaacatgggatccaacatttgtcaatcatngccacaagttttctggaaccatgtacagtttctttacctagtggactcgtgtcattttngtcttcgggaaggtccttgtgctcattaaaattatctgagaaccaccatggatggactttngccaaagatctttttgtgactcttctcaatctttcatctggcatatctgtccttgacctttctcggaatagaatatcaggatggcttttttactacaggagatccttgagtggttcacatctgtcgtttggaaatgaaagtccttgaaactgttgcgtgtactcaatctgagggaaaacaatttaggaaaagatgatgtacaacgtcttagatatgctcttcaacatgtgcctaacttggaggagctggacatcagtggcaattcaattgaagatgaaggaatcaggaatttaattccctattttgttggagcatctgaaacgtgtcctcacataacttgtttgaaattagagaactgtgatctgtcctgtgttggagtgaataatctcctacatatcctttctaatttcaaaggaccattaaagtctctttctattgctgacaattaccttggcagtcaagtagctgaagcattgggaaaattttttagcaccccaatcgaagtacttgacattgcaggcattggattgggttcttacggttttcaagagcttcaaagtctaataaaagagaaggttaagctggtgaaaattaatataagcaaaaatcgtggtgggattgcaactgccaaatttttgtctaaactcttgtcccaggctccacaactagttgatgtgaatgcagccagtaatcttatgccaatagaatcactggccatcatctgctccgcgttaaagtttgcaaaaggtaatgttcagcaagtggacttgacaggacatatatgggactataagccagagcatgtttccccttacactgaatttgtacataatggattacctatattgattcttccatcatcatcagcctctgctgcacctcacgaccatgatccttagaattagaatttgtgcgatttcaatttatgttgcatggcatatgcaattaataggtgtttttgtttcttcctttatcactatgtatgctagcatagtttcatgcataatgcttgcaaaaaaattattggctgatccatcatgccttgatggttcattgtactacaaagttagggaagggaaatttaacttttgtacatattgatcatttttttcc

SEQ ID NO: 3087 - DNA, 1158 bp, Glycine max
  unsure (1)..(1158): unsure at all n locations
  Clone ID: GLYMA-23APR03-CLUSTER10125_3
gagcatggttgtggccttagcaatttaggggaagagaagaaagtgctgaaaagagaaagttgttatccacaagacaacgtcatcaacattacacaaggcgcagggtggtctctgtgatggcaacctctttctctccgacagcctctgtcggctccatcatcttccaaaaccctcccaaaggccttcttcttctctcccagcagcagcaacaacgctccttcgcctcttctgcaagctatgcaactctcaagctccctcgcgccttcgcactttctccaagacccctcctttccaaagggagaacaacacttgtgagggctgctactatcgaagaaattgaagccgaaaaagccgcaattgaaaaagatgctttccataaggacagggagagcaaacccatccatgcttgacaaaattcaagnggaatactatggaaacccangtagcttggagaacatcgctcaaantaacacctcctgatgccagttttttttggtacagccatatgacaaatcaagcttgaaggctatagagaaagccatagttagctctgatcttggtatgactccaaataatgatggagaattgatacgactgagcatcccacagttgacatctgataggaggaaggaactatcaaagatagtggctaaacaagctgaagaagggaaggtggctttgaggaatataagaagagatgcattaaaagcttatgataaacttgagaaggagaaaaagctctccgaagataatgtgaaggatttgtcaagtgatttgcagaagctgacagatgagtatatgaagaaagttgacaccatcttcaaacagaaagaaaaggagttgctcacagtttgatgctttgttgcaaaaagtaaatgctgagttctatctaaagaaggtcaaattttgtgcctactttgctccagggttggatgatgaatgcgcatgttcattggttatacagaagacaaacttttgaattaaatagatgtttttcaaattggaaaggtgagttcatgtctgtaaattggatttatttcacgtaattcttcattgaaattagaccctcaccgaaccattgttgtcaaactcttgaggctatggtagactcttacaagtttatgattctaggtataaaaatcaagttagctgactgtc

SEQ ID NO: 3088 - DNA, 916 bp, Glycine max
  unsure (1)..(916): unsure at all n locations
  Clone ID: GLYMA-23APR03-CLUSTER10139_3
ngggtatacgggtaatgtgagtagcgctagtggcatatacgagacgataggcggcttaagctaggaacgtatgtatggcggaacgaaggagcgttatgagagtcttataggtcggctccgtgggcgtggtnataggtggatgtagaacgatacagaaaacggcgacgcgtacgccgccattgtggagtaggcacggcgccgttgcggaggatggggataaggcgagtgtgcgaatttattaggaagcagaggggctggatggagaagtaggtccggcggcgaactgcttgggtggcccgtcggagagggggcttgtttcgttgtcgaggagtagtgaagattgcttaatggggaggggcctcatgttcggcggtcctgattttttctccagatgtttttcttccgtcttgggagggattaagtcggttgattcacatgaatgggtcaagcaggaaggctcagtcgccaccattggtatcactgaccatgcccaggaccatcttggagaggttgtgtatgtggagctgccagaacccaggtggcacagtttcccagaagtctggcttcggagccgttgaaagtgttaaagcaacaagtgacataaactctccaatctcgggggagattgttgaggttaacaaaaagctcacagagacacctggcctggtcaactcaagcccatacgaagatggatggatgatcaaagtaaagccaagtgatccatctgaattagattccttgatgggtccaaaagagtacacaaaattttgtgaagaagaagatgctagtcattaaagtttgaattgaattggctcctgcagttatatgtgggactgactgttctttacatgtttatgattttattatcttctgaacagttttttaatatgcaatataactggttctttccgtttac

SEQ ID NO: 3089 - DNA, 1758 bp, Glycine max
  Clone ID: GLYMA-23APR03-CLUSTER10211_1
gaattcttttttttttttttttttattttgtcaagcaaacatgaaatgcattttaataatatgcttcaaatcctttcaacttatgtattaataggtcatacaaccatcaatggtacatatgagagaactagatgtatcaaataagtccctatataacatttattaagaaagtaaatgttatcccaatgtaaattatgttgcttgtgattatatgtatctcaatattcatagcaatgttgtaacatttaacaaaatcaaatttctccaaatgtcagattttggccgtaacctgctccttcatttcaagcaatgcatcttcaaaacacttggcaagaaactcaggatcaggaatgatgtctttggccacctgcacttgcatgtctgctcttccagcatagctcaccatattcaaaatgagagcatgaggcaaggcagaattatttgcccttaagaacgttataggattgcctccaatcataatctcctcttgcgggccaaccacatttgagatagtgaaggaagtgtggcagagtatccgataatttagaaggctagcaaactttggaccaagggtggacattacaaaatccccaattttgtatgagaaactggcttctagagatcgtttctttctgtcaatcattgccttagctctcttcagatattctaaaggatctgaagtgttggttctatggtaatatataggcaagagaatcataccaaatttgttaccccaccttgctcctgaattacttctcatcatattggataattcctgtaatcctggatgctttcttaaattaaccatagctaaacctgttagctgaacaccatctcgcagcccattaggtgctcgaaagtctaggtatcttgatatcccagatgatataactgcaaatagaacatcatttatggtcgcattagcagcagtcttgacggtcttcatgtcttctaaggagaaagtggcagtagctatcttcctgggccagagctcaaccccagcgccaccggttaaggcggatttggggtcacgaatccacaaacacctgaggatgaactcgagggcaaagatgaaacaaaaccagagggtagcgaggagattccggaaattgatgaggttagttttagaggcagaggtagaggcagaggtagaggcagaggcggcgatggtagggagggcgtttgggttgttgagtttcctgcagctggcgagaagcatggacatcaaggaaatcccatccccgagggcgtgatggattcggaaaataacgcacttgtgggccttaagaagatggatttcccacaggggcttctccatgctaagcccatcgctgtctatggataattcggccaggtacttgttgatggccgattcatcctcctcctccctctcgcccactgcttcctctattataagcacgtgccgatcgatgtcgatttcggtgggccgccagtgctccactcctccttcgcctcttaccatcagactcgtgaagcgtgggtgttgtagcatagtagagttccggacttgtgatttcactagctccgcgtcgatggggttcttcagccctatgacgcagtggattacttgtttcatttctgcctgcaggaacagcctccccgccggggttacagcttcgtcccccctctcacccatcactctctctattcacacccacgcttccgcggacgcgtggatatatctctcccccccccctattatttcattcctactttagttaattctataataaaatg

SEQ ID NO: 3090 - DNA, 1347 bp, Glycine max
  Clone ID: GLYMA-23APR03-CLUSTER10337_2
aagatttttatactgttaactagccagaaatcatcctagatatgacttttaaaatagttgtccttaaagttaacctacttattatacatgataaatctgtgattagatgacagtgtaaatgcattcttattaaattcaaaaagaattagtccattctttttgtaattctttgattttaaatgtgttcctgatattatttcttttcgtgaattttcagtagaattgtcatccaattcatttctagcttacaaatctgctaaggtgtttgttgctggtcaccggggtcttgttggctcggccattggtcgcaagctcacccaacttgggttcactaatctagtcttgcgctcccatgccgagcttgatctcactcgacaatctgatgttgaagccttctttgcttatgaaaaacctgaatttgtcattgtagctgcagccaaagttggtggcatccatgccaacaacacctaccctgctgatttcattgccatcaacctccaaatccagaccaatgtcatcgattctgcatatcgcaatggtgctaagaaactgttgtttttgggttcctcttgcatttaccccaaatttgcaccccaaccgattccggaagatgctttgcttactggacccttagagcccacaaatgaatggtatgccattgccaagattgctgggatcaaaatgtgccaggcttacagaattcagcataagtgggatgcaatttcgggaatgcccaccaacttatatggaccatatgacaattttcatcccgagaattcgcatgtgttacctgctctcatgagaaggtttcatgaggcaaaggtcaatggtgctaaggaggtggttgtgtggggcaccggaagtccattgagggagttcttgcacgttgacgatttggcagacgcggttgtcttcatgatggaaaagtatagcggactggagcatttgaatgtagggagtggaaaggaggttactattaaggaattggctgagttgatgaaggaagtggtgggatttgaaggggatcttgtttgggattctactaagcctgatgggactccaaggaagctgatggatagctccaaacttgcaagcctgggttggacaccaaaagtctcactcaaggatgggcttgctgatacctacaagtggtacttggagaacgtaaatctatgattcagatggttaagcagaatgtgccatgtcaaattttataggtacttgtcatttcacaacgaagaattttttgttaaaaaaataattatccagagaacagtacttgaccaatttttctgtaccaattatgtcatgtgcaatgaaaatttcagtgctttttttcgtgttttc

SEQ ID NO: 3091 - DNA, 857 bp, Glycine max
  unsure (1)..(857): unsure at all n locations
  Clone ID: GLYMA-23APR03-CLUSTER10337_4
acctgaaaagaagataaccaaaaacacagaaatctccaaaacccaaaagaagaaaaccaaaaacgctgaaacccccaaaaccgaaaagaagaaaaccaaaaacgctgaaacccccaaaaccgaaaagaagaaaaccaaaacccacgcgtccgccaaaaccgaaaagaagaaaaacgctgaaatccccaaaatcgaaaagaagaaaaccaaaagcgctgaaatccctctaaccgatggcaaaacgaagagggatagagaaatcgccaaagaggagaacaagaagaagactaagaaacccaagctcagcaatggcacttcaaaacagcgagacgagggatccaaaaagggagtagcagaaggaaaaggagaagaggggaaaatgaacgtgtttccgatgaatcgcatcagaacgatgattaagggcgaagatcccgatatgcgtgtttctcaggaagcattgttggccatcaacaacgctgtggagaagttccttgagcaattctcgcaggaagcttatgctttttgtgttcgggaccgcaagaaatgcctcagctacgatcacctagcacatgttgtaagtaagcaaaggagatatgactttctctctgattttgttcctgagagagtgaaagctgaggatgcattaagagagagaagtgcagcaggaacaggaggacnctaaaaaatntaaagtaagntagnggagaatataaacttatacttttatttaatcatgtaacatttttgtaatggaaacatgcatcatgatgagtaatgctgtactttatgtttccatattgtatttattttagtaatcctattgccgtaagtgtatatgatttttcagtttttatgcg

SEQ ID NO: 3092 - DNA, 1274 bp, Glycine max
  Clone ID: GLYMA-23APR03-CLUSTER103725_1
gcacgagaccattgcctagaacatcctaatcgaaaagaagtcgaacaaaagacggctagaaacgcggcatggcgtcgtcgaagcttgtctcgacgaatccggatcttccacgggacccttcttcttcatcatcttcgtcttcttctatatctcccctttcttctcttctctccgatctgcaccccatggacgacctcctcaagtccatcacccccaattccgtcgacgacttctggaaggggatcgctgccgcctccaccgacaatgccggcggcgtgaccctcgaggatttcctcaccaaggccatccccgtcacagaggaagacgtcagaggtgctcctcctcctcctccttcttttctccccttccctgccgaaggctcttcctcctccgttgagcctttcgctaataatggcgttggcagcgcgccctcaaactcggttcagaaagggaagagaagggccgtggaggaaccggttgacaaggcaacgcttcagaagctgaggaggatgatcaagaatagagagtctgctgctaggtccagggagcgcaagcaggcttacacatctgagcttgagtatctggttcaccagctagagcaagagaatgcgcggttattaaaggaagagctctttgagtgcatcattccaattgaggtgatgcctaaaccgaagaaaaaacttcggagagtaaattcagcacaatcattgtgatctgtttgtcatcactcatggacagactaggctttgtggcttggtgtagatataagggggaaaggtttgagagattgcatgccattgcaggttctaggagttacattgtatagagaaagtaattgcagccaaataatccaagtaatttgattcaacctgaaagtattctattgatccactgcatgtggaagatccataagatccatggttctgggtgggttttgcccggattaggccttgcagggaaagtcgaaataagaatttgtgttaacttatgcaatttgaatgccatccttgcttgatttggtgggggatgaggtacagcaggcgagaggaatggatgaacaatgatcggtagattcgatataaactgttttagattaaaagatcacctatatgccacatgattcattgtgacaaattacttttttttagaagtaacatgacttgtgattttattattttaagcactcataatagttttgaatggatgaaaaatgatcgctagattcgacataatctgtttttagattaaaagatcacctatatgtcacatgattc

SEQ ID NO: 3093 - DNA, 1522 bp, Glycine max
  Clone ID: GLYMA-23APR03-CLUSTER107301_1
ccggctgcggctcgccgtcccaccgtcagctacgtaggccccccccccgatagacacccctgtggacggtgatgaggttcatggcaaaggcttatccattgatacgccgactctgattctgataaaaacagcacttattcaaatattcagcttagcaattttcagttcattcagttgtgatttcttcaagacaagttgcaaatacatagttacatacatacatgcatggagacaaaaatagtgctcgcaaggccattctcgctagagagcgaatcagacccagatgcaaattataaagctccaaatattttgcggcgcatattaagtctcttcagtaatgtgcgcccaggatctgatgtctcttgcttcaagctgccacctgtgttcaacatgccgaagtcagagcttcagtgctacggggagtgtgtatattccacagcgttagacatgctaagcaacatcaacagaggcaacacaccattggatagactcatatctgttgttgcatggagcatttctaccgtacgccccctatggtttggtgttgctccctacaatcccactcttggtgagactcatcatgtttccaaaggaaacctcaatgtcttactcgaacaggtttcacatcaccctccggtatctgctctccatgccaccgatgacaaggaaaacatagaaatgatatggtgccactctactgttccaaaattcacaggtacttcagttgaagctcacgtgcatggcaaacggcagctgaagctccacaatcatggagagacctatgaaatgaatgctcctaatctccttatcagaatttttccaatccctgggaatgataatgttggcgatgtcagtatccggtgcctagaaactaaccttgtggcagaattaagctacataagccaatctttctttcggtttgggacaaatcggagacagattaaaggaaagatcattgattcattgtctgccaagcttctgtataaaattgaaggtcattgggatagtactgtaacagtgaagaatacagacaatgcagaagtaagagtgatatacgatgcaaatgaagttatttcaggactccaagctcctattgtcatggatccggagagtgtgtggccaacagaaaccactcttgtttggagtgagttgagccaagccatcgtgaacaaagactgggaaaaagcaacagaagcaaagaaaacagtggaggaaagacaaagggagctccaaagagaaagagagtcaaaagggaaaacttggattcctaaacactttagagtgtcttatagcaaagaagagggttgggactgttcaccaattcaaaagtcagtcccaaacgcccctatcgtcaccttgtaatgtgctaattatatatgtatggtttatgtgtgctaattatatatgtatggtttatgtgtttgagtaagtgttaataaaattgattatgaaatgatgtgatttatatgtttgaatatttttattatgaaattatagcagtaataaaaattattattaaaaa

SEQ ID NO: 3094 - DNA, 752 bp, Glycine max
  unsure (1)..(752): unsure at all n locations
  Clone ID: GLYMA-23APR03-CLUSTER10754_2
agaggatcagtgagattgttgcaatggtgtgtgcaatctcatcatcaccgttctcaactctctcgtttcggcgtctcgtcgtgagcaatgcgacggtgtctccgtgcaagccgcgtgccgtgaaactcttaacggcgcttccgagcgcggggcggaggcagttgctgttttttctaacggcgacgacagcgttcacggcgagggaagcggcatccgtggcgcaggacattcccttgttcgggatacggaagagtctaaagaaggtggaggaggaagcggaggagattgtgaaggagggatttgaggctgcggacaaggggttggtggcggcgganaaggggctggagacggcggagaaggggctggtggcggcggagagggagattgaggaggcggtgagttttggggggttggcgcaggcgggagcagtggcgggagcggaggtttttgggattttggttgcaacggcggtggtgaacggtattttggggcctgaagctcaaaaatcgtgacttggtgagttggtcataagtaaagactagtacattgttgttgtcgatggataacgtagtgttaagtgttgaattggatatgtttgtgtctctgtaagactctgcctgctttacgtgtttatgtttgtagctttgtgatcatatcatgtaaacgaatcaatgcatctagaatctaatagccttgttcctatgtaaagaaaatcgttccttcaaaaaaaaaaaaaaaccaaaaatataaat

SEQ ID NO: 3095 - DNA, 1217 bp, Glycine max
  Clone ID: GLYMA-23APR03-CLUSTER10789_2
ggacattttctaaattgtgaccccaagggctcttttccctttcggcctttcccttccaacttttcgtcagggttcatataaaatccagttgcgcggtccaaattgaacgtttccattgaatgactaacctacgccaaccacaaaataataaggctatgtaaaataaaaaaatcaaaataaagatacaaacctatttgactttcagggaatttggatttttcttactacgtgcagaatccgattaagattctaaaccaagtgactttgacatgaaggtcttgcttcctatcagttcccgtctaattttacaggagaaatatggcaaattggatacaatggtaatgtatgattcatgagtgtgctacaataagacacaacgcctgtccgcacttgcaaaggtcatttcctttgttatattactttcaaccaatttagaatagattaaacaccacaagaaaatggcaagtttcactagtttccattatgagacatatttggaatgatcattgaaggaatggatggagattcagatgggtgttctttgtcatcagcttcctggccattcatgttagggactttcaccatccctttgagcatatttccaaatgatctaaaagggtggcttattccatctttgactttcaaaataagagaaacctccgatagttgccaagccacagtgagaacaatcatcaccgaaagaagacaatgagtcacgaagttctgcctcttcaacttcttcagttctttgattatctcatcattttcacttcccttactttccccagcatcctcattttcactttctgtttcctgagttatagaagccaccggctcagaagaactagaagcttcgaattgctcaagtatctcttctcctttcaacattttcaactgagagacagagagaaggtgggaaagagggtgttggtattgagcatcattgttatggagggattcttggactttgttggtgttgtcgtgtacaagcttctgaattgcttggtcgatgagctcaaaccttcgatcttgttccatgcttgtatgttgtttggacttcaataataataaaagggtctttctctgttctcacccatcggccaccgacaagaggtgtattattgaatgaaaaccacaagagacgtggcgttttggttttgttttttgggtcttctcctcatctctagcatcatccaactttgggctcgagccgaatt

SEQ ID NO: 3096 - DNA, 467 bp, Glycine max
  unsure (1)..(467): unsure at all n locations
  Clone ID: GLYMA-23APR03-CLUSTER10790_11
acaatcttaccaaacaaaacaacaacgttgtttgctgtttgactgtcctcgttcctttcttctgttctgttctgtctgttattcatctcattctctccaacaccaaccaaacaaattatgtttttcttcaaatggtttcatttgttcatcactttccatgtcttggctgcaacacccatcttctcgttaacagattcctcaaaccaagtctccactaactttctggacaatgccaagaagcctgaagttttttattggatggtcaaaatcagaaggaggattcatgagaatccagaattgcgttatgaggaatttgagaccagtaaactcattagagaggaattggataaactgggtatcccatataaatacccagttgcagtcactggtgttattggctacatagggacaggaaactcaccttctgttgcattaagangctgatatgggtgcacttcccatccagg

SEQ ID NO: 3097 - DNA, 1836 bp, Glycine max
  unsure (1)..(1836): unsure at all n locations
  Clone ID: GLYMA-23APR03-CLUSTER10803_1
tgctctcgaattttctcatctgtcatttcttccatcacgtgttccacacctactcttctcatccagctgtctaaactaataattagtattagatgcatacattggtggacacatgaaacaaaaatattaaatatttatgatatatagttgtacatatcattacccttatccctagtaggtaagaagcttgcttattaattggtccatttgtaaactaaactaaagtaacgagacgaatgaatgttgtttaattagcttgctcgcgccccccccaaccacaacacaacacaacacaacacaattacacacacgaatttccttagttaggcattgctttgcgatggaaaaaatggaactggcagagacacctctacctttgctttcactaaaccacgtttcttttgtatgtaagagtgtgagtgagtcagtgaaattctatgaggatgtccttggatttttgctcatcaagaggccatcttctttcaaatttgaaggggcctggttattcaattatggcattggcattcacctgttggagtcagaaaaggttccggtgaaaaaaagagagatcaacccaaaagaaaatcatatatcgtttcaatgctcagacatgaaagttataatgcagaaactggatgcaatgaagattgagtatgtgacagcagttgtggaagaaggtggaattaaagttgatcagctgttctttcatgacccagatggatatatgatagaaatatgcaactgccaaaatcttcctgtgcttccaatttcttcctgccctctaaagcagctcggaggagaagctacattcaagattaattgctttgcagaagaatctatgtctatgctgatgatggacaatttcgtgatggatatgttgaagatttcaatataattaaagctttttgtaaaaaaaaatatttgtaaaagcctttttgtccgacgagagaagaggggaaataaaaagtgtaagagtaaattatatcacttccaagagtaaattatatcacttccaattagagcaaaatctttgtttatcaaaaaaaaaaaaaaaaaaaaaaaaaaaaaaaaaaaaaaaaaaaaaaaaaaaataaaaaaaaaaaaaaaagagttcccggcaccccggggaaccccctaggaaagggggaaacaacccccggataggaaacctggttggccaccgggagccattaaagagggctcctgggggggcctccactttccttccccgccggggccctcaccaaaccgcgcccccaaaaaaaaaaaaaaattttctttccccccggggacaaaattcttcccgggaaaaacggggggggactcttccggccgttttcccccccggtgggggagggccggggcccttctccgtgggaaaccgggccccgcggtcccccgtggaagtgtcggaacaaccccccccgggcgcccgcccggaatccccgctgagccttgccccccccctcgcgttgggtgtgccccccgggggcccgtgcaacggccccccgccggaaccgccccaccattattggattttccccccaccctggtgggaaaagaatcaaaggtctcattctcaactactacttgctagagctttcattttctagctactactaccttacatgtgttcaaaaggtcttttagagtggggggtcctatnagtatgagatgtgtattcaccaagagaagcgacatgagacaaattatctgcgctttgcgtaacttctccaggcgcgtnggactttccttaagaggcgttcatataagtgagaatgcgaggggtacaanaataatgagtggggatattacacttttaatttnagacatcta

SEQ ID NO: 3098 - DNA, 1440 bp, Glycine max
  unsure (1)..(1440): unsure at all n locations
  Clone ID: GLYMA-23APR03-CLUSTER108143_2
aattctaacatcgttccgttcgtgctgagtttcaggcaatcttcatgcttgcagcagccatccccataggagtgtaggagttggagagtgatcgacatcaacacaaggattcgattcgatgccttctcttcgcatcctaaacaaaatttgttattcgataaaccaatattgcaagtacaagtaccgaacaatctcctccacggcacagttgcagggttcatggatggagaaggtcaaaaacgtcatcacgggccaaaagagcacgccccagtcccagggagacgcttcccaagtcacctccgattcattcactttgctccgttttgcggatgaaatgaagaatgcaaagagaataggcgcgtttaaggagttcatggttgggcgaagcagcgaagccactttttcctccgccttcgacaaatatgaagccataattcgatttctcggtgctttggaccccactggagagaatctcccgacagctcagaaacaagaagcggcaaaacattgtaattgcacgattgctgatgtggaggatgcacttgccaagtttacttgggccaaggaagcacagaagaagatacagaagctaaaagaagaaggaaaaccaatgcccaaaagctttgctgaagtaatgcttctcattgttactttaattcctaactacctagttgggttcaatttatcatcttgtgaagacattttagtttgctgaatgcttcattaaaaggtccaaaagctagttggttcaactccattggatcttgcaaggtctaatttggcccaagctggactaattagcaggaacgcactttgtccatgtggttcaaagaagagatacaaaaggtgctgcggaaaggactgaaggaattcagagattaaatgttaaactgcaaggaagcctgatctattatggtggttccatacctaggcatatgcacatagctgaattgatctgcagtcgtaccttgttttattcagttcagatcaagttggcctatgcactagactgcaagcatgcccttaagntgattttaggatgagatattttgccgaacagctgcgtgattttctttagctttctaatttttgaggtggtcataggcagaaccaaacaaaatatttttgttttgaaaagtagttagttctcttctttctcttgctcctgtctaaataggcaagagaataagaaataattgtagtctcattattaaagtcaaaatgcttcaactcattttttttactgatttatatcatcatcatcatggtattcgagttgcatttgtagatttggggttgaggtataggtaatggtgaaaaggagacttgatgtggaatatgttcttcaagcatagcagtcaagttcagtggcgaggcgagacgagtatttttttttatgtgggaatgataataaaaaatatggtatcttataatttgcaa

SEQ ID NO: 3099 - DNA, 1480 bp, Glycine max
  Clone ID: GLYMA-23APR03-CLUSTER10841_2
atttgattttttctctctcctttttctcttccctctcctaaacaaacacaacaacaacaacataaaatggcggcgtacaaagccgacgatgattacgattacttgttcaaggtggttctgatcggcgactccggcgtcggaaaatctaaccttctttctcggttcacgcgaaacgagttcagcctcgaatcgaaatccaccattggcgttgagttcgccaccagaagcattcgcgtcgatgataaggtcgtcaaggctcagatttgggacactgctggtcaagaacggtaccgagctattacaagtgcatattatcgaggagctgttggtgctttactagtctatgatgttacacgtcatgttacttttgaaaatgtggagagatggctaaaagagctgagagatcacacagatgccaacattgtggtgatgcttgtagggaacaaagcagacctgcgtcatctgcgtgcagtttccactgaagatgctacaactttcgctgagcgagagaacacatttttcatggaaacatctgccctcgagtccttgaacgttgaaaatgccttcacagaagtgctgacccagatctatcatgttgtaagcaagaaggcccttgaggttggagatgatccagcagctttaccaaaaggacagacaattaatattgggtcccgtgatgatgtatcggctgtgaagaaatctggatgttgttctgcttgagtgtgtagaagacagtctctgtatttttataaattatatgccttgtttataccatgtagagattggcctcacagcatgaagatgattatttagcgagcatcaaattttaaagtttctgcttagaattatgttcaaaattagccaaatgtttagaaaacaagcacattcattttgcattgtgcctatttttgtgccatttaaagatatttatttatcaaatttccaatttattagtttgattcttttctaatcttcatcatgcttctatttgttctcatctatgccgcatttgaaaagcagatattcaatctggttctttccttgcttagtttttctcttcctttctttccttgcttagcttttctcttcctttcataatgaagagtattgaaaacttgaatatattgtttctttctatttggagcattgtaggtatttggcaacattataaattataatacttgctaacagactccaatgcttgaaggctcctcactgtgcgagaaggtatgggggaaggtcatcaaggtattgctaataaattaggaaaaggttggattttttcttataaagttggttccaagaagcaacacatgtccaattcctttttatagaaacagccagcaaatagtctctgtttgacagaacacaagggcttttttaccaaaccactagaaaactatattccaaacaagtgtaaacaataacgaattacctgcaggtcgactctagaggatccccgggtaacgagctcgaattc

SEQ ID NO: 3100 - DNA, 1398 bp, Glycine max
  unsure (1)..(1398): unsure at all n locations
  Clone ID: GLYMA-23APR03-CLUSTER10844_2
atcatatcatcacatcttctgctctctcacgagaagaatactactaactgtgttgtaatacctcagtggagaacaagatgaatccatggaacatgagaacttccaagttactctctcaacaacttgcttatcctccttatcgcttggtagaagagattccaaacatgggaaattccagaagatcaattccatcatgctgtgcagttgtgtgagcaaggagccaagaggttcacagatgacaatcttttatggtggccaagttcttgtcttggatgatattcaagctgacaaagccaaggacatcatgtcttttgccggcaaaggaatgtctcaaaaccagaacgactgtgcttacactttccctgctacaacttctgctactcccagtagaccattcccttttcttatgaatatcattccaaccactgccaataattcggttcaagaccaccctcaaacaccatccaaacctgttatttgtgatctaccattggctaggaaagcttcacttcatcggttcttggagaaaagaaaggataggtaagtaggctgagtcatggaaattaatacatcaacgaaagtataccttcaagttttcttcaaaattggttttagaccctacatcctaaaaacaatgattttgacctttgtattttctaaagtgtggtggatttggtatttggtatctgcttatgtcaaaatgaagtacagggtcaagtacaaaatctaccacatttcagaactacgaaagctaaaattatcattaataaaaaaaaattaggatttaaacctaatttggactgaatatatgttgagtaacctaaaatgcattttaccttcttttttaatttactgctttggatcaaatcatttatatattattattaatgtttgtgcagaattgctgccagagcaccatatcaaacaagcaatcacatggcagcccttaataagctagctgaatccaagccatggctcaccttggcacctaaatcaccacaacaagacgaatctgattctgatagcagctccagctttgtgttattttaactacttttgttggacaaggtgaagaagaattgtggtgtcaacattttgataaacggagtcaacattttatgggcttctctatagctccgtgctgaatttttgggagggctatgatcaatgctgttgctcatggctttactattattatatttaagagtgtaatttagggcaaaaaagtaatgtaaatgtagtttggttagcatagttttagtaaaatattgaaatcagttcttctcaattctcattatcacgtgtattatatgtaaaacttactgntaggattatctttctatatgctagncctgtttgtatggttcaatggnnttcctactagtatgtgagacacat

SEQ ID NO: 3101 - DNA, 1041 bp, Glycine max
  Clone ID: GLYMA-23APR03-CLUSTER10844_4
acactcacatctcttgtgctctctcttcagtctctcccacacacccttcttcttcagctgagttgtttgtaatacagcaagatgaatccatggaacatgagaacttccaagttactctctcaacaagtttcttatcctccttatctctttgtagaagagattccaaacatgggaaattccagtgttgtgaccaaggatgctagaggttcacagctgacaatcttctatggtggccaagttcttgtcttcgatgatattcaagctaaaaaagccaaggacatcttgtcttttgccggcaaaggaatgtctcaaaaccagaacgattatgctaacactttccctgctacaacttctgctaatcccactagaccattcccttttcttatgaatatcattccaaccagtgccaacaattcggttcaagaccaccctcaaacaccatccaaacctgttatttgtgatctaccattggctaggaaagcttcacttcatcggttcttggagaaaagaaaggatagaattgctgccagagcaccatatcaaacaagcaatcacatggcagcccttaataagctagctgaatccaagccatggctcaccttggcacctaaatcaccacaacaagacgaatctgattctgatagcagctccagctttgtgttattttaactacttttgttggacaaggtgaagaagattgtagtgtcaacattttgataaacggagtcaacattttatgggcttctctatagctccgtgctgaatttttgggagggctatgatcaatgctgttgctcatggctttactattattatatttaagagtgtaatttagggcaaaaaagtaatgtaaatgtagtttggttagcatagttttagtaaaatattgaaatcagttcttctcaattctcattatcacgtgtattatatgtaaaacttactgttaggattatctttctatatgctagcctgtttgttatggttcaattggtttcctactagtatgtgagacacatatagtcaaattccatctttccagcg

SEQ ID NO: 3102 - DNA, 893 bp, Glycine max
  Clone ID: GLYMA-23APR03-CLUSTER10849_3
aatgaaagacaactttatattataactttaagttaaagaagatattacaagtagcatcaagcatcatatcacaaaggtccaaataaattggagagatcttaattattccaacaagaaaacaacaaagaacacattatttttattactgttttattgatactatttgataggaagaagcaagtgcatgcagaagtaattaatagggtgtaggtggtgggtttattagagttaattagaccccctttgctgtccactgaaatttgtggggtttatgattcatgttgttccttccatagggattggcatagcgagtatccccaccaccccagttatgacgctcatatctcatttcatccaccttagccgtgactctgccaacatgctcctctgcataagactcctcgtacttcttggattcctccgaaaaatactcatgatgagaggcgttattattaccatgatgatgaccaccaaaagggaactttctgccaccctgtgcataacaaccatgtccaaagccatggtcttgaaacatgcctcctcctaacttgccaccatgcctgttgttcatgtgcatggctcctcctacgttgccatgatgatgtttttgcatggagaggtcagagtccacagcagcaaaagcaccaagcctgttgttgtggttgttcatgttcatgtgcatgcctgggaattgcttgtggttgtggccatagttgttatcagagctccaagaatcttcgtggagggcatagctctgctgctgaccctgactctccatccacatgctctcatcagcacagtgttgctgctgctgaaaatggttcctccccatcttgtttcttcgaaacttcaagttattttttgttattagtgttgagagatgtctgcttttt

SEQ ID NO: 3103 - DNA, 1437 bp, Glycine max
  Clone ID: GLYMA-23APR03-CLUSTER108810_1
tcgatcagctacgtaggccccccccccccccccggggcacattaaggttgcatgatttatgttctcataaatcatttgaagttccttaactacaacattttgtctaatgcagtgcctcttagattatagagaaggaatcgccgctccctacactcattgcccttgccctcacgttctcaattcgtctcttatcccaaacggggaaacttcaagagttgattgaaaattctggccaatcttcttctgaaactttccagactatgtttgtcaaagacaaatcagggagagtacgttgccacgggagaactacgacacctactctcttgaaaagaaataaagaaatttcagaaattgaaaaaagacatgctgaagaggtgaaagaattaaatgataaaatccaagagatagaagaaaaatgcaatagagaaatggcagcagcagaggaaaaatgctgtcaagaaatggcagcaatggagcaaaaaattcaatttcttgtaaagattgtgttgaatcaaagcatcagaatttaatgttgcagccttggcagctttgttatcaactccacctgatactaacagtgttttatgttcttcaacatcaacacatgctccaattaataataagaggtctgcaatgccaacaccctcgacagtgacgccatcaaggatctccatcgcctcaccaagattgccgtcacggcccctcaaacaaacccttgttggtgacggccaggtccaccgcgccaagagggtgctctcccccctcgtcactgccatgttgcttgacgacaacaacgctgccaccaagggaaccgtacgcacccgctccttcagccaccacgtcgaaaacaccaacaccaccatcagatctacatgatgagcaccagatctaaagaagtcggaggtggtcccgctctagtgctaccacctattccaaaagatccattgaatgacctaatggaatggtttctcgtaaaatctttattcattattattttttaattccttaaagctttgtaataaaaatcttattgggctgcactatgttgagcatagcttactgcatctagtgtttactttagagttagattcagtggttttatggaattacttcattcatacttcttcatattttgatattgacacgtagattttttttcttcataatgtgaattttttttaggttcagaagacaaaagtcatagcaccccaatttgatgcatgtgctagttggtggactcaaggacccgatgctataatgcagagaatggctatccagtcccaaaaagcaaagaagaattggctacgtggacagcagcaaagcaaaaggagtacaagcaaaacaagcaacatgatgctaaggctctgctattcatccaacaaggagttagtagagagatctttcccagaatcatgcaagaaaaaaaaaaaaaaaaaa

SEQ ID NO: 3104 - DNA, 1393 bp, Glycine max
  Clone ID: GLYMA-23APR03-CLUSTER108900_1
aggaatgtgtcactactgaactgtgcaatatgagtgcttgcaaaaccctttcatgtttctccctctcttcttcctcttccttcttcaaacccacccttctccaccctcgccaacgtctaaccctaactcggagatgttccacgtcagccctactcgaagaaccggaaccccaatctccgagcgttcagcacctcctcacgagtcccgacggcgtctccacgctgatgaagatggaccgcaagcctcttctccctcacgagccgcacgttcgctggttcccttacctcgacgcctaccgctgccgaaacggctgcgttttgagcagcgccgaggtcgtccaggccctcgcgccctgcatctccgacgaccggaggcagaggttcgggagcgtggttcggaaccggagctactcggtctgcctcgtcgtggaagggctctgcgacttcggcaacgtctccgccacgttccggtccgcggacgcgcttggcgtccagtccgtccacgtcgtgtcgtgtgacgccaacaaaaggtataaagataatcgccatgtgagcatgggtgcagagaaatggttggacattgaactgtggaactctacaaaggagtgctttaaaatgttgaaatcacgcggttatcgaattgcgacaactcatgtgggaatggatgcggtttctattcatgacttagattggtcctgcccaactgcaatcgtggttgggaatgaaaataggggtattagtgatgaggcattggagctgtcagatttgcattgcagtattcctatggcaggaatggtggactctttcaatgtttcagttgctgcgggaatcctcatgcaccactctgtttgtgatagaatatctcgtatgggccgtcatggtgatctaacagtggaagaatgccagattctacttgcagagttttctctgcgccatagcaagagttcgattagtattgttgaagattatgcaatgcgtaaagcagcgacattgacctaacagcaataacaggaagtcaaacttcttctgactgtgcttggctgcttgcctgtacttggcaaggagacaaaccagagactagattgtctctgattgattgaatgattcctacaaactagcattagcttatgcatgctgtgcaaggctcacagatgacaatggggaccttaccaacacccagcttcttggactatagaatatttccttaatgatgtgcttactagccccactttacttagcaatgggggaatgatgctgtcaaaagtgcaattgcaattttatttatgtggatttttcgggccttacagtatctaatggtttttatttggatgagaaaagaaaatagaaaagggaaattttttacctcctatttttaagcaaaaaaaaaaaaaaaa

SEQ ID NO: 3105 - DNA, 910 bp, Glycine max
  Clone ID: GLYMA-23APR03-CLUSTER10924_2
actattcaagtattaaaccctccatttcctcattttcacattcgcatccaaacacgccccaacaccaccatggccacaagagtctcccctcccgttgcccttctcctctcctccctcctcttcctcctcaccctctcacgcgcccgcgatctccccaaccctttctcccaacccaaacctcactccgaacctaaaaccgtttcgttcacgatcgacaccatcgatcccgttccgctgacgctcctccgcttccgtccgatcaaccgccacttccagcccggccgtccgttgccgctgtcgctccgcaccggccaccgccgttgccgccaccgccgcgagatcccctacggcaacgacgcaatcctggtcggcgacgccgctgccgccagtcggatccatccgcgctgggttaggcttcactccgccgccgagacgcggtttccggcgacggtggagaggcaggattccgatcacgatcatgatcacgagcaccaccaccaacaccacggcgagcgccaccaccaccaccaccgccacaaggagagctggttcgcgaagaagattcggaagttcatgaagctgttctgattttgatgttgcaacgacgaacgacgatgatgcatatatatatatagtagttatatagatatgaagggtgagtgtttgtgtaaataagtttgcatctgatatagagatgtatgatgtatgtgtaagttttgattattttatgttgtttatgagttgttagggatgttttatactgtagaataatatggtgttgatcatgagtgagtagagaaatgtaacttgctgatcctaatacttgatcttgcttcatgttgggctttgttgttggattgatttggtggcaaagccatagatacttactccttatcaataacatcataac

SEQ ID NO: 3106 - DNA, 1648 bp, Glycine max
  unsure (1)..(1648): unsure at all n locations
  Clone ID: GLYMA-23APR03-CLUSTER10951_4
actaaaaactcactcattctctctgcaaattctaatcttcgcaaatcaacaacgtctctctctgttactctgaaaactgacttcaagttagtgtggctagctgccaagttgtgatggcattggtctctggaagaagttctgctctgaacccaaatgcacctatgttcatacctgctgcacttcgtcaggtggaggatttttcacctcaatggtgggatcttgtgaaatcttcaacatggtttcgtgattattggttgagccaacataaggaggaagaatttgaagaagttgccaatgactctactaatgatgatatggagaatatgctctcggaaacttttgatctaggcatggaagaagacttcaatgttctagaaaacgagtttgagcagttggtgatgttctctgaagctctagatcattctgttcaggatgatcctaatactggaaaagggtctcctcagagtaagcattgaagctaaatatctaattgattggataattgatactttatagaatcttttaaatattttcttacttgctagagtggttacatgacttcatttttgtttcaaatgctatgtaaaaagttactttgtttcaattatactatgttttatatgcttatatagtgtctttcactagtttataagcttgtgaaaaataaacctgttaacttagaggtagaccatattattcatttgtaatgcttattcttaatgatagaggtatcattcatgttgtatataatttacttacaacaagaattgctgcaaatctgcaattgaatggatctttccttttcaatcttacatctttcagctggtagttattttaagagaaaattaactactgtatctcaattgagttgtttcttaatcaggtcttaacaaggatgttaaagcttttcttattaacttggacaccaaaatcaccgagggaaaggggtcccaantctccttcagggcttgcaaagcaccttgagaagccagcacnagcacgtgaatgtgaagtgtgcctctctccgaattcaccaacctcgttgaggaaaacgtttgaaagctcatagtgatatcttgctagagctgcaagttgctgactagagcttgagatctctgttgtaataatttttgtatatagagggtgcagtagtgtgtttgtatttttcttgtttctggtcttgtatatttgatggagccctcggaactgtaggtaggtgagactttaattctgaccagccaaatccgggaatgtctatggttgatgaacttaaatctcaatttcaaataaattgttacatggcttggaagtgtgtagatgtaagttttaggtgtctttagttcaatgtggcaatgggagtatacttttcaagccttatgatttgcgtttagagtgataatgatattgtagctgcttttttcttgtacaaacacctatccattgtgtggccaagccaaattcagtaacaatttccctacttttaaaaatggaacaatgatattgtaacacatttgtgcgcctcatgccatgccatgccaatttgtgttagatatgtggtttggatgtgcttcatgtaatgaaaagagtatgctgcaacttgttatgtgaaaatgtgatataataaaaagtaagtggatagttgagaacc

SEQ ID NO: 3107 - DNA, 850 bp, Glycine max
  Clone ID: GLYMA-23APR03-CLUSTER110436_1
aaaaaccatcccttgtaatcgtagctgtaattacaattacaagaagctagcacgccatggcatcagctaaatggttattcaagataataacgtttccatgcataactcctcccaggcccaaatcattaccggcaatagacggtgacaccactacaccacctcctctaattgggccttcgggcccaaaagacgacgatgagaggctcaaagacgtttttgatcacttggacattgacaaagatggaaagatttcgagcagcgagttaatggattatttcgcgtccgtgggtgagtccctgagccataaagtggcagagagagtgataaacgagtttgactccgatggtgacgagttactcgatttcggagactttgagaaactgatgaagcaagaggacagtgaggaattggaggatgttctgagaagcgcgttcgagatgttcgaggttgagaaagggtgtgggtgcataacgcccaagggcttgcaacaaatgttgcgccaactaggagacgtcaagtcccacgacgagtgtgcggccatgattcaagcattcgatcttgacggcaatggcttccttgatttcaacgaatttcagcagatgatgtctccagcttcttaggtttggttttgctttgcttctctctctatctaccctcaaatccactttagtcaaagtttaaaatgaaattaaacgctttcttgacgtaagataaagaaacgcggtttcctgcacccataagcgctccatttgtctgtcattttgcgatctctttggttgttacatttacatgaactttaaatatctatattagatgatatagaggaagagtaaattatactaattattcc

SEQ ID NO: 3108 - DNA, 1367 bp, Glycine max
  Clone ID: GLYMA-23APR03-CLUSTER110542_2
atcgagtatcctcttccttctccttcttccgcatcaactcgtcttattagagtttttactaatcaattatggcttacgagataaccgagataaagaagattggtataggcctaattggtttcggcttatttttcacatttcttggcataattcttttctttgaccgtggtttgcttgctctgggaaatattttttccttggcaggggttggcattttgcttggttggcgttccacgtgggcacttttcactaatagagccaactttaagggttctgcatcatttcttctaggtctctttttcatctttgtgaggtggccaattgttggtataatacttgaaatatacggttgtgtttttctcttcagtggattttggtcatctatcaaagtgttcctctaccatatccctgttgttggatggattatacagtttatctctcctccttgattgtcacagaagggatttaacggatagcctcttagtatatggctaatcatgggtttcgattgtcttggtaatttttccaatgacttgtgtatgaatgcaatgtcttggctagtttttccaagagtttgcatcaggcaaattagcttcctttagtgagaagtatcgcagcatgcaatttatgtaaaagagttggtacttggtaggctaattttgttgtttcaaggctcatatatacaagctggttatgctgttcaggctcgctactgatgtcagactgaacatatgtttacttttggctttatgcgccttgtcattgtcaagacctcgccaaaggatgttgaaattctttttgtaagttatgaaatattcaattagtgttagtgttggaattaaactttatgctataaaaaaaatgtggagaaatgacttgggtttttatgtctccaagttttcatgaatggagcctttctattttaattattgatccataaaaagatttaaaaaatgtgaatcacattttccaacaaagattcagaccgtagaggcttagacccgaccacgctatttaacatggtatttgtgctttgggctgagacaaccgcaagagggattggttatactagattttctggtttgacggcgtgcggggggttcatctccaaccatcatggggtttgcaagatcccttcaagttgataatatcttcaagagtgagttgtgggctctcatctatggtctgcgtaggctttagtaatgtaatcatggaatccgattctgattcttttgcaaagtttggtctatctattgaccatgattttgtattcttttttattacccttcaagttttatggaggacatgctgatttgtaatgcctctatggctctaaatcaaatgtaattctgttgttttccggcgtt

SEQ ID NO: 3109 - DNA, 1901 bp, Glycine max
  unsure (1)..(1901): unsure at all n locations
  Clone ID: GLYMA-23APR03-CLUSTER11057_1
tcagctacgtaggccccccccccccccggaagctatcaatcatccgacacttcccctgcaaccccgacctcctcaaccggtgtctgttcctattggtccttttgcctactgccttggttctgcatctcgtcctctggctgtgccgcccgctgttctacggctccggccgattggcatgggtacttctgaagtatgtgcagctgctgctgctttggcatttagtcacatctgtgatggctgccggaaaaagctttgtggttgcttagtaggtctattccacatctacaacaagcccgttaatggagaaggtagttttaagttggctcgagaagactctttgcatctggttgaagctttgagtttggttgttactgaacttcctccagatgatgctaagagagctcttgaggcattatgcataccagtcataactcctttacaggaagctatcaatcaaggtccagaaagcttgagtaaaagaccttctcggcagttaacggttcatattgatcgatttgcctacatctttagatttgtaaatcatcctcaagttgtggcagatgctattcaacggctatggccaatttttaaggctatttttgatattcgtgcttgggacatgagaacaatggaatctctctgccgagcatgtaaatatgctgtgagaacttctggaaggttcatggggctcacaattggtgccatgctggaagagattcagagtctttataggcagcaccaccaaccatgctttctttatctctccagtgaagttataaagatatttggttctgatccatcttgtgctgactacctgaaaaatttgattgaggcactcttccagcacacaacacgccttcatttgttgctgcaggaattcacagcccggcctgatatagcagatgattgttttttgttggcctcaaggtgtattcgctactgtcctcaactgtttattccctcgtctgtttttccttcattagtggattgctctatgattgggatcacagtacagcatagggaggcttcgaattccatattgcatttcttggctgacatttttgatcttgcgaattcctctgtgggggagcaatttataccaataagagatagtgtaataattcctcgaggtgccagcatcaccagaattttggttgcttcattaacgggagcacttcctaaatctcgagtggatgtggtatcttatacactcctggcattaactcgatcatatgggatgcaagcgctggaatgggcaaaaaagagtgttttgttaattccatcaacagctgttacagatgtagagcgatcaagattcttaaaagcactttctgatgcagcatccggaggggatactaatggacttactgttcctgttgaagagctgtcagatgtttgccgacgtaacagggcagttcaggaaatagttcaggaagctttgagaccgcttgagttgaatatggtgaatgtatcatagaggattggtaaatgccattgatagagagggccattttgtttagggtcctgtctgttagttaggctagttggttgtgtattatctatctgttatattcatttttttttatccattatcattctccaattttttagaagaatttgcccctgcatgctctgatgtgttggccggaagaaattcgatgggggtattgtatctttttattcttgagatgtgggattggtgagtgatgtttgtcccggttgtcatttttggggggcggaggttacatggtatacagttgtaatttaatggaaacagaaaaggtgggggaaaatagagtacattgataagttgctgcaatttttcaagttgggaatgaatatcgattttggaatctgtgactgaattgtgttcagttcgtgngaccaatctgttaaaanna

SEQ ID NO: 3110 - DNA, 979 bp, Glycine max
  Clone ID: GLYMA-23APR03-CLUSTER11381_3
ggaatcagaatcgcgtttgggagaagaagagcaaaatcgctgtgaaaatgagcggaacggtgaagaaagttagcgatgtagcattcaaggtgggaaggaacatcgattgggatggaatggcgaagcttctggtctccgatgaggctcgcagggagttctccaatctccgtcgcgctttcgacgaggttaactcccaactccaaaccaagtttagccaggaacctgagcccattgattgggattactatagaaagggaattggcactcgtttggtggatatgtacaaggagcattatgagagtatgtttctaaactctgtggtcaatgctcttaatattgtatatattttagatttcttgatgattccagtaccgggtagtgtgcttggctaattcttagtggcgatgacatggttgaactaaaggcattgagatccccaagtttgttgatacagtaactcctcaatataagcctaaatttgatgcccttttgattgagcttaaagaagcagaggagaaatctctgaaggagtctgagcgcttggaaaaggaaattgctgaagtacaagagttgaagaaaaagcttagtaccatgacggcagatgagtactttgaaaagcatcctgagctgaggaagaagtttgatgatgagatcaggaatgataactggggttattgatttttcaattagcaaaatgtcaggttgatgttgttctggctggtttaataataactacattgatttctttgtaactcggttctctttttcagttcaaaggttcttatattacagtgttgaaattttgtggtactgtagttaatcacttgagacttatccccaaagtgcagttgtggtcgtcggcgaaactgctgataaggtttccgtccggagacaatttgaagaaaatgttgttttgcgttagtcttaataagaaaaaaaaaaaaaaaaaaaaaaaaaaaaaagcggccgctctagagga

SEQ ID NO: 3111 - DNA, 1431 bp, Glycine max
  Clone ID: GLYMA-23APR03-CLUSTER1144_2
aggcaaaaaggataagacagtgagtgtgtatgttgttgacaagcaaaagccatggagggtagtagttgctctaatgacacttcttatttgttggcttttggagaaaacagtggtgggctatgcccaatgacgatgatgcctttggtaacttcccatcatgcaacaaatcctagtaatcctagtaataatactaataataatgaaaacacaaactgtctcttcattcccaactgcagtaacagttctggaactccttctatcatgctccacaacaacaacaacactgatgatgataacaacaaaaccagcactaacactgggttagggtactatttcatggagagtgaccaccatcaccgcaacaacaacaacaatggaagctcctcctcctcttcctcttctgctgtcaaggccaagatcatggctcatcctcactatcaccgtctcttggcagcttacgtcaattgtcagaaggttggagccccaccggaagtggtggcaaggttagaagaagcatgtgcttctgcagcgacaatggctggtgatgcagcagcagcagctggatcaagctgcataggtgaagatccagctttggatcagttcatggaggcttactgtgagatgctcaccaagtatgagcaagaactctccaaacccttaaaggaagccatgctcttccttcaaaggattgagtgccagttcaaaaatcttacaatttcttccaccgactttgcttgcaacgagggtgctgagaggaatggatcatctgaagaggatgttgatctacacaacatgatagatccccaggcagaggacagggaattaaagggtcagcttttgcgcaagtacagcggatacctgggcagtctgaagcaagaattcatgaagaagaggaagaaaggaaagctacctaaagaagcaaggcaacaattacttgaatggtggagcagacattacaaatggccttacccatccgagtcacagaagctggcccttgcagagtcgacaggtctggatcagaagcaaatcaacaactggtttattaatcaaaggaaacggcactggaagccttcagaggacatgcagtttgtggtgatggatccaagccatccacactattacatggataatgttctgggcaatccatttcccatggatctctcccatccaatgctctagaaaagtatccatcctttgtgggctgataatagattcataagctcgtgctgtcacttattaaaaccttaagcaattattaattaatatgctttctagtgctcatataagcattctaagaaatcctagattgctatatactatatttatagtacgcaggtgtatcctgctagcttaaagagacggtcctttgtgtggatcatctagttcaaggagttatgaataaataaaattccataaatttaaagccaaaaa

SEQ ID NO: 3112 - DNA, 1602 bp, Glycine max
  Clone ID: GLYMA-23APR03-CLUSTER115078_1
acaagggaggcttggagatttctttattcttctggtcttaccaatcaaattgacctttttttgctttgccccggtatgattccttgtgatcaacgtcacttgttaatggtgcatgcaatatgaataagtagtgtatggaacagtgccaccataaggtttcttttgttgtattctttcttataacatggtagcagcggaggatttctgcacctttacggcatttttcttatgtccatagagcatggatgctacatcctcaccgtttgtttcctcaagaagaatgggtgtatatgatcctatccaccaaattagcacgtgggaagaaaatttcaaaagtaatgatactaataatttaactgtatccacatccataattggggaggtggacatgaagttagataatcagtttcaggtgcaatcagaggatgatactcatggaatatttggcacatctgtgaagtacgaccaagacactaacagacttactgataagacacaacgacgtctagcacaaaatcgagaggctgctcgcaagagtcgattgaggaaaaaggcatacgtgcagcagttagaatcatgtcgtttgaagctcttgcagttagagcaagaggtagatcatgcaaaacaacagggattgtatattggcaacggattgggttctaataatttgggttttgctggctctgtaaattcaggaataacccttttcaagatggagtatggaaactgggtggaggaacaaaatagacaaattttggaactgagaactgctttaagttctcatatcggtgacatacagctcgggacacttgtacaaggcataatgaaccactacaccaaactctttggcatgaaatctgctgcagcaaaagcagatgttttctatgttatgtctggtatgtggaagacaacagctgaacgatttttcttgtggattggaggatttcgcccctctgaacttctaaaggttctggtccctctaagtgaacctttgacagagcaacaacggtttgatgcctatggccttgaaaaatcatgccagcaagcagaagatgccctttctcaaggtatggaaaaacttcagcaaatgctttcggactctgtaggaccaggacaactagttgaaggaacccacattccccaaatggatactgcaatggagaggctagaagctcttgtgagctttgtgaaccaggctgatcatctacgacaagaaacgttgcggcaaatgtatcgaatacttaccatacgtcagactggtcgatttctgcttgctttgggggaatattttcaacgcctgcgggctttgagcaaactttgggttaatcgtcctcaatttccaggacatgcttagtcagtcatcaaacattaattctagcaaaacacccttaaacttatcatcctgttccggctgctcgcatttttccagcattgagaagttgtaaatacgtgtttattaaggtcatgtaaaatgttaaatagtacacctgcgtgtttttaaaactgcataatccttttttcttttctttgatagaaataattaaagaaaactactataatgcaagttaaatctttagttcgttactaaaaaaaaaaaaaaaa

SEQ ID NO: 3113 - DNA, 915 bp, Glycine max
  Clone ID: GLYMA-23APR03-CLUSTER1154_2
ctccctctctcttttctaagtcacaaaatattgtcttagttttcatttgaagctcaaacattaacaccatggcagatgttctgagtgaagaacagattagtgagatcaaagaagcctttggcttgtttgacaaagatggtgatgggtgcattactgtggacgaatttgtcacggttatccggtcattggttcagaaccccacagaagaagagctccaagacatgataaacgaggtagatgcagatggtaatggaaccattgaatttgttgagtttttgaacttaatggccaagaaaatgaaggaaactgatgaagaggaagatctcaaagaggctttcaaggtgtttgacaaggatcaaaatggctacatttcagcaagtgagttgagacacgttatgatcaatctgggtgaaaaactaactgatgaggaggtggagcagatgattgaagaagcagatttggatggtgatggtcaagttggctatgatgaatttgtcaagatgatgatgattattggatgaaaatttaaaccaacaaatttattgttcgaattcgtttttgtgccccactctcatttactcccaagaaattaataagtcttccaattaatgtttgttgtatttaacttgtacacatgatgtgaatgaccaatgtattagagtgacatctcagccacccatttcatgttcaaacttcaacccataattattctttcagttttagtttagtattccttatgttttacaattaattagagtaaatttattcaagaacttctgaaattagactcttttttgaaagattaatgtatgctacaatttattctttctcttgtgaacatggtattgctacaatttatttatatcattcagaaaaataaaaaacagcacaagaattaaacaaaaaaaaaaaaaa

SEQ ID NO: 3114 - DNA, 1666 bp, Glycine max
  Clone ID: GLYMA-23APR03-CLUSTER11571_1
taggccaatgacatttattttttaagaataataaaaaaaaagagcaaacggaaaggaagtgagagagaaaaatcccaagacaaagcaaaagcaatagcccttagaagaagaccctcttcctctcagggaatgggcggaagatggagaaccctctcttcgttctataaccgcataaccacttctttttcttattcttccaaaccccattttccctccttcaaccgctccatctctctcgccgccgccgcaacttctgaaatacccgacccggatcaattcgggttcgtagacccggaactcgatccctgcgtcaaaatcccagtcaaagcttatttcctctccaccagtataaatttgaagggcattcaggctgataatcacagaaacgttgttcctccatcttcccgctcatcttcaaactatgttgctctccgcttctgtgacttcaatttggactccaatggacatgggtttcacatgaaagcaagcaactgtcgttacatggttgtatatcagtatgggtcagctgttttgtttaatattgaggatcatgaagtggaaagttacctggaattagttaagaggcatgcatctggtttacttcaagatatgaggaaagatgattatgcaataaaggagaagccactgcaagttgaggacatgcaaggaggtccagactacatagttctgaaatcgttggatactgatggtatccgtataattggaagtgtattgggacaaagcatagctctggattattttgtctcacaggttgatggtttagttgaagagtttgctggcataaaccgcggaatggagaaaactggaaccttcactatggataagaagaagctacttcagctagttgggaaggctaactcaaatttggccgatgtgattcttaaagttggtctctttgagagatcagaaattgcttggagggatgcaaagtatgctcaaatatatgagtatcttcgggatgagtatgaagttgcccaacgctttggaaacctggatttcaaattgaaatttgttgagcacaatattcatttcctacaagaagttctccagaacaggaaatcagatttcttggaatggtgcattattggtctattgactattgaaaatgttctatccttatatgagatacttggagctacaaatacagtttcttagtagatagtaagaagttgaagctagattaatttcttgtagtaacaattcaagcaaattttattttaataaaaaaattatcactttgtatttgactattgaaaatgttctatccttatacgagattcttggagcttcaaatacagtttcttagtagatagtagtaagaagttgaagctatagattaatttattgtagtaacaattctagcaatttttgagccgataaaaaatttgcccttttgtatttagtatggtaaataatgtccacatatcccggacccattgagctgtatgaaatttatttgaaattgtgatataattcaaaaacaaatggattaggtgcatctagttccatcattgttggaactgaactattgttcatattgtaaacttttatcctccgaggatggcaaataaatctgaatttgttatcataaaaaaaaaaaaaaaaaaaaaaaaaaaaaaaaaaaaaaaaaaaaaaaaaaaaaaaa

SEQ ID NO: 3115 - DNA, 1235 bp, Glycine max
  Clone ID: GLYMA-23APR03-CLUSTER115_8
gtttcttaaagacattaatagttaaatggactttctgctggtgcatggtgagaatgctgcttgctgttttctacatccttgtgaaatgtattacgtagacacttgtagactgaattatacccttgacactgggatcttgagctagtttaactgatgagatctggattaggatatttcttgtatagtgtatgagttaataccttccctgaaatgggggaaaaaattgtctgatgaaactgatggatattgtaataagttacatataattattgctcattttgttctttcctatctccttcatataccaacagggcaagccaggctttcatattttgggttgaggacagagcactcttctgtcaggattgggatggaccatttcattcagcccggaagcctttccgcggaccaccagcgcttccttgctacgggtatccgaggggccccgagttctaattgcgccaaaggcaatgaaaaaaggctctcggagcctcctaataggagtgcacaacaagtttctgcgaaaattcctcctcagcaagtgcctagcttcacatcctcttgggctgttgatggcttattggaactacagggctctgaatcacctgagaaaaaggaatctctgcagtttggagagctggaatggcttacagatgtgggtatttttcggcgaacaatttgctcaggaagccttggctgcagctgaagtacctcagcttcccgaaactcataacagtagcagtgttgcttcatacaaaacctccaaatcctacatgtcccgcaaaaagcctaggattgaagtcctaaatgatgatgatgatgatgagtatttttctgtgcccgatctcggctaagtacgtggcttgccatatgggatggtgcatgcatgattggaaaagattaattatgggaaaataattgttttttttaagctctattagtaaattgtcaaaaaagaatattattttcccaaaaaaactattccattcaggcatgttgatatgttgtatattcaattattatgagaacgataattttcacaagttgtgtggagttgattaagtattaaattaaaaaaaaaaaaaaatttttgctggatagcatagaatccatgcctttggggaataaattttccttgtccttatgcttcatacactaggggggattctcccacggtcacatcttccccaatccccctcgaatttgacacggttaattccattttgtttgtatgc

SEQ ID NO: 3116 - DNA, 1510 bp, Glycine max
  Clone ID: GLYMA-23APR03-CLUSTER1167_2
caagctctcttgggaagaaagtttaagccttagctagaaaaaggagagtgagtagtgagttttttgagaagcagaagaaaggaagaaaggtggagtgagtgaattcaaaaagatcacccaccatggggaggcctccttgctgtgacaaagttggcatcaagaaaggtccatggacacctgaggaggatatcatccttgtctcttacatccaagaacatggtccaggaaattggagatcagtgcctactaatactgggttatcaaggtgcagcaaaagttgcaggcttagatggacaaattacctcaggccaggaatcaagagagggaacttcactccccatgaggaaggaatgataattcacttgcaagctctactgggtaacaaatgggcagccatagcttcctatcttccacaaagaacagacaatgacataaagaattattggaacacccatctaaagaagaagctgaagaaatttcaagcagccttggatccacactcagcatcagactcaacagcaagtggtcagtttctaccaaagagctttagtgacagaagaagcttagacatcagcagcagcaacaataatcatggctcatccattaggcttagtcatcagtctcagtcctcttccacaacatatgcctcaagcactgagaacatctcaagactcttggaaggttggatgagatcttccccaaagccactcaagggatcatcatcccaagatgatgaagatattcagctccaaggcatcaatgatgatgataaaaataacaacaactttgaaagcactactaagctagtgaaccttcatcatcttcagcacaaagtaagaaacaaagatgagcatcaagagggtggtggtggtggcgtagataacatggtttctcatgaagagtttgattctattttgtcttttgagaaccttaacaatgctgcttgggacaagtccacttgtgattccatgccagaaaagagttctgaagctgctgctgagtattctgttgatcatcatcatgatatagctgctcatgagaggaacaacattaggcaaaaatctgagaacagtggtgctcctccattgtcatttcttgagaagtggctcttggatgaaagtgttggtcaccaagtggaggagatgatggagttgtctcctatgttctaattaacatggaattgtcaccaattaatcccttcaagtttgggaagtgacattcaaatcttatgatattagtcagatgaaagaagagatcaaaggaatgaaactctttgagatctgactagggtttaatccatttacaatgggttgagattctcagaagctatgggatctctctttcaacttgtaacttggaagtttatgatgaagggtttaattatttcaagtaatactatatgcttagtgcatcttgctctctttgccttgtagaaaactacaaattaatgttaacttcatcagctcaaataattatacaattaataacagttatattttcaagatttgac

SEQ ID NO: 3117 - DNA, 1992 bp, Glycine max
  Clone ID: GLYMA-23APR03-CLUSTER11757_1
gcgacccagctacgtaggcccccccccccgggaaaataaaagatgtctctgcgtgtggcggcagttaatttgctaaaaaaacttcgctttcctgcttcccatgtcttccctgcttccacagtaaccacaaatgcattttccggtaaactcaaactttcccgttggtatcaagctggtgaacatggttggaggatagatcttagggatccttgtctatggattgttatatctggacatgtagcaatgacattaggaattagtgccagcactgtatttgctgaagatgcaacaactgaagcatatcctgataatgacccagggggtgacttaattggattaagaaaaattgaggatggctctgtagtatcaaacatacatacagcaaagtggagagtctttacagataaagcgagagaattttttctacagggaaaactagatgaagctgaaaaactcttcctttctgctatagaagaagctaaagaaggtttcggcgagaaagatccgcatgttgcttctgcatgcaacaatctggcagaattgtacagggtcaaaaaggcatttgacaaagcagaaccattgtatttggaagctatcaacatattagaggaatcttttggtcctgatgatgtacgggttggggtcgctgttcacaaccttgggcagttttaccttggacagcggaagttggaagaagctcgtgttagctatgagcgtgctttgaagataaaaaggcgtgttctggggtatggccattcagaatgttcagatatgaagtcacgtcgagttgctaaagctgaaatggtccagagaaagatcctacatgttatggaattatcaaagggatggtattcccttggacactgttatggggacggggagtcttttctatgcattagaaggcatcgatccctatcacagatatatatgaacttccttcaaattgctgaaaatgtccaggaaggacttacttcctgatatgcatattcattagcagggggatggtatttcttggacactgttattgcaactgaatctttggctctgaccatgcaagcaaatgtttatagagctaaagctgagcttgatcttgcaaagaatcatttgtataattccataatgttcggattagttcatattcagataggtgcaaacttacttcatctagcaagagtggcaatgcttgattgcagtcaacataaaaagttggatgtttctagagctaaagctgagcttgatatggcaaagaatcatttgcataattccataaggatttcatgtcaatgtttagagaaggtattgaaacaaaaggataagttaaagaaattcagtaagcctggagattctagaaaggaaggccaagtagcactggccatattgttgcaatcactcaatacattgtcatcagtggagttagataagcaagaattgcaggagattcaggaaaaagatattaaccttgaggctcgggaggcacttcttcaatgcatttctgcttacaaggagtttgtacataagaggtcaattgctgatacccctgaaataaagaaagaatatctttcatgtttaaagcgcgctcaaaatttgtttggtcataaagttgatgaagagctaagcaatcaaaatgatttccgatagctgtatcaaacaccttgactggatttccccccctatggaggggtgtttacttgaagggatatttttgttgataaagaaaataatttaaaagggaaattcttgctcagaagaaataaatgaaccaagcttgataactaaagtcaattgccactggccatggcatcaaaattattgttaaaccatacttcgtgtggttattaattacattaccttgatattggattgttgtatgctcagtattattctttgatgtcacttcaattgttactattttttttttgtagttaattgttactaattccccctaatcttgttcaagaaataatgttttaccgtgctaaaaaaaaacaaaaa

SEQ ID NO: 3118 - DNA, 1533 bp, Glycine max
  Clone ID: GLYMA-23APR03-CLUSTER118007_1
acttacacaacaaactagtaattaacaacaatttgtgagtctgtgctgactgaatgaacaagaaattatggcattcactttgaccacccttccaacgcccaatgtgtctgtgacgtccttcacccgacgcaccgtctccaactccaaaccaaccctttcatgcaccctctcttcccacccttttaagagagagtacacgagcgtgatgatagtgccgacggggattggcgccgctattggaggatatgccggtgacgctttgcctgtggctcgcgcactctcctccgtcgttgattgccttatctctcaccctaacgtgcttaatgcagcaatgctatactggccaatgcctaatgcattatatgtggaaggttatgctcttgaccgttttgcagaagggttatgggcattacagcctgttcaccaaaacagggtgggcttagttcttgatgcaggaatagaggatgagctccggattcgacagttacaagtagctgatgctgcaagggcttcccttggattgcctgttgtggaatacattgtcacagacatcccgctgaaggtagagaagtgggttgatccagaaacgggccaatcaactgggaggattaagcaccctgattctttacttagagctgtgcatactttactcagcaggtcaaaagtgaatgccattgctgttgttggacgtttcccagatgatgacactgatgatgtagatgactatcggcagggaatgggaatagacttattggcgggagttgaggcagttataagtcatctagtggtgaaggagctccaaattccttgtgcacatgctcctgcaatgtctcgacttcccatgagcctatctcttagtccaaaatcagcagctgaggagattgggtataccttcctaccatgtgtgcttgctggcctgagtaatgctccacaatacttggtcatggactccaaatgcttggaaaaaggttgcatattggcaagtgatgtggattctgtaatccttcccaaagatgcttgtggaggggatgcatctcttgcttttgctagaaataaaaacaaaaagccacttataattactgtggaagaaaatcaaactgttcttgatgacactgcagataaatttggtcttgaagtgctgcatgtatcaaattattgggaggctattggagtgattgcagctcacaaggcagggatagatccattttcacttagacgagataaaattctcaacattgggtgcagttcttttatgcccatcaatggtcactccattccaagagaaagagttgtttcatgattaacatttggtctagagtctagactacaggtatcccttatgggaaacaattttgtttgagtcagaggacttagcattcacaatgtgatagggctaacattcccagtgaagatatttaaccattggagggaatagtgtatttggattgtcttctaggcttatagccagacatgtatttgattctaatatatttttggtccttataattttcctaaaaaaaaaaaaaaatccct

SEQ ID NO: 3119 - DNA, 1385 bp, Glycine max
  unsure (1)..(1385): unsure at all n locations
  Clone ID: GLYMA-23APR03-CLUSTER11882_2
aatgaacctcgatggcgttctctctccctccaccacgttctctccctcaccacttcacgcgccgctccctcctcctgctctccaccaccacaaccaccctctctgtcccatctacaccccctcccactcccatttccacccccaccactcccacagtcactgaccgcgtcttcatggacttcagcctctgccccaacaacttcctccccgaccgcgccgactccctctcccctctctgctccgacaccactctcttgggccgcgtcgtattgggcctctacggcaacctcgtccccctcaccgtctccaatttcaagtccatgtgtcttggcctgaattccacctcatcctcgtacaagaacacgctcgtccacaaggtgttccccggccagtacttcctcgccggccgccagggccgccccgacaagggcgaggtccgcccgccgcacgacctgccgcgcaacaccgacacggtcgccgccaaggcgttcgccctcacgcactcccgccccggngtcgnttcactctcgctctccgaaaacgacgacgatgacgagattaagctcgatcctgggtacaggaatgtggagtgcttaatcaccactggccccgggccttgcccccagctcggtaacaagaacattgtcttcggaacggtgcttgaaggattagatgtcatcacagctatagcttccattcccacatacctaccatttgagcgaattcgccagtttaatgacttggctcaattttttggagatgaaagggctcagaatgcacgtaacatatggaacaggcctcttaagagcgtttatattagtgattgtggggagctgaaagtgacaaagccttccctcacgccttctttgccataatttatttccatgtatgtatatattatccgaggggatttcatgttactggtctatgtaaaatcacactcacatattctttgaaaataaatgatgatgaataaaaccacaagcaagcaacatgaatgacttttgaagttgaaaattaaaaggttttattttagttcattcatttcaaagctgtgaaggacacagtacatacatgcagtgaagttaaacattgatatggtatgccagagtttcttgtaagttagtaatacaacattattattgtgcaaatatccttttctatctgcttcaaataatttcaaagatttacatatttcaaggtgggcttttcttcttttgaagataatctcacgacaggttacttaaattgtcatggcttcaagcacagacagtttcaagggaaaagaaaaggaaaatgaagtctgggatgttacttttgtgtatctcctatggcttccaactcttctgcaggtcgactctagaggatccccgggtaacgagctc

SEQ ID NO: 3120 - DNA, 1383 bp, Glycine max
  unsure (1)..(1383): unsure at all n locations
  Clone ID: GLYMA-23APR03-CLUSTER11941_2
ttttttttttttttttgttttttaaaaatcaatgttaaaattatcattttcaacatgggttttttaaaaattgatgcgaatgtctagacaatatcaatttttaaaacaatggatgttgagatttttaagaaaaccctcaagctcacttctacttcgtcccggtaccctctctctctcaaccctaaatctcaccgtcgccccccaaagcctcccttcttcaatgattcttcttcttctccgtgttcacggcgtcactccattgatatctacctcaaatcgatgagagtggaatgataaaccgaattgtcggcgtgttcgcgaggagaggatgcaacatcgaatcgctcacgtttggcctcaatgaggacaaggctattccttcatctccaaggaggagtttctcggtatggtggagcgagaggagctgctggagtacatgttggtctacagtgactacaagggtatgtcgaagcagcagattcgggagtgtcttgcaaaaggctgcaacttcgttttgagggttgatatttagtggggtgccacattgaaggtgttcgggaagtcagtggtgtttgtggcgacggagagcgagatggtgttggttgagaggctcgtggaccggaaggcggagattatggagtcgttgctggtgaggattggtactgccagggaggagatgaagcatgtcaagaattttgattatgttgtggtcaatgcgaaagggaagcttgataatgcggtcaagttgatggagtctattattgatgctagaaagctagggtttgtcagaggactcctntnttataatggacagtcaacgtgtgaagctggaaaaaagttgtattctctaattgctctttccttgaanatggatgaagatttntttgataagataggtgccgtggacaaaccatcagcttttnttcgccttttgcgctatccnccaggtgaaatgggacctcnccaanagatatgctntgntcattcaganactggngngctcaccctcctattgactgatggagtcctaggactacaggttntaacttcccttttggngcaactttaacaactcattcatgggacttgagaccttttgcattttgaaattattttgtaaataacattattcatttttaccttttttttaaacggtaatttttatttggaatagaaattctaattacaatgtctaatatcatttgtttattttattcggtgatctggtttgaaatagttatctaggaagcatattgaatttagtggatgaaacagtgaactgaattgacacatatagccttgatacctggtgtaatccttcttatgaactgattcaaaaagccagtggctcaaacttaatcacaataggtttttatgcaaaaa

SEQ ID NO: 3121 - DNA, 979 bp, Glycine max
  unsure (1)..(979): unsure at all n locations
  Clone ID: GLYMA-23APR03-CLUSTER119658_1
gtaccgggcccccncctccagagtcagctacgtaggccccccccccaatcagtcaaaggcatgtgtttagtcataccttctcaatgatttggcaaaatatgtttgtggggacttttgtttcatgttggaagttgaagaaacacaaaaatagatatggagtttctaaaaggtttcaggttttatataggccaggaaattacttatgtttctatcactaagtatgggtcctttggtatatatggattttggcatttgtcacgctcattgatatatggttgtcccccaagtttaagttcttacatgccttatctttggcgggttattggaatgtgactgagtatcctgacatgaaagttaatcttaatgttgaaatgatttggcaggagcatgcttataagtcataaccacacgtgtacaatttgtttatttggagctgtcctaaatttgtatcatttcccaaaaggaagactgtgtgcaccaggcctaattgtatgcacaccctcctccttccttctcttagttgtccacaactggagtcactctctaatgccatcaaatgggaagttttgcaaactcctcttaattacgagactcgaggaagcaaagttctcttcactacatgcagtaagagagttgcttcaaccatgcagtcaaataaagcgagtcaactagagcaattacatgaagaacattgctagaaatatgaattttggttcttgtctctcacgttgatgtgtatgacttgttctccatgggactgtgggtattgattgccgtgttttatgttctactttttcatttgtatcattggaattctataattgaaagagtgggaatataaaaatgtgaagggtgttgttttcttttgtttaataagacagcttctatacagaattatcctaagctaaatgaaagaataaaatattagttaatttaaaaaaaaaagacaaaaaaaaaaaaaaagaattcctgacggaag

SEQ ID NO: 3122 - DNA, 1596 bp, Glycine max
  Clone ID: GLYMA-23APR03-CLUSTER120696_1
tcgagtcagctacgtaggccccccccccccgaaaaggcgagtgtgtcatcactcatcataataatacacttctatatactcttttctctctcactcatacgcagaagagagagcagcaaaacccactttctttcgcttttctttctccactaactcaaaaagcctcgccacccttttgcttttcgtttttggattgttgtagatccacaaagataaagaagatgatccaagaattgtcgggtggtgccctcatagcaggagaaagaaaaccttcctccattaatggaggaggtggaggaggaggagttttactcccaattactacaccttctccttcttcttttccctcttccacgaccagtgatgttaccctcacatccacaacaacaactgctgctactactgctgctactgctgctactactactactgctgtcgaaaacctgagatgtcctcgatgtgattcatcgaacaccaagttttgttactacaacaactacaacctcactcagccgcggcacttctgcaagacgtgccgccgctactggaccaaaggtggggctctccggaacgtccccatcggaggcggatgccggaagaataagagcattggcgtggcgagctcggtggcggggaagacagcctcgaccaagatgaaaaccattgcatcggagtttggaaaatcgccgggctttggcggtgggttcgaggtggaacacgaacttccgccaccaccgggccaaatcctctggggatcgccccaaaacacccaccttctagccttgctgagagctacacaaactcaaaaccctaaccctaaccctagtcccatgtccctcaaggaagaaggaaccctattgggccacatggtgagcactgatcagcccttggtttcaaacactttgctgagctaccgaaccttaggctatgatgctgttgcgcaagttccttcttcgcttggtctgtttgggagaaacaatcaagatcaacaacaacaaaatggagggttcctagttggggaacatcacaacaacagtggaattcaagagctttaccagaagctaaggtcatcatcaactgttaataataattattgcagtgataataactcgtcacaaatgtttatggggaacatggcttctaactattcctcttctgtgtccaacaacattttggagacaacctcggttgctgggggtgaattcggatactggaatggtccaactttttctaattggtctgatcttccaaccactaatggcgctggtgcatatccgtaacagaaataactgttttaattttcttcaccagttaaatcttcttgttttcctgttagatagtggcatagtgctcctaattaatcactttgtatcttaagggtttggttattttgtggtttcttttggttcgggtggtatatgaatatggatctagaactttttcttttctaattccctctcaagccttctatctttttttttttttttggtgtaagtttggttgatggtgtgcttggctaagttatctatggtttatttcgagggtacaagagttcaaaactgaatggagaaatcagtgtatttttaatgcttcata

SEQ ID NO: 3123 - DNA, 1383 bp, Glycine max
  Clone ID: GLYMA-23APR03-CLUSTER12071_1
tttttcttttttttttttgattcacaacatttttcgtttttctttttcttttaattatccaactcaccttatatggacaaatgtaagaataagttcatagaatttcaatttcataaaatttaaggtatttgatgtaattctaaagtcactcttgctcacacaccctgatcaatgaactaatctagaccccttaattactatcattcatcattttgatcaggaacgcttattaaggccatgaaaaaaacgatgctttctcctcttcgagtgcctccgagattcttttgtcatgacataggagacaaattgaacctgagaattattccgcacaccaaaattttgaagtgcttcattatcatctaggagcttgttgttatggcatgataaacaataatttgcccatacgtgcttccaggaaatatggcggtgacccatgctggattgttccatgtcatttaccttcttcttgatggcaagtttcaaatccttgactgtcgctgaattcatcactatcacatcaagtgtagttccatccaatttcaggacagaaatgcgcatggcactacccaattcaaggttgatgagagtgtaaacatctgcaaaagttgggttcttggggacatcagaaagtataggatcatctagcaaggttgtcagcaatgagttcaaccttgccttcttcacgctgctcttgttatattcttccatgtttatgctcctaagctttccaaaacaactaactttttggtcagcctgcatacaattgaggcgagggaacattattcccttcaatcttaatttaagtacatgtattcaaatccaacaatacatattctcttggacctagacattagtaaaatggctactgtttattattaccaaacaacaactaacatagcacaacaccacaccaactaacaggtagtctccaaattgagcaaaaagaataatttctttgactcatgttacttgaaacacactaaatgtttgtctgtgtagagtagcaattgtttgtttctaaagcatagaacttcaaatagtggacagaataatttttattttattttcccacagcaccaaaggatacacagatttcattttaaagaaaaatatcttaaacgaatagcagcactctgattgaatgataagaagcttttgcaacaatgcttcctggaatgcagaaaacatgaacaatttaatttgtataataatagaacatcatggaccagttgaagtgaaaattcacctagttttgtgtgcaggaaaaaaaaatacacaactctctacaaaatactgcatccacttatccaaacacacgtgttagaatagaacattaacatgatgaaattacactaaatctggggggggggcctacgtagctga

SEQ ID NO: 3124 - DNA, 1680 bp, Glycine max
  Clone ID: GLYMA-23APR03-CLUSTER121245_1
ggatggtgttgcatcttccgcgggcgcaatggagcaagagaatcacaaaatcaaagcagtgagtttgcttcgaagcagaatctgtgatcccaaatgcatctcatcttcggcgggcgcaatggagcaagagaattacaaaatcaaggcagtgaatttgcttcgaagcagaatctgtgatcccaaattcatcttcatcaatgaatctccagaaagcaaccacagcaagctgaaattcatgatatcgagttcggtgacggaggcgtgcaacaattctattcttcttctcggtccccgcggctctggcaagaatgcggttttggaacttgtcattcaagatttgctgcaagaatatccggactcgatctcagtgatgaagtggaaccatttgttaccaactcccgacatctggtggctctcggaaatagctatgcattaatgcatggagcagtaattgctattctggaaaggtttctcctgtgatgacagggtaaaatttatggtgtctatgctttgctagagtggatgagctcataaaactctaattttgttgttggatgagtttgacctgtttgctcagggtaaacagagattactctatagcttgctagatgcaatgcaatcaataacatcacaggctgttgtacttggcattagttgccgtctggatgcagatcagctgttggagaaaagggtacgatctcgtttttcacatagaaagctgttgttcctaccaccttcaatagaagattcacaaaagttactgatgcacatgctgacattaccaattgattcaagctttccacatgcttatgctgttgaatttaacagaaaggtccaaaatattatagaagatagaaggttcaaagaaaccctcaataaatatttaaatgttgactcctctgtcaaacatttgctgaggttcctattctgtgcagtctctcatatggatttgcagactgggttcctgtctcgggagaactttgaaattgcatttacaagtatccagaggcagcccaaactggaatgtttaagaaattgctccattttagaactccaaattttggtttgcatgaagagattggaagttaaagagcaaagtttatgcaacttcaattctgtgatgaaagagtatataagcaccctgacttctgaacgttatgcaagacatgtctgcttaagggcatttgaacaccttatacatcgtgaattgatatgtttcacagacaatagaggacaaagtttgtctgttgaattccgtcctgtaaagcttttaatttcatctgctgaactacatcaaggactaagagcaaatacttcatgccctcctaagcttctaaaattaatggatcgtgaaggctaaaaccacttgagggacacgactgtttgtgtttcacgttatactgtatgtggtccgattccaaattctgataaattcagcctgtttatgaataaataaaatgttttgtgtagtcaacactttttcgtgattataattggtgtacatggaaatgacttcagtttatttatttttattcatgtcttctgagcagacaattttcagtatttgttatatattttttatccggatatacgccattacataattagtagattacaaatcaagcactattcatgtattatcacctcattaaatgaatttgtttataaccctttgtttac

SEQ ID NO: 3125 - DNA, 2291 bp, Glycine max
  Clone ID: GLYMA-23APR03-CLUSTER12141_1
tcctccgcaactaagcgagagcgttggaacatggccaagtccaccgctcctccggataattatggtcacagtccagttcactacgccgtcgcattgggcgaccacaccaccctctccagaatcatatcctcactccctcgtctccccgatccctctcttattcaaacagaatccgattccctcgctcaagaaaaaatcgccgatcagatctccctcgtcctcgaccgccgcgacgttccttatggagaaacccctctccacctcgccgtccgactcaacgaccttttttccgcccgcgccctcgccaccgccggcgccgacgtctccctccagaactccgccggctggaacgctttgcaggaggcgctatgccgccgcgcctccgacatcgcgctcgtcctcctccgccttcaccatcgcaacgcctggtccaagtggcgccgtcgcctcccgcgggtcatcgccgcgctacgccgcatgcgtgacttctacatggagatctccttccacttcgagagctccctcattcccttcgtcggaaagatcgctccctccgacacctacaaaatctggaagcgagacggcaacctccgcgctgacacctctctcgccggcttcgacggcctcaagatccagcgcgccgaccagagcttcctcttccttggagacggcgatcacacgcacgacgtcccctccggttcgctcctcgtcctcaaccgcgacgaccgcaaaatcttcgacgccttcgagaacgccggaggaccgatgaacgagtccgacctcgccggattctgctcgcagactagcgtgtaccgtcctggcatggacgtgacgaaggcagagcttgtaggcagaatgaattggcgaaggcaagagaaaacagagagcgtgggagagtggaaggcgaaggtgtacgaaatgcacaacgtggttttcagtttccggtcacggaaagtggccggcagcgagtctgacgtggcagggagcgagcaggtgctgccgttggaactggacgaagacgacgacggttttctcgttgcggagaatccgaatttcgggttcccaatgccagacaagagaagacacagtagcttcgttcgagaagagacagagtgggtcccaatgggaaggaaaagcctcgacctaacgtccgtaacggccccacagccgcgaagcgtgaccatgcctactcagaccaaggaaaaggagtacgttagaagcttacggccgtcagtgtggctaacggagcagtttccgttaaagaccgaggagcttctgccgttactcgacatactcgccaataaggtcaaagcagtgaggaggcttagagagttactcactaccacgttcccgccgggaactttccccgttaaggtaagggcattatgggaataaccacatttttttgagtcttttttatttataattaaatcagattctattttggctttactattgtctattagtctattattcttattttggcctggtctttttgtgggcccgacttgaaaaatccctctatggggattagaatttggaccggtggagcccatacgatgatttgatgtaaaaataataattgggatgtgggttcaggtggctataccggtggtccctacagtgagggtggtgattacgttcacaaagttcgtggagctgcaacctctggagcaattctacactccattctccagtccaaggcatttgctcagtgccgcaggggcaggcagaggagatgaggaacagagcaaagcagaaaacaggtgctcttcttcgagctcatcaacgtggctgagacgaaataatagcgtgtcgaataaacaacgatgtatggcatttgattcagacccttttaagattcctgcgggatacacatggaccagtgtggatgataaatctcgtaaaatgaagaaatccaagtccgtcagaaagcctaagtaagccaatggagttaggtgtttttaacgttcaatatgtagatagatattccgtctattttttttactcaactggggcttggggtggagaggtaaatggtgttcgttcacaaagaagctggagcttccaattgaatcaccgaaaaggtgctttagaagctatcgctacatttctttgcttacagttttgttttatctgtcttcattacatgcattcattcttttctatcagattatggtcttatctcatacgggcaatatttgatgttgcgatattggtccgtcaagattactcacacttttagagaagggaataggacagctgattcattagcaaaaaaaaaaaaaaaa

SEQ ID NO: 3126 - DNA, 1377 bp, Glycine max
  Clone ID: GLYMA-23APR03-CLUSTER12163_1
tcagctacgtaggccccccccccccccatcaattcaagtcaaaatctaaaacaaaggtgtggctgaatatgcagcaaaccattgcagagcttacaagaacagagcatagcatgctctgtttgtagtttgaactctgaagtgtaggagaaggagagagagagagagagtcaaacaatggcacacaaaaccctcttcaaaccaagtctcatcctcacactcagactcaacaaaacggccatttcattctcacaccatcatccatttcgccactcgcaaccaccctttcccttcctcaacactagtccaatctcacttcctccaacaacgagaattactaactacacccacttatggtgctctaattacaccaccgtcagcaccatcgaggagggttccgaaaaatgctacctgaacctctcggacgaggagctcatgcggcagtgcgaaatggacacgtttaaggcctcgggaccaggtggtcagcaccgtaacaagcgtgagtccgcagtgcgcctcaaacacctacccacaggaatcattgctcaggcttcagaagatcgctcccagcacaagaaccgcgcttcagcgattaatcgccttcgctctcttatagctctcaaagttaggaaaacagtggatcttgaagcttattcaccacctcgagagcttcttcagatattgcctcctaaatcatccattagagggtcagattgtggttcacaaatcggacctaataatccaaagtttgcatcgggaatgcaagctcttttggatctcatttttgcagttgaggggtctgtctcagaagctgcaaaatatcttgggttatccactggggcactgtctcggttaatcctatctatgattcacttagaaaggaagtaaacgatctgcgggcaacaaagggtatgaagcctctcaagtagaagcactcaacttttcattccttatgcagaagaaaattctttgaacctgtatgaggcattttcttcattaaagaattgaggtagacaatgaaaaatactgaagctattgagaagaaagggggcaggttgctgaattttcagattgtagagaactcattctacaaaactcaatgagtatgttgtagaaagctggtgccttaaggtgtactagaggagcattgattgagatcacaacctaaaatagaagatgcatttttctgtagatcttttcaaacaaaataaatttcttggttttctggctctgtatacagttttttatttttttcttgtttatgccaaacatcaaattaagtttgacaacgtgagatacaggatgcagatatttgtagcttttatttaaaaaaaattatatttatcaatttcttgatttttcaaaaaaaaaaaaaaaaaa

SEQ ID NO: 3127 - DNA, 3546 bp, Glycine max
  Clone ID: GLYMA-23APR03-CLUSTER1221_2
ccacgcgtccgataagaaaggcgtcgtttgccggcatgcgtggtgagcaaggacgaaagaagatgaagatgggtgaactcgaaaattcggaaaactataaaggaggggaagaaaaactgaacacgttgatctcctttaactcttgacaaattgaacactttctcttctctcaagtggcgtgttagttcattcaccaatttctatgactgcttctgcaattcacatggatccctttgtttccacttcatcatcccttcttattataattctccgatctcccatgtttccctgcaagagggcctcaacaaccatatcaacgaggcgcgcatcagaaccatgcttcatcgccgaagttagtttcttcttgttcacggtcacaaatcgagacgcgccttgccggaagttgcagaaacaaccttcaccagcaacctacgattaacccatgacgaccagttcctccggttgcggaagaactaactcggcgaaaaaaaaaacccaaataaaaaggagacagacatgagcgattatctcaaagagaaaggaggtcccaggttggttatcatgggagagaccaaacaacttgttacccttttgacacgatttcaagcggcaatgaaaatgatcaaggacatagtggaaaaaagtagatcgagtaaaaagagcaaacgattactgaggaaaaccctcaagaatatgactcctctgctgcaggaaatcaatcaatacaatgaacacttggaaccaccccgagaagaaatcaacactcttatgaaagaaaaagatgcagtggaagagcttgtgtgctattcctgctccaggagtatttggtggaccaaatttctctcttggcttccgctctacggggacggactttggcataacaagaataatccccttgctgcagatgacaaccaagttaagtatatcaaaaacacactgtatgaggtgaaagaggttcttgagcttctagacatagagaattttcagcagaaacttaaaggtgttggatcaccaatcaagtgtccttttggtgttcctgaaaaccctggattcactgttgggttgaatccactgttgagcaagttgaagatggaggttctcagggacggtatgtccacccatttgttgactggtttgggtggatctggtaaaacaactttggctacaaagctctgtagggatgaagaagtcaagggtaaattcaaggaaaatattttatttttcaccttctcacaaacgcctaagttgaagaatatcatagaaagactatttgaacattgtggataccacgttcctgagtttataagtgatgaagatgcaattaaacggttggaaattttgctgcggaaaattgagggaagtccacttttgttggtcttggatgatgtttggcctggatcagaagccctcattgagaaatttcaattccagatgtctgattataaaattgtggtgacttctagggttgcatttcctaaatatggcaccccatatgttttaaaaccacttgctcatgaagatgcaatgaccctattccgacatcatgctctcttggaaaaaagcagttcacatattcctgacaaagaaattgtccaaaaggtgcttattttgctttctgacattgggagtaatctgtaccagtcctttgtgtctgaagccattgttgatttagagagtacaaagttgtgttttgactcctcaaaccaatattatggttgtgagatattgcaagggtttaccgcttgccgttaaagtgattggtagatcactcagtcatcggcctattgagatgtggcaaaagatggtggaggaattgtcacaaggtcattctatacttgattctaatattgaattacttacatgcttccaaaagctcttgcatgttttggaagataatcccaacaacaaggagtgcttcatggacttggggttatttcctgaagaccaaagaattcctcttcctgttcttattgatatatgggcagtgttatatggatttgatgatgacggcatagaagcaatggacatcataaataaattagactccatgaatctggttaatgtcttagtagcaaggaaaaattcaagtgactcagacaattactactacaataaccactacgtcatcctccatgatcttctaagagagcttgcaatctatcaaaacaacctggaaccaattgaaaagagaaaaagactgattaatgacattaatgaaaccggggtgaagcaacaaggcatgatagcccggttattgtcaaaatttctcagatgcagtgttaaacagacactccaacaggtccccgcccgcacattgtctatatcagctgatgaaacgaacacttcagaccagtcccacatacaaccatcccaagctgaagttctggttttaaatcttcaaactaagaagtactcctttccagagtacatggagaaaatgagcgaactaaaagttcttatcatgacaaattatggttttcatccctgtgaacttgaaaattgcaaactacccagctctgtatcaaacctgaaaagaatcagactagagcggatttctgttccccacgtaggggcattgaaaaatcttgaaaagttatccctctacatgtgtagtaacataagtcagatttttgaaaatggtaccatcccagtttcagattcatttccaaaactatcagatttgaacattgactattgcaaggatatggtggaattacctactgggatctgtgatattaccccactaaagaagctcagtattactaattgccacaagcttagttctctgccccaaaacattggaaagttgttgaatttggaactcctgaacctaagttcctgcactgatttggaagagataccagattctattgtaaaactttctaagctaagacttcttgacctctcaaactgcataagcctttcaattttaccagaggacattggtgatctatgcaatctcaggaatctcaatatgacaagctgtgcaaggtgtgaattgccgtactcagtaaccaatcttgagaatttaaaagtggtggtatgtgatgaagagacagctgcttcatgggaagcatttgaagctatgcttccaaatctgaagttagaggttcctcgagttgaggttaacttaaactggcttcattcaattagctcttaagacatgtcctgcttcatggaaagcatttgaagctatgctttcccaatctcaagtttgaggttcctcaagttgatgttaactgaagctggtttcattcaatttgctcctatgacctctttctataaaaatgttagaccaatgatcgtaactgtttcatgtgaaataatcttgtttaaaatagggataataaatgtgtattcaagttgctgtagtagtatttgcatgtcgtgcaaacagtactatgctacttgaaagaagttggtgattttatgtgttgtgtgttgtcacgattggacatcttagcataatgatgccaacaaaataattgaactatgataacttcaaaagtttgtttttatgaagtaggttttcttatcttcaaaaat

SEQ ID NO: 3128 - DNA, 1686 bp, Glycine max
  unsure (1)..(1686): unsure at all n locations
  Clone ID: GLYMA-23APR03-CLUSTER122_1
gtaacatcgttctctcgtttgtgttttttcctttaaaatggaaaatcagctacgtaggccccccccccatctacgcctcctcttacagcccttccaccaactacagatccttccgtgaccatccccccgccgacaccatgttcctctcccaccacctccaccaccataccgacgcctcctacgccgtcgcctttcgcttcccctcctccgccctctccgccgtcgaagccgccgacattgcccctcccggcgtcacctcccgaatcgcctcctccgccgcctccgcgaatttcctctcctcctggccccctgtcgctgccgccgccgccgcgccctccgccctcgacctcaaacgctcctccgacgctctctaccatccaacaattttgggtacaattgggcaaagtgaagcttggtattctacaaacccactggccaagcgccctagatatgaaagtgcttccaaaggttccaaatgttgttacaagtgaaactcctcctgagagaccaggggaaccggattgtccatactttctgaaaactcaaagatgcaagtttggttcaaagtgcaaatttaatcatcccaaggtttcctctgaaaatgctgatgtttcttctggcttacctgagaggccatctgagcccccttgcgcgttctacatgaaaactggaaaatgtagatatggcactgcttgtaaattccatcaccccaaggatatccagattcagttgtctgacgacttgagtcaaaatgttgcacagacacaaacaaattctatgatgggtggagctactggagatacacagccaattaaatctcttatatctccgtcgttgcaaaatagcaaagggcttccagtaagactgggggaagttgattgtccattctacatgaaaactgggagttgcaagtatggtgtcagttgccgctacaatcatcctgacaggaatgcaattaatccacccattgctggattaggtgcctctattttgccatcctcggctgctaatctgaatattggacttcttaatccagctgtttctgcttatcaagcttttgaaccaaggctgtcaaatccaatggtgggaattgcagaaactatctatcctcagcgacctggacagattgaatgcgatttttatatgaaaactggcgagtgtaaatttggggaaagatgcaagtaccatcacccaattgaccgctcagcactgtcactgtcaaagcaggctactgttaaactcactcctgcaggattaccaagaagagagggtgatgttatctgtccttattatttaaaaactggaacatgcaagtttggtgcaacctgcaagtttgaccacccaccacctggagaagttatggagatggcaaaatcacaaggaacatcagccaatggagaggaagctgaaggcgatacttctgctctggaacaactttgagatctttcatgaaaacttgactctgtatttgatgagcccatttatttcttccttatatgttttttctgatcatgatatcaacagctgtggctgaagacctgctttgtttaatttagtgactaatttgtctcttgattggtatgagtgctgttttttaatggagtgttgctaggtgcacccagcaatttacaaggattttttttccccataaaaaaccttttttttccggaggtnncnaaaaaaaaa

SEQ ID NO: 3129 - DNA, 1090 bp, Glycine max
  Clone ID: GLYMA-23APR03-CLUSTER123023_1
cacgagaccattacctagaacatcctaatcgaaaaaaagataatgtctagacacaaactgctacgccaaaatactagcttcaacgcagcttgtctttgactcttctttcttggatcttgaagagccatttagttagctagatctgagtttaggaaacctaacaaactacacataactacttcactcacttgtgtttgagcctttccaccatcaaaatgctgagtgaaagttccaacacccacaactcatctaaaatgtccttcagaataacgaaggaggatgggttcttctctaggctaatagccaaggaaactaccacccccaactcttcttcaaggatcttctactacggagaaacttcggttgcggttcctttcacatgggaggcacaacctggtaccccgaaacaccctttgtcagagacatctttgccacctcttacacccccaccttcctacttttcaagccccaaaaagtcccacaacaccaagagaagaaactactactcaaataaggccagcaacatattttcaagcatttttctgaggcttgtaggatcaagaaagtctcttcataatcatcatcatgtgtcaccatcgtcatcttggtcgtcaccttcttcatcgtcttcatcttcttcttcgtggtctttggcgcattataataataataataataactcatcgccctcgttttccatgagagacaaaggtcgaggtcaaggaggaagaagcagcaaacacaacaaatgttctaatggatttagaggctgctatccctttggcaacatgaggaacgcaaatgtaagccatggtagtgtggactaattaattagttagtttaatttgatctattttggaaattaactattctgcatgattttaatatttttgtagagatcttcgaaagtttatatagctgctaagtgctaagtgtatttatttggaagatgttagtgttggcctgggatgtcccccccttttccaaaaaaaaaaaaaaaaaaaaaaaaaaaaaaaaaaaaaaaaaaaaaaaaaaaagaaaaaaaaaaaaaaaaagggggggaaaaaaaaaaaaaaaaaaaaaaaaatgt

SEQ ID NO: 3130 - DNA, 950 bp, Glycine max
  unsure (1)..(950): unsure at all n locations
  Clone ID: GLYMA-23APR03-CLUSTER12306_1
aaaccatttctcttccaaattttccttctgagaaaaaagcatattaatgataatgtcctttcccattttcttcttcactcttctacctttactattccactattctcattgcaccaccattctagttgatgggtcttcagagtggaagaaccccacagttcacattggagattccatcattttcaatcacaagcaacaccacaacatctacattttcaagaaccagaaagcctttgacctctgcaatttcacacaagcaactcttctcaccaaccccaacactgcttcctacatgtggcatccatcacggcctggtttcttctactttagcttcaatgatgggtctctcaaagcatgtcaagcttctcagaagctagcaattaaggtcatcacttcagtagcagcggcagccacaccacacgcttcagcaatgcctccagctccattttctggtgaagtgtcaccatctcctttatatccatggcattacaataatcctctgcatgcagcttcacctggtccttcaccttcagcaagtgtgactgctccaatggtgccatataaaagtagcagcatgccctttattagcagtaaccctgcagttcctcttcccactgatgaagttgactctgcttcttctatacaccctcttcccacctctagtggtcatgaactacaggtgatgattggatcttttggacttctgatagttgtgcacaccattactttactgctgctataagatgtgcgagatagggagtgaatagggtgtgggaccagagattctgattaagtctaaagtagcttttaagacattattataccttgtattaagaaactttaagacatgattataccttgatgctcttacattttctttcagattgtagctgccactttntgttctttggatttggagcataattgattaccacatttgttttaatacc

SEQ ID NO: 3131 - DNA, 1447 bp, Glycine max
  unsure (1)..(1447): unsure at all n locations
  Clone ID: GLYMA-23APR03-CLUSTER12485_1
gccgctctagaattagtggattccccgggctgccagaatccgcccgagaccaattacctagaacaatccttccggaaaaaaaaaaataaataaaagaaagtgctgcagatttgtgcgttaaagaaaaaaaataaaaaaaaaatatcatggcagcgagtgggggttgcagcagcagcttcttaacattgtcttgtgcaggtgcggcgcaaaatcaacagcgtcacaccctagaacgttttttggagttcctcacaagaatcagagaaagaggaaaacaccgcaaggttagttgtggttgcggtgactcaaggctctgctgaatcaagcaagtccgacgaaaaaatcccttcgtgggccaaaccggactccgatgaaccaccgccatgggtccgggatgagcccaacaacaaaaacagcaacaattcgcaacaagaagaagaatttgagatccccttctatgcttatttgcttgcctctgccatcactgcaattgccgctataggttccattttcgaatatgtgaaccaaaggccggtcttcggagtattaagctccgacagcgtgttttatgctcccttgcttggtttctttgtcttcaccggcattccctcctcggcttttctgtggttcaagtctgttcaagctgctaacaaggaagcggaggaacaagacaagaaggatggttatttataggttgcgagtgcacttctgtgttgaacactctttctttgttgtgttgatgtaagttattatatatgaggaatgctgaagcaccatgccattgcgtgatcaagtgcaaatggtttgtgctgttatcaagtaaatcatatgaaaatgcttgacttcaaaaaaaaaaaaaaaaaagcttatcgatcccccccacctccggggcgccccacgatgcctacttcttccttatagtgaatcgcattacttctggctcactggagcgactttttacaacggtcgggacttgggaaacccctgggtcgtaagctatgttacacctcccttatatgacttaccccttttttccctggctggcgctttaacataaagaagtttcacactgattagtcgcttacacacatataccgacgacttcattggcgatacgcctatattatccgattagcatgcctatatgattagggtctcatatacacgtacacaccacctcggtgatttcactcacacaatcaaccgccccatcccaccgcttgaaaatatatctttctaactcctataaccgcgtggactttatcccccccacccgctcatatagctattcaccttatctctctgtatcacccgctttggtttnnntgtgnntnttcntgctttgtntggggtcngcggttggtntgtttaaaaaanctccccnnnnnnnnnngnngggcggccgcctntattctgctcgtcgccccaagaattnnttccggnccgg

SEQ ID NO: 3132 - DNA, 890 bp, Glycine max
  unsure (1)..(890): unsure at all n locations
  Clone ID: GLYMA-23APR03-CLUSTER12485_3
tggacctacgctggagggtggatcaaacaaagctggaagcttgcaccatgtgtttgggagccgcttgaaggggcgttagggggtccaggcggggtgaccgggagattccccgggggggccgtggtcgggggaccagcgcaggcgggagccaaggaggtaattcttaatgtgtgtttccgggcagcgagtggggggttgcaccaacagtttattaacaatgttttgtgcaggtgcgggacaaaatcatcacgcgtcgcaccctagaacgttttttggagttcctcgcggggatcagagaaagaggaaaactccgcataggttagttgtggttgcggtgactcaaggctctgctgaatcaagcaagtccgacgaaaaaatcccttcgtgggccaaaccggactccgatgaaccaccgccatgggtccgggatgagctcaacaacaaaaacagcaacaattcgcaacaagaagaagaatttgagatccccttctatgcttatttgcttgcctctgccatcactgcaattgccgctataggttccattttcgaatatgtgaaccaaaggccggtcttcggagtattaagctctgacagcgtgttttatgctcccttgcttggtttttttgtcttcaccggcattccctcatcggcttttctgtggttcaagtctgttcaagctgctaacaaggaagcggaggaacaagataagagggatggttatttgtagggtgcgagtgcacttctgtgttgaacactctttctttgttttattgatgtaagttatatgaggaaattgcacataatgcctattgtatgtcacactttaaatttaatgtgaatattcatgctttgtatgaaatcacagattagtatgataaaatnttttttnn

SEQ ID NO: 3133 - DNA, 1965 bp, Glycine max
  Clone ID: GLYMA-23APR03-CLUSTER12505_1
tcagctccgtaggcccccatcccgaaccggaaatagctcaacgccgcatctgttctccctccaaaagaattcaggtcatggatgtgttgttgttgttattattatgtgttctcttggttggtttgccaaacctggctatagtagagagtcgcagggctcccgttctggactactttgagtattgtgctatgagctgcagagcttacagtgcctcgttggaagaatttggaggggttggtgatggaacatcttagatgactagagccttttaggttgttgtaaagatttggagtctttgttgaattaccaaacctggccatagtagagtttcgcagggctactgttctgctgtactttgagtattgtgctatgagctgcagagcttacagtgcctcattggaagaatttggaggggttggtgatggaacaactttgaacacaaaagcctttcaggcagccatagatcatctgagtcagtatgcatcaagtggtggttctcaactttatgttcccccatgaaaatggatcctcgctgatgtaatcatcaccggggacactttattcctacacaaggatgctgtgattcttgcctctcaggatgagaatgactggccggtgattgatcccttgccatcttatggtagagggagggacacacaaggtggaaggtttagcagcctaatttttggaaccaacctcactgatgtaatcataactggggacaatggcacaatagatggacaaggtgatctgtggtggcaaaaattccgcaagggggagctcaagtatacccggccttacctgattgaaatcatgtactcagataatgttcaaatatccaatctcactttggttaattctccatcgtggaatgtacatcctatatacagcagcaaccttgttgttcaaggaatcacaattcttgctcctgtgacatccccaaatacagatggaatcaaccctgactcttgcacaaacacgcgaattgaggactgttacattgtctctggggatgactgtgtggctgtgaagagcggttgggatgagtatggtatagcttatggaatgccaacaaagcagcttgtaattagaagactcacttgtatttctccattcagtgctgtgattgctttagggagtgagatgtctggtgggattcaggacgtcagagctgaggacattgtagccatcaattcagaatcaggggtcagaatcaaaactgctgtaggaagagggggttatgtcaaggacatatttgttagaagaatgaccatgaaaaccatgaaatgggcattttggatgacaggaaattatgggtctcatgctgatgacaactatgatcctaatgcacttcctgtgattcagaacattaattatcgtgatatggttgctgagaatgtcactatggcagcaaggttggagggtatatctggtgaccctttcactggaatctgcatatccaatgtaaccattcaactggcaaagaaggctaagaaagttccatggacttgcactgatattgctggaatttcaagtgatgtgactcctgctccttgtggtctgttgccagaccagggagaagagaagattggggcatgtaccttcccagaagaaagtttgcccatcgaagatatcaaggttcaaacgtgcacttacagaaggaatttatgaatgtaaaaggaatgaccaagtttaagggaacaatccaaagcaatgtaatacttcaaaaattgtatttaaaaatattgtgttcttataaagactctgaacaaggcaatgacaacaatgatacagaaatgagtcaataataaatacacattttagtcgtctactagttctagatcgcgatttttgcacggaccttgcaaaacataaataggtagaagtaacgagcacacagttttttgattgctattgctgcattcaaaaggaagatagtttcattatgcagactcattattgatc

SEQ ID NO: 3134 - DNA, 788 bp, Glycine max
  unsure (1)..(788): unsure at all n locations
  Clone ID: GLYMA-23APR03-CLUSTER1250_2
ctanaaatcagagcttcgatgcagtacaatttcctatgccaagaatgtgcagtcatactggtggtatacatcagagagaggtgcgattgccatgccacataaagtacaaattcaaaatgcattcttgttttaaaatttcgcaaagcagctacaaatgtttcagatacaaatttattttagagactggacaaaagaaagtaccagcatgtaaagaacattcaagaagcagaccaaattctgatagagatggctgaaataacatcaccagacatcgggacgcaactcaccacttgctgggggcacccatctactagagtgatacacactttcaccaactttccaaccaggcacatccttcatcacttctgcctcatactcgagatatttatgccactctttaacaaatctctcatcctcttcagcctgtagcacgggcagtatggatcggcgggcagcatatttttcttccttcagggcccttcggatcttgttgccctggccgacctggtacatgccccaagagaaagcgccgaaggtggtgaggaagatggcaacggcgctggggcccttgttcgggatgcgccgggcgaaccggaccggagcgaacccgcccggcggtggaccgtcctggagaaccggcatgtccttcacgctcgccatcccgggcttcttccttatatgtgcctccgtcatctttctttcttcgccgcgatctcttctcttcttcttctctggctacgatacaataacaacaacaatggaatgcacgcacgcacgctctcgctttt

SEQ ID NO: 3135 - DNA, 1978 bp, Glycine max
  Clone ID: GLYMA-23APR03-CLUSTER12636_14
aaaattttcaaagtcgaagcgagaacttgccatttcgagggttttagtgtgttagtggttttctaaaatttgcaagaacatgggtttcaacattcaaccctatgggattcagtccatgctcaaggaaggccataagcacctttctggcctggatgaagcggttctcaagaacatcgacgcctgcaaacaactttccactatcactcgaacttccctcggtcccaatgggatgaataagatggttataaatcacttggacaagctttttgtcacgaacgatgctgggacgattgtgaatgaacttgaagttcagcatcctgctgccaaggttttggttttggctgggaaggctcaacaagaggagattggggatggagctaatttaactatttcatttgctggggagctcctgcagggtgccgaggaacttatcaggatgggtttgcatccgagcgagatcatcagtggatacactaaagcaatcaacaagactgttcaaatattggatgaactagttgaggatggttctgacaatatggatgttcgtgataaggaacaagttatttcaagaatgaaagcagccgttgccagcaagcaatttggtcaagaagatatcatatgttcgcttgttgctgatgcatgcatccaagtgtgccccaaaaaccctgcaaactttaatgtggacaacgttcgtgttgcaaagctcttgggagggggcttgcataacagtactgtagttcgaggattggttctgaaaagtgatgctgtcgggactataaagcaagcagaaaaggcgaaggttgctgtgtttgctagtggtgttgatacatctgcaactgagactaaaggaactgtcctcatacatacagctgagcagctagaaaattattcaaaaactgaagaggctaaagtagaggagctcatcaaggcagtagcagattcaggtgccaaagtgattgtcagtggaggagcagtaggagaaatggctttgcatttctgtgagcgttacaagcttatggttctgaaaatcagctcaaagtttgaactacgtcgattttgccggacaaccggctctgttgccatgctaaaactttgccaaccaaacccagatgatcttggatatgtagattccgtttcagttcaggaaattggtggtgtcagggtgaccattgtgaaaaatgaagagggtggaaattctgtagccactgttgttttacgaggaagtactgatagtatactagatgatcttgaaagagcagtggatgatggagtgaacacttacaaggcaatgtgcagggatagccgctttgtacctggagctgcagctactgaaattgagttagctaaaagggtgaaagacttttccttcaaggagacagggttggatcagtatgctattgcaaaatttgctgaaagttttgaaatgattcctagaactttggctgagaatgctggcctaaatgcaatggagatcatatcttctctgtatgcagaacatgcatctggaaatgccaaagttggcattgatttggaagaaggcatatgtaaggatgtctcaaccttgagcatttgggatctccatgtgactaagttatttgctcttaaatatgctgcagatgctgcatgcactgtactacgtgtggaccagattattatggcaaaaccagctggtggtccaaggagagaacagcctgctggtggtatggatgaagactaaaattattgtgggaattgatggtttgctttggtcatgtttgtatctcagcatgatggcttgaatttgccttaggcatgttttcttgatttagactttttagtagtggtggcgatcttaacaaattttgaattttgttttgctatgaaatactaagagatgtggtctgtaaatttacattttattcatagccttattgtgagtggtgatgttaatttgctgagcatggcctttgtttgagatttcaaaaaaaaaaaaaaaaaa

SEQ ID NO: 3136 - DNA, 2182 bp, Glycine max
  Clone ID: GLYMA-23APR03-CLUSTER12822_1
ggaatacacaatcaatgaaaataaataaaatcaacaatactcatgaaatgagttcatgtacaatatctgtatatacatggaatatcaatataaaatatgtacataaactacgcctgatcagtgtgtcgcttgcgtttacacctaacgtatactagatagtcctgtgtcacactcttgaccaatctgaggcattcttcgatcacctcatgtgtcgatgagccaggcgtgaccacccctagactcagatggcgctccaacctctcagtaatgtcatcacaaactttcactgcatgtctaggctcctccacagatgtggacgatgctcctggcttcggcatgtgagggatatccgtctacggggcctgagggacgactcggggctgtgaggcgtgaccatgaggtagaggatctaatgcgtggcctggtgtcatgaaaggatgggagatgcggaagaaccagtccatgtagtcactggaacacgcccctagcaccacgcacacctcacctacaggtacgatatgaccctcgtagtgcatccacctgtcgtgtatatcatcatacgagacccatgaatcgacaggtggagcaggaatggctggcgtgtaaccaaactgccgcacgaccttctccggtcggtaatacacagcaacaggcccccagcgcaagagaccggagtagcatgatctgacgtggaagtcctgggcttcccgatgctccccatacgggatccaacagacatctgaaatccggagtcgatccaggcgctccctatacgacggcgtgcgaatgctcttcacggtcttcttcgtcgcaatccacctgcacgcacgcggagaagcctcgtcgtagtcctgatcagcggtggactccgcaactgagggaaagtgctcgtaaatccagcactgcagcagtgtgatgtaaccgccaagctgtcgactgtggctcatggatgcatcgttcagctggtcgtacatataaaccaaagcagccacttcccaagcgtacctatctgtcttactgaggtaccgaatggcctccaagtagacaacatggacattggttgcactcttgttagcaaacagagtgcaacccaacaggtgaataagatatgcacgagccgcagctgtccaatgacctgcctggcatcggcgctgatatatatcacgtacccattgcaggcgtacatacggtctgcgacactggactgtctcagccctagcagactctggagacaccatcagcaagtccaccagcatctgaaccgcaacatccacgtgcaagggctcaaatgcgtgaaagtcgcctataacgggaagatggagaagagaagagacgtcgtccaatgtgatggtgagctcacccaccgggagatggaaactagacgtctcccggtgccaccgctccacaaacgtggacaaaagtccccaatcaccggtgtctaccgaacacgcgatcagaggacttactcctgtaccagcgataagtccctcaatggcagggacaggcctgcctaaactatggaccttcctcccatgcgaggataacttcaattcaggacgctcctctcccgtccatacgctgcaagcaacgtgatccgcatatgctgtcagcatagatgggtcgctcggaccatccggaaattcctgaggctgatcctcagccgcctctgagcctgcgtccgcaggaatgtcctccacaacagctggtgcccccatcgggtcatcctgaacgtctgggtcagggatgactggctcatcgacgtgatccgcagtcacagcaactcgctgcctccgtgcggatgcagtaggtcgtcgacgttgtggagcatcatcggaatcatcatgatctcctcttcccacacctctgcgagtgacctgacctaaggcacgacctaatcctctggtcctaaccatgatctgcaaatgagtactgcaaaatccatcactcatttcattttctcaaatttcatgcgtctaacgcatataggacattgatttgggacagcatggttttggttgtgttcctctaattgatactaacatcagtagagtatggacaatttaattcaagcaaaagaagaaacagaattcaatggatcaaagaatttaggactttgttgcgagaattaagggtaaaattttccttatgaggattaaatggattgttttataaatgtctccat

SEQ ID NO: 3137 - DNA, 640 bp, Glycine max
  unsure (1)..(640): unsure at all n locations
  Clone ID: GLYMA-23APR03-CLUSTER12853_3
accattaccattcacaatgagttattacaaccagcagcaaccgcnggtcggagttccgccgccgcaaggtcccttttctatatgcatgtgcatgttgctcatatacacatcgtccgattgaatctgagtctggatccatcatcttaattttgaatttcttttcttggataggttatccgccggaggggtacggaaaggagggatatccaccgccgggatacccgccagcgggatacccgccagcgggatacccaccgccgggatatccgccacaacaaggctatcctccgccgccctacccggcgcaggggtatcctccgccctacgctcctcaatacgctcagcctccgccccgtcaacaaaattcaactggccctggttgtttggaaggctgtttggctgctctctgctgctgctgtctattggatgcgtgcttctgagatgagatgacaaattcaaattggaattagacggaatcaactcaataaaatttgtttctacttctctatttcctttgctttatcttgccccttgttgactttttatttttaataataatactatgaaactattgttgcttccaaaggccaaactgcctgatttgtttattgttaagaaatttagaccttcctttcctgtt

SEQ ID NO: 3138 - DNA, 1749 bp, Glycine max
  Clone ID: GLYMA-23APR03-CLUSTER12924_1
gatatcataggcagagttacttgatatttttcatttgacatgagatttccaaaataaattgtcacttatgtcataggtaatctaagaaaaacattaatgctatactatttgagtttgagcttgagatagacttgttcatcaagtaatcatagcatatttgaatgtttaatatactaaatcaaattgatttgaatttggatagggatattagttaagtttggatacttaaattgactgtgataaattagacttcgattttcatgcactgtcaatcagaaagcatggtaggcgtgaatttgaaagtagtgattcaaaaagttaacaaatttaccatacatgatagtaagtcttattagatgacattgtaaaatccttttacactatttactcaaaaattatatggaacggtttgcaatataatataagtattgcctgtattagtaacttcttactcatttggatactaatatgaaaaatatctatctatttcattgtaaagaaatctttgctgaacaatattaactatatttctgcattagacgcttgattcattaagttattctgttggttgaagttgataaattttaaatcagggtttcgtctgtacgtagcagatgaacttggcaatgtttagtattcaagagaatgcttgtgttgttcttgttcttaattttcctacaggagcatgtcctcactggtggtcatggactcatggtaaaaggatatgatcctgttgtaaaagctcttgcaaatgatcttgatatacgcttaaatcacagggtaacaaaaatatccaatggttacaacatggtaatggtcacagttgaggatggcagaaactttgttgctgatgctgttattgtaactgtccctattggaatccttaaggccaatttaattgaatttacaccaaaactgcctgattggaaagcttcagcaattaatgatattggtatgggaaatgaaaataagattgccctaagatttgatagagtgttttggcctaatgtagaagttctgggcatagttgcacccacctcttatgcctgtggttattttctgaatctccacaaggcaacaggccatccaattcttgtgtatatggcagctggcaggtttgcctacgaccttgaaaagctatctgatgaatcagctgcaaattttgtgatgcaacaactcaagaagatgtttcctgatgcttctaagcctgttcaatatcttgtgtcacgttggggaacagatccaaactctcttggctgttatgcatgtgatttagttgggatgccagatgatgtgtatgagaggcttcgtgcaccattaggtaatctattctttggtggggaagctgttagtatggatgaccaccagggatatgtgcatggagcttactcttctggggtgatggctgctgaaaattgtcagagacatcttctacagaaacaaggccacatggaaagtcttcctctagttccttctgttaggcatgaaatatttgaaactactatacctcctcaaatctctagaatttgattatgtacccttccttgttcttgaaaatgagaacaatgctcaaaagaatgagttgctgattagattaattaatgcacattgtagttcaacttaaaccatagtgactaaaatatttagggaagccaccataaaaaatcatattatccaagaactttattgccaaatcaatttttccttctttgcataaagcagaaataaaaggatcataagttcatgact

SEQ ID NO: 3139 - DNA, 934 bp, Glycine max
  Clone ID: GLYMA-23APR03-CLUSTER130544_2
ataaccaacctcaagttctataactaactcttcttcaagacccccatcatcatcaaacatgtatgcttcaacttcctttacttcacaaatggtccatgaccttctcatggacacaaactcaagaaagttactccttcaagatccacttcttcaccaatcaatgaactcagccaactccccagatgccatgagttacaacacaacagactcatacttcaaaggtcgcgacttcgatgcaaatgttgtcatgatactctcggtcctgttatgtgctgttatttgctcactcgggttgaactccatcataaagtgtgtcctaagatgttcaaacatagtcatcaataacaatgacccttcttcttcaagtgtgagctacaacaacccttcaccgagattggccaacacaggaatcaagaagaaagccctcaagacttttcctactgtgagctactcaacagagatgaaacttcccggtttggacacagagtgtgtgatttgcctctcggagtttgccaatggtgataaagtgcgcattttgccaaagtgcaaccatggtttccacgttcgctgcattgacaagtggctaagttcacactcatcatgccccaagtgcagacagtgcctcattgagacatgtaagaaaattgttggatcccaaatacaaccagtgccacctgtgccagaaagtaccattataaggatccaaccactagaacctgaaggtctggagcgtaactatagagaagtatgttagctaattaattactttaattagtactagaatgtaagacaaaccaatcaaccatcaacaatgcggtggttattgggggattttcacttgctttttgttttgacctcagatgtaagataaactagttcaatttttgtaactgcaatattattcttttcaataatagtctaaagttattgattg

SEQ ID NO: 3140 - DNA, 1636 bp, Glycine max
  unsure (1)..(1636): unsure at all n locations
  Clone ID: GLYMA-23APR03-CLUSTER13057_1
agaattagacaaactcccttacaattattccttcttgtgttgagttgattcaaacataaacacaccaccctgggttcattaattgatttcattttgcagtaataacaagaacaaaaaataagcatgagttgcaacgggtgccgcgttcttcgaaagggatgcagcgagttcggtaaatttttcattagtattccttgtaggccacctagctttcctctcttcttactatttttgtgttcatgtgaaggttaattgaaacataaagacacactcacacaccctgggttcataaatttcattttgcagtaacaacaaaaaataagcatgagttgcaacgggtgccgcgttcttcgaaagggatgcagcgagtcctgtatgttgcgcccttgtttgcagtggatcgaaaccgcccaagctcaaggccacgccactgtcttcgtcgccaaattcttcggccgtgccggcctcatgtccttcatttccaacgttccagaaaatcaaagacccgcgctgtttcagtcgctgctcttcgaagcgtgcgggagaacggtgaaccccgtgaacggcgccgtgggacttctctggaccgggaactggcacgtttgccaggccgcggtggagacggtgctccgcggtggcacgctgaggcccatgccggagctcatgggcctcgacgctcccgccgccgcggccaccgatgaagcatcggaggccgaagtggcctgcaccgacacgtggaggatccgaaacccgaacccgaattgccggttcacaagctcgcggtcctccggctgcggcggcggcggcaaacgcaagcggtcggaggagctggcaaagcttcaggcgcagccgaatctcgatctccggctgacgccggttttttcgcagaaggttgagagccgccggccggaatctccgtcgatgacatcggtggaatccggaacgacgacggagaacagatttggggatcagtggggtcaccggaaagttctcaaccttttcatttgagaactctcctatatgtttcttcgagggttatgttttttgtgaatctaattaacgagttattattagttttgttttgttgttgtaatagtccttttgtttttggaggggttgttcccggatttgaagtccggcgagttttggtgagacactggcacaggatttctctagagagaaaaatgagagttagtcggtggtgatcccttttattttttattttttttctgtcaaacatggaatatgtaaacagtcctgtggtcgtccgtggcatgaatattattaatatgaaattatgaataaagactagatataacgtttgtttttagagtaaagactacatataaaaaaaaaaaaaaaaaaaaaaaaaaaaaaaaaaaaaaaaaaaaagcagcgcccccggtggaactnnncttttgtncntttattgagggtnaanncncctcgcttaacntggcnangctgtntcnngctnaannnttccccncnnntccncnnnttnnnccttnntctttngtnaccncntgcctnnagnntcnctcnnnctnngctnctctcccctcttttcnnnncnnnnttccnctcttctnnctccccgncgggnnnnttcgnccnttntntgcnnctantgccc

SEQ ID NO: 3141 - DNA, 945 bp, Glycine max
  Clone ID: GLYMA-23APR03-CLUSTER130582_1
acgaattccaaatactatagacacctttttctaccgtctaccgtgctcaagagacaccttacttcattttttttttccagcatctgagaattagcagtgagtaacaattgagaatgaacaaaggtgcagccggaggattagggggcggcgctggcgccggaagcgggcccactgcggctgcggcggcggcggcggcgcagaagcagaagactctggtgcaaagagtcgaaggcgatatcgccaacatcgtcgacaatttcagccaccttgtcaacgttgcaagggtaaatgatccactagttagaaattcacaggaagcttttatgatggagatgcgtgctgctaggatggtccaggcagctgattctctattgaagttggtgtcagagcttaagcaaactgcaatattttcaggatttgcctctcttaatgatcatgtagaacaaagaaggattgaatttaatcagctggcagaaaaaacagatcacacattatccagagtaggggaggaagctgctgctagcctaaaagaacttgaatctcattattcttcttctgcactgaagactatgcaaaacctgcagccatagttaagaatctatcgatgcaatgagcacttatcacttgatggattatgctttttttagtgtaataggtttttttttggtttaaaatcgttgtaatatccttgtttggattaggattaagaagtagaaactgttatttctttaccgaggaaatggaaagcatgattataattattgataagcaaggaatttcaaataaaaaaaaaaaaaaaaaaggctaagatataattaggatagaatataaggagacacttgcctgaagttatcaatgtcatttatgagaatacgaaggttgggatatttattttgaagtttgttaggatgtatatttttgggggtattttattcctacaaaaat

SEQ ID NO: 3142 - DNA, 1165 bp, Glycine max
  unsure (1)..(1165): unsure at all n locations
  Clone ID: GLYMA-23APR03-CLUSTER130739_1
agatgggtccaaaggcagaaacaaagccggttgacagacaagtacaaattgtgtntcttggttgcatttaagtatagccaatgtgcattttgctcttataggaagtttttgtgcgttttgaattcatattctggctggaaaatctacctgtgaataatttactaatgtgttgaagatctagaaaaccnctggttttaagctcagtagcacggattacaggattaagaacataaaagatatctaacnctggaatagctgagttaagataggatatgaagcatatacaaggcctgtctgggtaagtttctttagaagcacttctatgagaagaagaaaactgaaatgagcttcttcataagctaaaattagctctccattagctaagctctctcatataatcattgccattaggtttggtaactgtaactttatatatagagttgaagcctaaggtttctttgttgcccttatatctttgcttttgtttctggatgtaaaagtagggggcatatcaaattataggttcttttggacagtggtctagggttgtgtggacaattagacattgtgaaaattgtgataggtttggccaaaacacttctgcaagggttgataaccagggctggcatatgctggtttaaatttgggtgtcatatgcagttaacaaaaggggcataggcagagaagatttaagctaaactactagcaagctatcatggtggtgcccaagtataaacacccaaagagaaactcatcctgatacaataattcaacaacaaaaaaataattcatgcataaaagttaaatattttacttgagttcatgtctctattgttcttcaaaaaggaatgcacctgttttaatttatgtaaggttggaattagttatgtgtagatcatgcatgcgatatgtgtaatttactctcaagttactgctaaatgtctacagccataaaagtatgatccaaaatgtcattaataaatcctcagaacttttctaattctttctttttttccatttgttagctcccataattccaaactaatgtaactttcggagtgcatggccacgacctgttgacttgaatgtgaataattttcagtcttcgttccattttttctattcatcaagaggaaaaggcagagcaatagaaacctaaatttaa

SEQ ID NO: 3143 - DNA, 1616 bp, Glycine max
  Clone ID: GLYMA-23APR03-CLUSTER131780_1
cctttgttgaattgcacttgggtgttctagccagcacaccgaaaaaaaaattctgggctctttccttgaatttcactgaagccataaaaccaaactcattcactagactttttatacacaaatcaaaaaaaaagcagttccaattccctcttggtgcttcgtgcttcatctcttccaattgatggatcaagacgacgacgacgaaggaacaacgaacctcagcaccagcgacgccgacgtggcagagaaaaaaaccacaaacaacctcaatggagtccccaaacagaacaacgcgtttgaagaaacaacaggttttcaagtcttgccgctgaaaaaggaggagccaacatattcggaccctgacacggagattgttccggtcaaactgccaaagcgctcctccacgaaggaccgccacaccaaagtggaagggcgcgaaagtggaagggcgcggacgcaggatccgaatacccgccacctgcgccgcccggatcttccagctgacccgagagctcggccacaagtccgacggcgagaccgtccggtggctcctggagcacgccgagccggccatcatcgaggccaccggcaccggtacagttccggccatcgcggtctccgttggcggcacgctcaaaatcccaaccacctcatcgaacgagaaagaagccgtcgccgacgcctcaaacaagaagcggaaacgcccctcaaacagcgagttcgtggacataaacataaacgacagcgtttcgcagtcgtccggtctggccccggttcatgtggcgcatggcctggtcccggtctgggccgtgactaaccccagcatggtggtccccgctaacgccttctggatgacacccaacccccccatgggacccgcaaaccagcagcatcagttatgggccttatctccctccgtcttcaacgtcgcggccaggcccatatcgcctctggtcacaacaaatattccagaagcatggcccattatgacggcgtgcagtaacgactccaactccgccgttagcacgagcacggtgggggctaaggtggcaacggagtccagcatggcacccagtgttagttctagtgggaccaagagtgccaggactcggctattaagggatttttcgctccaaatttacgataagcaagagttgcagttcttgggccgctctgggactcacgcgcagagttagctgctagcaacttttttatttattttatgtccagttcaataaatgtgaccatgtgcaaataaacgagaaatgtctgtgctgtttttgcgacttgtggaagatatgaaagattcatgtgtgataatatcatttggaaatgggaaatgaaatagtatcagtccggaactgctctggctgaatatttgcagatttattcatctttcgaccaccacgtgtggtgaggggggactgagggagtggggagtggggcccacctacaaatggagatgggtctccccaaaaaaaaccacttcatattttcactctagctactaagaatagaaataattcatttttttgaatttctgaaggctctgtaatagtagcgggtgggtggcctaaaattcaaagccggcagctgctcttgcagtttgcgcacac

SEQ ID NO: 3144 - DNA, 1426 bp, Glycine max
  unsure (1)..(1426): unsure at all n locations
  Clone ID: GLYMA-23APR03-CLUSTER132_2
acaacaagggtcgactttggtctaatttcttgctgtctaggtgttagatgtanttcacagttcacaccctagagggagtggatggattttgttgtttttcatataagggcaaagaaagatagaggagctagctagctagcgagcttcaaaactcaaaagcactgacacatacaaacaaaaagatctggctttcataaaattgagataaaagtgcaccgtctccgaatcatgtttataatattatcttcattagatcttgatctcatttttcatctgaaactaaaagaatatatatgtgcctttaccctatttagctatatgcacacacaacttgtcacatatcatattttgttcatcaagtttataattccttatctttgaacttacttacatccaagtaaggtctaagctagctggagttgattagatctagctagctagttttcgatctgcttaatttgttttccatgatctcttatatatagtaattttatttccctttaattaattaagaaagagttgaagaagaatgggaagggggaagatcgaaatcaaaaggattgagaacacaacaaatcggcaagtgaccttctgcaagagaagaaatgggcttctgaagaaagcttatgagctgtcagtgctgtgtgatgcagaagttgccctcatcgtcttctccagccgtggccgtctctatgagtattccaacaacaacataagatcaacaatagagaggtacaaaaaggcatgttctgatcactcaagcgcgagcactaccacagaaatcaatgctcagtattatcaacaagaatctgcaaagctgcgacagcaaatacagatgctgcaaaattctaacaggcacctgatgggtgatgccttaagcacactgactgtgaaggaacttaagcagttggagaatagacttgaaagaggaatcactagaatcagatctaagaaacatgagatgctactggctgaaattgaatacttccagaaaagggagattgaactggaaaatgaaaatctttgcctccgaactaagataactgacgtggagaggattcagcaagtaaacatggtttctgggccagaactgaatgccattcaggcattagcttcccgtaacttcttcaatccaaatatgttggaaggtggaactgtttaccctcactcagataagaagattcttcatcttgggtgatcaataatatatgatcttggctagcctatggcatgtctatccaattagccggtggctaaatgcattattattactactcttttggttgctcattaactagaccatgtgatctatatactacttatggattatggatacttatgtatgatgattgtatgatatcataacaatcagttagaaataataattaaaaaatagagttgtgtttgaaaaaaaaaaaaagcggcc

SEQ ID NO: 3145 - DNA, 1663 bp, Glycine max
  Clone ID: GLYMA-23APR03-CLUSTER13350_3
aaattaaagttttttcatgtttggtcatgcaagttcattttttaattttagttctgataagttactcgttttttaattttgggttctggtaagttttttttttttcagttttagttcatgtaagttaatgtttttttaattttgattctggtaatttttttggttcatttatagtcttgtaagtttgtgtttttttaaaactttagtccctttacagaaccaaaattgaaaaaacacaaatttacagaaataaaaaaaattagtaaaatatcttgcggggataaaaaattagtaaaatatctgatcggactaaaattagaaaaatgaatttataggatctaaaaattaaaaaaaaaatgctaacttaccaaaaacgcatttaagccatcttttaatataagagaaatttttataaaagttcacaattttatagagattgaaatgataaggtgaggaactaaaaaaatactacgtattgaacagggacacagatagaaaaaaaaattaacaaccaaaaccaaaaaatgcatatattttaggtactaaaaacttagttaaaaccttttacagcacagctattgaccttctgttctgttattgctaacaagttcaaattttgatcctgtttcgctgtttatcttgtactaactggctgtatgtgtgggttaaatgattcattatgccaattagcaattgaaaaagagcatcttgtttgagatgtatgtgtaacaagcatctgctggagatgatgcaactcatgatgatggttttccatctttaggttgggcaagagaaagaattattattcacttgttgatgtttcaactgactggatacaatcagctgagtcttgagatttaaggctcggtcaagtttgagttgacttgcagatacttagacacacaccgaggaactatcttgacaaatgttaatttgggattgataagcatggctaacattctgtaaatttgtcaattgtaaaacgtttttcttgattttattcattccctagattaagatttaagcataatatgtaatataagtagttggagattacatccaattttgaatttttttacatcatacaactttgctcggctctgttttcttacgatgttttgacctgaaaaacagatcaaagcccagtctagcagcatttgttggatgctttgtgccgatgatgcttggagtttgctttctttgcccttcaatggattgcctttggcataaatatcactactgtcctaaatgtcaagaaaaggtagtgtcgtcgtgaatatgaataacactgatccaaatgtccaattgcaactcaatggctatattgttatgttcatgtttgttatgttcatgtgtaggttgctgactttgagaaatcagatccctgtgctgtgatggatccaccacactggactcaggagagctttgcattgtctggataggatgataattcttttactgccatttggtctttgcattttctatattgtttaagaataagctgttaacatgagcatgggacaaacttcctgctcttgaatttgatgtaaaattgaattgtctacttatacacgttttgttgcataactgtaataaactcatgctttgttaatattatacttaaggagaattgcgtgcaacaaaaaaaaaaaaaaaaaatacc

SEQ ID NO: 3146 - DNA, 1173 bp, Glycine max
  Clone ID: GLYMA-23APR03-CLUSTER13361_1
gttaaggctcttaaagtctaaaaggcaagttctagtttgttgggtagtttattagaaacacaatgctgatgattataatacagtctaatgacattttgttcggggactgacctagaacatcctaatcgaaaaattatcattgccgttcattttccttcttatcactactcagacaataaacgcctcagtctctcatttcagggtgcaaaatcttccatgtataaatattactatgtgcttgcattaactgattgatttactccaaaatttaggttctaatgattataaaaggattgtttggaaggtacgaaagatggaaccctgttcatccaactcatggagccttttggggaatgggtgtgggcgttggttgtggtgtcggatggggtcctgggtttggccctgaagtgataggctatgttggagctggttgtggcattggattcaatgtaggcatcacttttgctggtgttggagttggcctacctgctaattttatctttgaaggtccatataatggggttagctggattggaaatttaccttgtatctctgacttgcaaagagaagccaatggaaaattgtttgaatttaggcaaaagcatttatcaataaagggaattaacttctttgacaagaagaacagcttgcctttgctcacttctgccagtaaaagtatacaagcattccgtaaccaaatattcagctctcataaagggaaagattgatgacttccaccactgtcagttttgtgcttacattttttgacacattttgtattttgttgggtcggaggcgaagctcttgttttcacagttaaccagataatctattattgttctgctctatctctccccacatggccacattcaaattcagttgtattttatagtcttgttacatgtgtttcttcagaaaatctcagccaaattttgtaaccaatatattaaaagcatatttatactagtaagaaataagatttcctactgtgggaaaaaaaaaaaaaaaaaagcttatccataccgtccacctcgaagggggggcccggaacccattcccccctaaaaggagccgaattaccggcgttcactgggccgtcgttttaaaacgtccggactgggaaaaaccctggggttaccccatttataaccccttgtaaaaaatccccctttt

SEQ ID NO: 3147 - DNA, 1486 bp, Glycine max
  unsure (1)..(1486): unsure at all n locations
  Clone ID: GLYMA-23APR03-CLUSTER13391_2
aagagtttttggttaagtttcttatattattatatttgatttggatatgtatatttagtctacttttggctaacttgttgcttgtatctataggaaaagttctctgtttctccaccggattacaattgggcaaaaaagaattttgaaatgcgaggttcagtattgctgaaaaataatctaaataaggctcgaaccacaatggataaacctcattggattacagatggtgtctgggagagattgtgcaatcattggagatctgaaggattcaaaaagaagagcacccaagcaaaaacaaatcgagcatctaattgtggagcatctcacactggtggctctattagtgcttcacagcatagagctaatatgatgaaagagactggaaccattcctactccattggagttgttccgtcgcatgcaccaacgtaaggacaacacatgggtggataggagatcacaacatgtaaacgaggtatttacacgcacattgaaacaattgaccaaaagagcatcggcacaaggtaaacctccaccaagtgagttagatgtgtggtgtgatgtagctagatcaaagaaaggaaaagtttatgggtttggaatggaatctacagtaatggcaacaagtccttgctatcgttgctcatcttcttcatcaatggagtgggtaaaaaaacaagagtttgatgaattagcaaaagagatggaagaagttaaaaatgaaagagataagcttcaagccagagttgcaaacactgagaggcttgttgagcataacaatgcattaatacgagaattgattgaaagcatgaaatttacagtaaatgatagtcaagatgaaggcgaagagtctgaccgtgaatatgaagacgaggagtcaccaagtgaaccatagtgactaggggtgaaaatgagccgagcaattcggttcggcttgtttactataaaggtcaagttcaaacttttttaaaagccttttaaaataaaaaggtcaagtccaaactataaaaaaagtttgttaagcttgacaagctggcctgtttaactaacaataataataataataataatattttattattttctcctatttcttaaccctcgatgtcactattttaattactgattagtcttaattgtcaaattaattatgcagttttatcatttgggcctattggactaattttgtgtttttaatttaatttcaggagaatcataagcaattgggtttgaatccggaattgggcttggacttgaagagagcagacaattttattttatcaaatcttatcttatccagattttatctcatctagatattatttcatccaatattatcttatcttatctagattttatttgatcaaatcttatcttatcttgtcaagattttattttatttatgggcttggacttaaaacagatttgtaagctttggggttgaaaacctatataaccctcctgtcgtcttctcgcagccgtaaagn

SEQ ID NO: 3148 - DNA, 1139 bp, Glycine max
  Clone ID: GLYMA-23APR03-CLUSTER134052_1
tcagctacgtaggcccccccccctttgtatatttcaccccctgaaaaacaaacctattagctagatcttctattctccatgttcactaattcacaaacggtaatgcaaaccttactatcatcaccttcggcggagccagacctctccttaaacataagccctccctctatttcagattccgaagcagccaaagatgttgttggaagctttggaaaagtgctttacagtgatatttgttcaacttctgattcgggtagtagtggaggaagtgatttgagccacgagttccacaaccttggtcatcatcatcatcgtgagcccacattgaagttaggctttggaaccgtggatttgaatccgcatcatcatcaagtacaaggtgttccaagaagcttcaatcaccaccaccacctccttcaacctcacatctatggccgcgatttcaaacgaagcgcaagagtagttaatggggtcaaaagaagcgttagagctcctaggatgagatggaccacaaccctccatgcccattttgttcacgcggttcaacttcttggcggccatgaaagagcaactccgaagtctgtgttagagttaatgaatgttaaggatctaaccctagcacacgtcaagagtcacttgcagatgtatagaacagtgaagagcactgacaaaggcatcagtactgcaggtcatgggcagacagatattggattgaacccaaggctagggattaatgttcatctgcatgcaccttcacctatttgtgacacaccgaatttaccagacccaattcaaaattcacagaggacaccgtggcaatcatcaatagagacaaaaacagacaacagtagacaagaagaacccgaaatcggtttgacgtattctcacctcaagggaaataataataataatgaaaccatggtggatgggcacaacaattctggagggttggattcttcccctttgtcacgttcctccgaggcaatgcttgaccttgaattcacccttggaaggcccaattggcaaaagaccaccccgaatcatcaagagagttaactcttctcaagtgttagaatcaaattaagggtgttgttaattattattcttaaagatattagttaaggaaccaaaagaaaaaa

SEQ ID NO: 3149 - DNA, 1203 bp, Glycine max
  Clone ID: GLYMA-23APR03-CLUSTER1341_8
atgatgtccgccatcttcctatatgctactactatagctgttgattttcctattttataatctctagcataattcagcatggccaaagacaagtacaggtctttcttgcatgatgaacctgataacgttcagtggagacatggtggccctcccacttatgatgctgttaacaagctttttgaagaaggaagaacaaaggagtggacagaaggatcattggaggagatagtgcaaaatgctattaagtcatgggagatggagctctcacacaagacccgtttgcaggacttcaagacaataaaccctgagaagttcaagctctttgtgaatggcagggaaggattatctggagaggatactctaagcctgggaagttataatgctttgttgcaaagttctctgcctgaagacttgaagccttacaaagcagatgaagagacttttgaatcatctcatgaagcgttcaaatcagcttttcctagagggtttgcttgggaagtgatcaaagtttatagtggaccacctgaaattgctttcaagtttaggcactggggcttctttgaaggtccttttaagggacatgcccctaccgggaagatggcccaattctatggcttgggaactgtcaaggtggatgactctttgaaggttgaagaggtggagatttactatgacccggcagagcttcttggaggccttctttcagggaaccacataaatcacccaattgaagaggatggcaccaaaacttcagcaccttcccaaggatgtcccttctccaaataattacaatgatgtttttaagtgaatggtgtcttgggatccagctatatttcttgaattaattaatgtggcagctgagatttgaaggcaaatatagtatttgtgtgaaattgggtccattgaataaaattggaaacatgtcaaaatgaattatttttccccccgctttatatggaaaattatggcaaataaatgtgatgtgttggaaagcaatgtgcatgatacaatgtcggtttggctttgctgttgcatagtttagaagttataagttattttattttattttatttttgggagggagagctttctagcaatctgatgaagagatcgatccaataagggaccaagttagctcatgtggcagcaaaatctattatattgttgaatgaaagcatttgaagatcaaaaaaaaaaaaaaaa

SEQ ID NO: 3150 - DNA, 1718 bp, Glycine max
  Clone ID: GLYMA-23APR03-CLUSTER134566_1
gtttagttaatttattaatttttctcttgcaagttccattatcaaatggtgcatgaaccatgatactaacaatcttctaactgcccaccccaccattgacctgttttgaagcacaatggagaggcagagaagtttctccttcaaacccactaggcttttggtcttctcattcactatcttttcctccgtcctcttcctttccaccttcaccacttggctcaccaattacacaccttcaattcaccaacatattcatctttacttcaacacttctacttcttcttctgtcggtgatagtgtggttcttccacctttaactggtcattccttgacaaaaaacttcactgtaataagtgttgtgaaagttccaactttgatcgataaccgtcttgctaggacccagaaaagcatctctggattcaaatctgaacctgtaagacatcatgtcggtgcctcaaatgctaatttcacgtcaatgcaagagtatggaacttcacctgagagggtacccagcaaggaagagaagaaggtagtagcaggtggtttagttgggaaaactcaagttcctattttgaagaagattgagcagaagggagttgaagggtgtgatttaacaaaagggtattgggtttttgatgaaagctatcccccttattccaaagattcatgtcctttcatagatgaaggttttgattgtgagggaaatggaagattggatagaagctacactaagtggagatggcaggccaaagggtgtgaccttccaaggttcaatgcaacaaaaatgctggagttgataagggggaaaaggcttgtttttgtgggtgattcgattaataggaaccaatgggaatcaatgttgtgcatgctattgggtgctattaaagatccaacgagagtatatgagacccatggaaggaaaatcacgaaagagaagggaaattatagtttcaggtttctggattatcaatgtacaattgaatactatgttagtcatttcttagttcatgaaagcaaggcaagaatagggcagaaacgaagaccaaccttgcgaattgatgccattgatcatggttcatcgagatggaggggagctgatattgtggttttcaacactgcacattggtggtcacattccaaaacacaagctgggatttattactaccaagaaggaagtgtagttcatccccagctaaatgtttctacagctttcagaagagctttgaagacttgggcttcatgggtggacaaacgcattaatcatagaaaaacccgcattttctttcgaagttcagcaccatcacatttcaggggtggtgattggaattccggagggcattgtacagaggccactcttcctctcaatgaaaccttaagcactaattatccagagaagaacataatcgtagaggaggtaataaagcaaatgaaaactcccgtgacattgttgaatataactagtttgtcagcatataggatcgatggccacccatcaatttatgggagaaaaacacggtcctctaggattcaagattgtagccattggtgccttcctggggttccagatacatggaatgaattgttatattttcatttacagagtagatgagagcgacctgttcaaactcttgttcccttcatttttctataacatgtatatactacaccttgtgaaatatattcccttccatcaaaaaaaaaaaaaaaatttatgttct

SEQ ID NO: 3151 - DNA, 1319 bp, Glycine max
  unsure (1)..(1319): unsure at all n locations
  Clone ID: GLYMA-23APR03-CLUSTER1356_1
tcgagtagctacgtaggcccnacccccnacattctcatcagctacgtaggcccccccccccttcacctctttatttctacaatatattccttttctttttccctcacaaaatcaaaaccatatcttgggctgttaaaaaaatttcaatcttgataccgttttcccttcagttgacagtataatggaagatcaaagtaaccaagagaacccaggaagaaccaccagtggtgtctctcatcatcaatttccaatcccaaaagttgccattgcagcatcttctggaagaaatggaagccacaggacttgcctcccaaaactaactcaccataactatgttgagtatctttcagaatcctcaacttataatcttccaaagacttccaccgaattcatgatgaagagcagttatctacctgttggcaacatcagtgatggttatggggtcagtggaacagacagaaacttcttttacagtgatgatccaggaaaagcttgttcctttaagactattggttcttcaagtaatgaccttgacattagtaaggtggggttttggagagctgatgaaggaatcaaagttgaaactgaaagtagtcagaatcttgtttatgctgagagtcatgcatcatggacatcagattctgttggagataagcataatgcttcacatgatccaatgttcatggttggtgcacctactttacttcccaaaccaggatgcagctcctcaaaacagaaagctcgtgtcactgaacgtcaacgcaggcaacgcatcgctgataacctcaaagccttgcatgaattgcttccaaatccagcagagggaagtcaagcttacgtattggacgacataattgactatgtcaaatatttgcagcttcaaataaaggaacaaagtggaagtagattattgcaagcggactcaactgctataccactagtttttcatgagggttacggccattatatcaaccaaaagatgctgaatgaaccccttgaggagataatggggaaactagttgaagatgattcagcagcagctgttcagctactagagagtaagggtcttttcctgctgcctatggcattggttgatgagttgagtgaggctgtgcaaatgtttggtgggagtgcacttgtctgacaaaagctttcttttatttatttcaaattctccattatggatcatttctagacagtggcagtagtatgattattgtttatgtttttgatgttacaacaataacatttatgacttattacaaactatcaaaatctcagctaactcgattccactaaatctagtttcgattattagg

SEQ ID NO: 3152 - DNA, 1555 bp, Glycine max
  unsure (1)..(1555): unsure at all n locations
  Clone ID: GLYMA-23APR03-CLUSTER13582_3
tgcttttgaagaagacaacaagggcagtaacaagagaaaatctttaaacaaaaaaaatgtgctatcttccaatatgtttaaacagaatcaggtatatgttgatgttgttgaatctgcttcctcctttaattgttctgatgtctttatatttgtggaaggttaaaaaaataaacccttctattattgtgccttaagtatatcatcagaaaaaattcttaagttttagatatcatcttttgcatattcatctatattccgatccagatagcttaaacttttgatgcctatctcattaagaggttcttcagattagntacataaccatcttataaggactgggataacattgcaatttaatgaaactaaaatatgaaatgtctaattcattgttaaactgattatggtttaatattgtcttattactatttattcacaattagtcttgaagcttttgtttttgactgctttcaccttgcagttgaaatctcctgtagttttccagaaaagccattgcaaacctgataacaaagaagcatcctgatgatgatgattcttgttcagttgcttcaatgtatcctcttaaatatgttgcagtgaagagtgtcaaattctcatgtcgagtttttcttattttggcaacggttctacttccttttaaaatatgaaattgcttgtactgcttgaccatgtaaagaactgcagcttctgtgcgatcaatcaagtccaggacaactgttgcttctgctcctgtgcctaggtccagtcaacgtgcagaaaaacggatggagttttatacaagattagaggacaagcatcacgcaatggaagctgcgaagaatcaaagtgaagctaggaccaagaaagagatggaggaagctatcaagcagctaaggaagagtctaacttttaaagcaagccctatgccaagcttttaccatgaagggccccctcctaaggttgaattgaagaagttgagtatcatgtatgggtcagctaccagcaacgcgagcaaaatctccaaagctgggccggcgaaagagcaacaatggtgcagttaatttatctgaaggggacaaggagaaaggagctggaatcaggagaaagcatcacacacttaagaccaacaactatggtgataagagtgatgtaaatggcttatctgaccccaaaaacaagaccaagcatattgaaggaattaatgcaaccgaggtaactggacaagcaaacttggagattggcagccagtgaagttttcagtgagattagattctcatttttctaatttatatgtatccagggactgtggtcttgtttcttgcaacaagcatcttcactttgtttttccttttaacttatgagcacttgctgctgtgtgcattgtgtaattagtgaaagtgtttatttgtaatttatttcaaattatttgtaaaattcaatcatgttgctcataagagcaatttgagcatttgtttgtctgtctgaagtccaggatcagattgttttaagtcgccattaaataatgctgttcgattaacaataattatgtttcattttt

SEQ ID NO: 3153 - DNA, 789 bp, Glycine max
  unsure (1)..(789): unsure at all n locations
  Clone ID: GLYMA-23APR03-CLUSTER13594_2
cttcgttttctccttaaccatgaagaagctctaccgtaaaggaaccgtccacccctctccctcgccgtcgccgccaaccatctccgaccacctatccttcctccccgccgccatcctcaccctcactctttccctctccccgaaggaccaagaagtcctcgcatacctcatctcatgctcctcttcctcatcctccaccaccaacttttccggcaaccatcgccggaaccctaaggttgtcgtggacggcgatcaccctcctgtcttcaactgcagctgcttccgctgctacatgagctactgggtccgctggaactcctctcccaaccaccaactcatacacgaaatcatcgacaccttcgaagactctctggctcacaccacaaaaccttcgtagaaaggataagagaaacaagaggggctccaaaaccaagccttccgagttgactcgctccgagtttccctcttcgccgccggaatcggtgccggagagtagcagtagcagcgccggtgccggtgaggttgaggctggtcagggcggtgatggtggcggcgatnaggagaaagggtcggtgagaaggtttgttancctttcnttggagaaaggatttggggcgcttgggcncagtgaatnaattttnaaggggaaaggtgggtttaacttcacccnttctttctntcttttggttcttctttttttatttatttataaacttttttttttctttttgtacattaatcncttctctgcaatgtataaaaggaaaatggcagtttcgttttttgcgt

SEQ ID NO: 3154 - DNA, 1082 bp, Glycine max
  Clone ID: GLYMA-23APR03-CLUSTER13649_1
agtgaatctcacggcaagcaatccagcaggtgtatgatgccaagcttaacaagtgaacccaaaaatgttgaaatctttggtgtctatgaaatcatagtgagctggtttagtggtgttgatcaagcccctcacttgctcaccaagacatcggatttgttgtgtgctatcttaaacttttggtggccaattctacatctgaagctagaagagattggcaagtatagttagttatttgcaatgatagaaggtggtagaatctggctgaaggcatggcagcaggcagctgtggcagtgggttccgcggtgggggcgttgttggaccctcgaagagcagatttgatagcagctcttggtgagaccactggaaagcatgcttttgagagagttctacaaaggatgaagagttcccctgaagggagggccttactattggagcgccctcgtgttgtttgtgcaaaggtaggacatgcttgggatctgccagcaaacacattcggtgctgcctatgcgaggtttatgggatctaggaacttttcgccagatgatcgacctcctgtgcggttcatggacacagatgaactggcctatgtagccatgcgggctcgtgaagtgcatgacttctggcataccctttttgaccttcctactaacttgattggggagacagcactgaagctcattgaatttgagcagatgggccttcctatgtgtctgctgtccgttatagggggcacggctagattcaatgaaaagcagagaaaattgttttatcagcactacttcccttgggccattcgtgctggcatgcaatcgactgatcttatgtgtgtatattatgagcaacattttcatgaagacttggaagatgttcgcagaaaattgcaaattgttcctgctcccactgttccttaaccgtatttggaccagataaattgtgctcgagttttgcaatcaaaattttggaataaaatccagtgtacaagctttgcctctgagatatagtcaatgagcattgtataggttggatttgatcatatgatcagtaaaatagacttttcatcacatattgtattttttttttc

SEQ ID NO: 3155 - DNA, 852 bp, Glycine max
  unsure (1)..(852): unsure at all n locations
  Clone ID: GLYMA-23APR03-CLUSTER136_1
aaggaacanntgctggaggaggagtgattcctcacatccacaagtctcttatcaacaagtcttcacggctgcgagaagacgacagaaggggaggaccaagaagaagaaacaacctcaaaatccctttcttgtgtcgattagattactttcacaccagagtcgttcgagtacttcaccttctttctctctaagcgcaaaacctcgtactgtttttggcggttaaggatgtcggggaaaggagcgaaggggttgatcacaggcaaaacctccgccgccaacaaagacaaggacaagaagaaacccatctcgcgttcttctcgtgccggccttcagttcccagttggtcgtatccaccggcttttgaagtcaaggacaaccgctaatggtagagttggggccacagctgctgtctactctgctgctatcttggagtatctcactgctgaagtattggagctggcagggaatgctagcaaggatctcaaggtcaaacgtattactccccggcatttacaactagcaatccgcggggatgaagagttggataccctgataaaaggaacaattgctggaggaggagtgattcctcacattcacaagtctcttatcaacaagtaagtcttccaaggagtagattactggtgaatgatagcagcttgatggaaaatttctctactaattgtgtattttttgcatggcacttgaaaaacaaagtagggccttttatttatgactgtgttgctgctgttgatcatggatataatatttagtgtttctctttgttaatttagtatgtctctatcactgaaaatcttaattgaggataattcaatctgatggcttgattccnaa

SEQ ID NO: 3156 - DNA, 1174 bp, Glycine max
  unsure (1)..(1174): unsure at all n locations
  Clone ID: GLYMA-23APR03-CLUSTER13726_3
aataatcaagacctcaatattccgaattttcaaattaaattaatttatcaactttttttcctggttcgcgttgcgcaccggcctctatagcgagcttgaaccatcttcagcttcagctactttgcactaacaaagcgccccacgttctgagacaaacccagtatgctatctgccatgggggatcagaaagtttcgatttttcattgattgtgtataactgcacaaagaaggtagtgaagcaatgcgtagagcgatcgcgtttctcgttcacccacgattcctccttctcttccttgttctctcaattttcctcattttcacattttctggttctaccaccaccaatggttttactaatcccaaacaggttgttgagatcattgaggagaaaccagaagaggagccagaaattacacacagagtatttttggatattgatattgataaacagcgtttaggtaggatagtgattggattatatggccaagttgtaccgaaaactgtggaaaattttagagctttgtgtacaggggagaaaggaaagagtgaaaatggcataaagcttcattacaaaggaacaccatttcatcggataatatctggttttgtgattcagggtggagacattgttcatcatgatggtaaagggtctgaatctatttttggtggcacctttcctgatgagaatttcaagattaaacattctcatgccggagttgtttctatggcaaattcaggacctgattccaatggctcacagtttttccttaccacagtgaaggccagatggttggatggagagcatgttgtctttggcaaggttgttcaaggcatggatattgngtatgtaattgaagggggagccggaacttacagtggaaaacccagaaagaaggtggtgatagcagactctggggagataccaaagatccactgggatgaggaaacttgaacttcctccttttaacatatgtttggattatggtttggatagcagacacggctggtttgtctttgatcttgattctaagtcttaaaccatgctttacatgccaacttgacttaaaaaagaattggtagatactagattgttattaaaaatatactgaagcccggtttcttttaatgtaaacaatatatttggtaagtccattttaaaaaaaaacaaacaaaa

SEQ ID NO: 3157 - DNA, 2016 bp, Glycine max
  Clone ID: GLYMA-23APR03-CLUSTER13783_1
tcttttctgtttcctccaaccccaacccacatattatactcatgtaactcatgcattgttacagagcattgcctggacttacatatatagtaacaagttaaaatctaccaactctccaagaatagaggggaataatggagaggcagactgatagtctaaactgctaggttgtccctccccttccgccgaggaacacaaacaacaacctcaacttaacgcattgtgtgcatgatggaggagatgaaagtttctcggcgggtggagtggtggcagaacatgatgttccccgttcggagggtttggtttgtcgttgccaagcgcctcggcattcgcaaaactgggttactgaagctaagtaatgatgtgagggcatgcgaatatgaggacattcaagtgatgtgggagatactaaacagaaacgaatcagagtttggtcgttcttctagcactaggaaaggcaacaacaagaaggggcattgctggaaattattgaggtgggcaaggtgtgctccatgcatgtgccgcacatgatcatgattgctgtgtacgtgagaagaaaaaaatccaacctatgtgttggtgtggtttttcctgcttcaatcatgaataaaaaaagggttctgaagggtttgtgtagaacacggttcttctttccttttgaatcaaccaactcaaccatatgtaaatatcaactgcatccaccaagttcgatgtgtgtgaccatctcatactccatccatgtgcttaattagtgtggtatcgaaattgttgtatgtgtagtttctgctgtgtttcatcatcatcatcatcttggtatgtgttcaaccagacgttcatgtattgcttttagagatccatgaatcgtgtctatctcaggcttaattccagcttggtttttgtatcagaaaactatatatctgcattctgcagaagaaggtatataaatatgtgtagttattatactgtactctccactatccagtttactaatacttgaaagcttccaagataactttactttgttgcctagtctggcagaaattgcatcaggcaacatggtaagtcccttccggaaagatccaacagtctgaccttttggttttggcagacgcggatctcgaggtggttttgaagctccatttctctcttgtattgctttgaaagttccaccaataatgctaccaccatttttttccagcttccaaactttcccgaatgctgctttcatacttaattttgaaggatcgcctgcatagacccctgaacaaaaaggctctatcaaccgttcaaaaacctcatcaccaaggttccgacgaacaaactcttcaaccgattcctcatgacctggaggaggaggccgaattccaagcgcaccaaagccagccctgattttgccaccaatgctcatcaagtcaaagaaaggcaaatcagtcagcttcccgggcaccggcctcaacttcctgttccacaacacaaaccgaggtgcatcaggatcccccaaaacaagctcatcctttaaaccactgtccaccaccatggtgagcattggatcagaaggctggaagctgttggggccttcttcccagaggtatccgtccctctccatcgtggtgatgttgccgccgacgcggtctcgggcctccgtgacgacgacgttggcattggcgtgtttggtggcgagggcctgggcgatgcagaggccgctgacgcctccgccgacgacgacgcagtccacgggggcggagtctctggttttgggcggagacgcggtggattcctccgcaatggagcagcgtagaatagggttagggcgagagcgagggaattttcgagtgggagaggtgaagaaagaggttggggaatggagggaggggcgaagaagggtttggttcggcgggaataggatctcgttgaagacggaaaccatggttggttacagtaatggcactattcgttcgttatcttcaacactgtgctaaagataaccaaaatgtgcctcacccggatagtactcgg

SEQ ID NO: 3158 - DNA, 982 bp, Glycine max
  unsure (1)..(982): unsure at all n locations
  Clone ID: GLYMA-23APR03-CLUSTER13783_2
gacacagttcagcaacggaacatgagagagacacgtggtacacccacgatggcgctttccgttgcaacaagtccttgaatcgaagaagcatgagtttatgaaaacaacttacctggttgttccgttcctcacaacgattgagttgtccctcccttacgccgaggaacacacacacaaaaaaaaaaaaaaaacttatcgcattgtgagcatgatggaggagatggaagtttntcggcgggtggagtggtggcanaacatgatgtacccagtacnaagggtttggtttgtcgtcgccacgcgcctcggcattcgcaaaaatgggttactgaagctaaggcatgatgtgagggcatgtgaatatgaggacattcgagtgatgngggagatactgaacanaancgaatcanagtttggtcattcttctagctctaggaaaggcancancancaataacaacaagaaggggcattgctggaagttgttgaggtgggcaaggtgtgctccatatatgtgccgcgcctgatcataattgctgtgtacgtgagtgagtcttttctcttcacagaacaaaaatccaacctgtgcgttgatttggtttttgcttcaatcatgaataaagagttttgagtcagaggggttcgtgtagaacacggttctcttttcctttgaatcaaccaactcaaccatatgtaaatatcaaccgcatgcatccaccaagtcgatgtgaccatctcttactccatccatgtgcttaattagtgtggtatcaaaattgttatatgtgtagtttgtgctgtgttttatcatcatcttggtatgttcaaccaaaggttcatgtattgcttttagagatccatgaatcatgtctatctctggctttctgcttggtttttgtatcggaaactatttgcattcagaagaagaaggcatataaatatgtgaaaaaaaaaaaaaaaaaaaaaaaaaaaaaaaaaaaaaccac

SEQ ID NO: 3159 - DNA, 944 bp, Glycine max
  Clone ID: GLYMA-23APR03-CLUSTER13794_7
atataatactaacccggcctgggtcacttgactccggcacaaggaaagctgcttcttctttgcaaaggcggcgaggcaccaacgctctctagctccggtctctttgtattttgagtttattacagaattaaaaactagcatagggaaagttctactaaaaaaattcgaagtagtttccacaacatgcaatataagcagcatcaggagatattttgttccttgcatatacttgattccatcctactagccaattaggtagataacacaatgtcgctgaggcgtttcttaggctattctgatggtgaggtcatgaggtctgatgcaaaaccttgttccaggctaatgaggcacacagctgcaatctttagtgttggtggagcattaggattttgggtcctttgccgaatgcactatggtcctcgaattacaaatcctaggagtcttcgttgggcagcatgtggagctgtaactgcgagctcaggcacggctttgctggttcgtttgtttagtcctgaatgtgagccccagaatatagctgcttatgacaataaaaactaactggtgttgtcaccccctttctttttcccctactgataacatcataatatacttgatgaggtaggttgcaattatctcgcatgtgtaagttttatggtatggatgacattttctggcacatcactaagggaaaatttggctaattaatccaactattcttagatgctataaagggtaaaaaattattttcaaaaaaaaaaaaaaaaaaaaaaaaaaaaaaaaaaaaaaaaaaaaaaaaaaaaaaaaacaaaaaaaaaaaaaaaaaaaaaaaaaaaaaaaaaaaaaaaaaaaaaaaaaaaaagggggggggccgttttaagggaccaagttttacttccgggggttggcaagataaaattttttttttggggcccccaaattaaatt

SEQ ID NO: 3160 - DNA, 858 bp, Glycine max
  Clone ID: GLYMA-23APR03-CLUSTER13922_2
ggcacaacaatacaagtcacagaaacagagaaaaaacaaagaaaatggatgcagaaacggagtctccggcgccggaaacatcgccggcggtgatccacccggcagtggcaccaatctcctaccttctgggcacatggagaggccaaggagaaggaggcttccccactatcaattccttctcctatggcgaagagcttcacttctcacattcccccaacaagcccgtgatagggtacactcagaagacatggaaactcagctctggagagcctatgcatgctgagagtggatactggcgtcctaaacctgatggcactattgaagttgtgattgctcaaagcaatggtcttgtggaagttcagaaaggaacatacagcgctgaagagaaagtgatacagcttcagagtgaaatagtggggaacgcttctaaggttaaagagataagaagatgtttccagctggttgatgggaatctttgttatgacgttcagatggctaccaataaaataactcttcaaccacacttgaaagcgtcactgaagaagctctaaagcaaacatcttccccaattacttgcagaaggatgtacatcagtaatatggagccatccaatgtgactcttttttaacaacaatttaggtcaccttggtaattttctgttaattagcaaaatgatctcctttacaacaacctatatgcaaggttctgtctgacatgttcacaagtcttttatacaaggtcttcaagacctaatgtttgaagaacctgacatgacatagttttattggaaacaaccaagctggaaaaattgtgcttctcctattcatttataatatatgcttgattttaacttcttta

SEQ ID NO: 3161 - DNA, 2103 bp, Glycine max
  unsure (1)..(2103): unsure at all n locations
  Clone ID: GLYMA-23APR03-CLUSTER13940_1
cttttttttttttttttttctaaaaaaaacaatgtgctaatcatatagaataattgcatattaaaaaaatcatgttgagaaatattttgtggtttctgttttgtccataaatgccatcactcagcatcacttgttattcagcaaagacaaagctaacattttaatacttctgatctataagaaagtcagaggaggaaaaagaagataaccgccattgacccctttcaaatttaagtaaaattatagggccaacaggggaatgatttagctggtaaggatcaaccaagtaaacctggtgaaggttaggcttaatttttgcagccagcaatactcctttctggagtgacaacacccctacctcctcttttccttaactctgatgatttaccaaaaaaatgctgtgtaggatttgcccggaaaaaatgtacagattatagaactatttatacaagaagaaatcaattactccagatcagactctaccagcagtttgaaaaggacaaagtcaaaaaagaaggaccaatcaccaagggatactcaaatcatgctggcactccaccacttcttcatattcttctttcgccgagagcgaggaaacaagagttgccaaatctgtttttcagctgcatttgcattggcggcctggactttgaatggaaaccgatgagtttttacttctgcacctgaaagaactctaacatccacaccaaggctgtcaaccccaaccaggtaagctccctcgccataaagacctttcttcttgcaaagtgctttaatttcatcatcgcagaattgattgaagcgttccagaatttccgaagaagaatgtgcaagaatatcaggttcagcatcttgaaagtctagcacactaatttcagactgatatccatacatggagtggagctcgattgacaggatctccaatcgatatagtgtcaaattagtgtctctttcatcatcatcatcactatttgagtaaaaatctctccagtctgagatgtatacatcgccatctncagtgtgatacatccatcttagatatgacttttcttcaccataaacgggtctaaggaaccctattatagaaacaccatttgaaggatggttcattcttttaacatattccatgttgttgatggcctttgctaagcacttcgagaaataaattggatgaacagactttgtagtatcagactgtccccaattcactggaatattaaactcctccatttctgaaacctcaatatcatcatcatcaaatttgaattcatcatcgctgccattattgaaaatgtcatattcactagcagtccttctattattatcatatattgggatgtccattccaatcaaagcattcacaggattgttagctccacaatccgccaaaaggtttgcatcatcagagaattcaaaatatatatctccaacatcatcaatatgatattgaaactcagcccatgaaatctggtcatgtggttcacagtgtaccattccaggaaatactagcaaagcgcttttattagcctctacagttgtttttgctatttcggcaggagagagtctagctggctgaatatcgttggaacctttcagttcttcaagaggatgataaccttgttcatccatttgatccgaagaatcgggtatagaatctgaatagtctgcagcaacattaacctttgaaaggcacagatcatgccctgtggatagccaaaggaggtgtggtgatccaaaaaatggacttttgcaccttgtgctggcaagatcatgccaccttcggccatcaataggaagtttgattgaattgcttgttattccataagtagagcaacatatcccctcagaagacgagggaagtgaagaagcaggaggtagaatagccatgaaatggaagatttgagaagagaggaaaagtgctttttatatgtcagttacagtgatagtgacagtgacggagcgctaaagaacagcgactctggcagaaccatgactatggcgcgtgtgtgcgttgtgcgttgtgctttgtttgtgcagtggaaaatggaactcaacacgggcttctacttctgcttgggggggggggggggcctacgtagctga

SEQ ID NO: 3162 - DNA, 702 bp, Glycine max
  Clone ID: GLYMA-23APR03-CLUSTER13983_3
acactaacactagcattcactcaagagatcaataatgggatctggggccggcaatttcctcaaggtgcttctcaaaaacttcgatgtgcttgctgggcctgtcattagtcttgtttatcctctatatgcttcaattagggcaattgagagcaagtctcctattgatgatcagcagtggctcacttactgggttctctactccttgatcaccctctttgaacttacttttgctaaagtccttgagtggattccaatatggccctatgcaaagctgattgcaacctgctggaaaaaggatgccttgggtaagcgagatgatattctgactgctgcagagaagtacatccaagagaatggaacagaagcatttgagaatatcatcaatagggctgacaaatcaagaaggggtgacggttattatacaatgtatgatgagacttattgaatgcgatcatctcgtagttttctctgtctttcgtggataaggggatgcatgtacatcttaccctgttgctgatattttgtttttccttctccatggtgatactttacttttttttttcatccctttattgagtttttattgtcactcatctatgttttgtgtaatggctatgccccgcatagtatatatatataatgttagtccagcaaaaaaaaaaaaaaaaaaaaaaaaaaaaagcggccgctctagaggatcca

SEQ ID NO: 3163 - DNA, 2860 bp, Glycine max
  Clone ID: GLYMA-23APR03-CLUSTER13996_1
gacggaaaaagaagcctctggaaagtcctaaaaatcccaaccgcagagggtagggaggacttgctaaatctgaaccagaaagagagaacaaagaaggctaataaacctgaagatctgttttctccatgtgatagtgactcatgcaaagaacataaaaacctaactaacatcagataatacaaggatgtctgatcattgtttgaagagcagcaaagtagattctagtagtagtgagctttgtgctgatgataccatcttaggagacaagtgtgtggtggaggatgacagtgtgtctcaatattcaatcaatcacatatctcaaaccgacaatgaactcagctttcttgataatgatgggtggctcgatatcggaaactttgaagatgttgataggatgatgttaagctgtgacttgacatttggaatggggagcctcaataatgaagaggagttctgctggctccggtcttcgcaaggaactgaaggttctgatgatgcatttaagtctgcgttcaagttttcatctgctgaagtaagtccgttgaaaagtatatctgattataatatggattccaaggaaagtattgtaggtcttccaattaatgattccaacaaaagatcatctcctcttgatgaaaaaatcaggtctcaaatggatgttattgacaatggtgtccctgctccattatcaatgttcagtgagagtgattcagacatgaaatctgttaatatagatgacttgctgcccaaagaaaagctgcagaggaagttgccaaagccatcagcgggaaggcgaaaaaatggttacctacaaaatggtggttctgtgcatccttatgctgatccagagcaatgtgcagatacaaagcaatcctttggagcctcttccagtggggttacttctcttgatagcatccagaaacataagttgaacatagattctgattctttaggctgtatacagacacaaattcctatgacacgccctgactatagtcatgctccaaatcacacttccctctttccgactttgctctggagtcaagctgagcatgatggagcttccatctgtcacctgcatcaaatcatggatcccatggttattaaaactgaaaagagaatagagaaaagtatgtatcgcttagtaaggaatcacatggatggccacaataattgaatagctactgtattcatttgatactatgaaaagtgaataacaaagaaaacgcagtaaatatacagggatgccggattactgaatatggaaacagacgcaaacaccaatgatcggtctgtagcacacttactgtttcacaggccctcagatccatcagtgttgcttcctaacgaaactttacctttcaaatccagtgccacgatgcatcatggatcagtgatcaatccaccagtgaagactgagaaacaggtctgtcaggaagattctactggagtggaaaaaaagttttacggggtaacacctaatgaaagtgaaaccagcgttggcgcatttcgttgtacaatttatacttttccggtcattctcgtatatgatgttatcttattagttagggctcactcgtatccctttgttcttatgcatcaaacattgagagttataatggtaattttttggaactgctgccttgaaaacaaatgagaatagagataagttgtatcattgctgtgatggaaccctgttaagtagtaatttccaaaaatgaaaatatgccaaatcaaatgccatttcacagtctgggcttcagctcagcaagtaggtcatcagtttgaaaatgaaaatgaaggtcatagtgaagttcaaggagttggcctaggcttttcaccagaaatagattcatcaacagtgcaggaaagctcatccatgggctctgctttggaccaagcttcacctgaagcaaatagcttttgccacctgcaacagatcatggatcagttggatattaaaaccaaaatgtgcataagggacagtctataccgcttggctaagagtgctgagcaaagacacaataattcaaatgcaaatggttgcattggagatgatgaaacatgcaaagcaatgatggcgcaggatgcaaacaggtgtgccggattaatggatatggaaactgacacaaaccccattgatcggtctgtagcacacttactgtttcacaggccctcagatccatcagtgttgcttcctaacgaaactttacctttcaaatccagtgccacgatgcataatggatcagtgatcaatccaccagtaaagactgagaaacaggtctgtcaggaagattctactggagtggaaaaaaaggttttacagggtaacacctcatgaaagtgaaaccagcgttggcgcatttcgttgtacaatttatactttttcggtcatcgtcgtatatgatgatatataattatttcgggcttactcggatgcctttgttaatttgtgaatcatttttgcataggatgccatgatactaatgtaaatttgtgctaatcaaatcatcataaggtaatgatttagtgtaatgctactaggttgcaacggcttttcaccagaaatagattcatcaacagtgcaggaaagctcatccatgggctctgctctggaccaagcttcacttgaagcaactagcttttgccacctgcaacagatcatggatcagttggatattaaaaccaaaatgtgcataagggacagtctataccgcttggctaagagtgctgagcatagacacaataattcaaatgcaaatggttgcattggaggcgatgaaacatgcaaagcaatgatggcgcaggatgcaaacaggtgtgccggattaatggatatggaaactgacacaaaccccat

SEQ ID NO: 3164 - DNA, 439 bp, Glycine max
  Clone ID: GLYMA-23APR03-CLUSTER140880_1
atcgtaggaggatgcagttgggaaatttggtggagtcgatcaaatcgaaggtgagatctttgaagccgaagaagggaaagaagccatacatgaagatggacaagagtgccagcgtcaaggtagagattcgcagcagaaaagcccgcaagcttatagaaaagaccttgaaggctgctgatatttccaattaatcttaccttcttctcttctcttttcataaagagtaacaacattcctcctcttgcttcgttactggttaggctcaagagggtttttttttattattagatcctcttcctctagactctctccgccactactctaagccgttgcttgtaataaaagttggcaaagttaaaataatttctctatatagttcttttgctttaaatgtaaataatgccacaaataaataatattctttatatgtatgaaaaaa

SEQ ID NO: 3165 - DNA, 1695 bp, Glycine max
  Clone ID: GLYMA-23APR03-CLUSTER14448_2
agccgcagccaaaaattcaggttattgcaatgagatcagtatcttttaacagtttatttccattggtagcatatttgcagcatacaacacaagtggaacctaaactacaatccaatttgcaagagctagcatcatctaaacaagattagcttgctttaaaaccggagcagcactgtgatattttgatgaccacgtgtttgggagaattctcaaacattcaaacaataactaatggctgaaaaaactgtctcaaagtcaccctgtcattaccatgcttcctagcccctctgaatttcagtgtcatgaatgaatgtccctaagaattgacaggttttccatttaatttagggaaggggtcttgcttgctcaatacaacaactttgcttttgtgggcaaagtaacctttcataagattcttatatatcagtatggccactatacactctacctcatccacgtccatatcaattacaagccatttcaatgctttaacaataacttctaacttcacctgatgagctctgcctgggtccctctgcttttgaatgatgtaaatcttctttactaatctctggtatacctgaagttctaacttctctaggacaagatatacacctgatctcaagaaccggtcctcatgatcttgcagtgcacaccgaagaagccgaagatcgccccttcttagagcttgtacgattttactatactcaagtagattgtacttctccaagagactgtttttaggtaatatgccaatcgaaagcttcactggaattagatgtttaagaatcatcctgaaccaaaccttatattggcttcactttgaggattgcaatgcttcagggcatacgataatttataatcagcagcaggaaaattttcattgaaaacttcaagacgaccagtatagtacatgtaagtgaccttgtctcttttgggaaattcctcaaaatcaaatatgcgtgcagtttcaatgcttcttattacactacggcaaaggtgaactgtgccaagcttaaagtaaatcttgaatagctgacaagttacatataatgctccaacacgcttagagccttttcccgcaagggtgccaaaaactttcataaggacggaaccggcgcctttcaacttctcaggggatttcccattggaaaccaattctttatcagccttctcggcaagaaccctaatatcgtaaacaatgacgtacaaagcctccatagcccacgcggattcccaattacgaaactcctggataaacgcattggcggttttttcgaaagcgttataggcttcgagcaagttgttctggcggtaattttggagggatcggaagagagggacgaggatgtctgtgaactgggaatggttgtcggattgcttgatgagtctgttggcgtcttggaagaggttgagcgcgtcgcccagagagagaaggaatggggaattagaagagagagcgaagagagacttgaacgtagctccgtcttggcaagaaatcgcgtcggaaaagcgattcagatactctgttatcctcctatgagcttcccccatgctcatgtacgccattgctaattgctactacttgcttcgtaacactgttgcttcacctgcaaattctacgggggggggggctaaccctgctcttgggctttgcctcactcgttacggccattaacggaccggcacaggagc

SEQ ID NO: 3166 - DNA, 1715 bp, Glycine max
  Clone ID: GLYMA-23APR03-CLUSTER14538_2
caacaaaagaaaagacttatagtgaataaatgcctctcaaggaaaattatatacaagtttctttctattctcttctgatgtatatttctattctttcatcggtgacttctctggggaaaggaatgcggacgtcaaacacgccttcgaagaagcatttcttcacctaaaagcaacttaagaagtaataatatgtcgtttttcttgcatagctaaacgacacctcgttttgctacgtttttatttatccacaccagacgagacgcagcgttttgactctgttatcaagtgatggcgatgatggcggcgacgacactcacactgacaccaccgagatggtcgtggcgtccaactcgtcgttccttttgccggcaaatgcatccagggctgagaggtgcgtgcgtcacttggcattgctgcgctacatgacttgaattaaataatttggattgtgttttgtaggtttgggaatgtacagaaatggtgggagcaatgaattgaatgtttctgcctgggatgataagccctttgaaatgcttccgagcggtaacaaggcttacttggatgagcaggatgtggtgacgtttcttgatcctcctaaggacttaatccctttcgacccatcttcctataatcccgctgcatacctatggtatcactatctattatgcttcctacaactctttcaatgcaatgccacttcactcactctccttcttcaggaaaaaaattgaagatattcctcaggaaaggcgacatcgacttctccgattgttgaaacctaggtatttttatttttcctttctcttttttctaattcttccgcattcatcttatcgaacactcacgctgccaatttttgtgcagacttgtatcaattgcttggcagattgctggtacacgattcgatgatcccaagttagtaaagaaaagtgcatctaccttgctgtctagctccaccaacgatggtatcatgcttgaatgttataactgcacatcaagtggaggttagagaactcattcatcattgttgtgaatgtgttgttggtattagtcactgtcaagtttaacactacacaatcaatgcattctgtttcctactgcctcccattctttgctgacctccacgtcaaggaatggaccagtaatttatgaccaattttgctccctaataccattgcacacttgaatcccagtgttcttccccatcattccaagaagatcaatgaagaaagtggtcaggattgtcggtggaaagtgagtgcatttcagtcataatgggatacttggagttagagggagagggaccctgcttttggcaatacgggccaagcgcggtgtcagctttaaagaagggtcccaagattgcccgattatggcagcattagcagtaacgtccaaggatcgtttggtatggcactatggctgactgttcccctgaatcctcagtcacaaaaagacaagtttcttaaaacatattcctactagatttaagctttttccataaccaattctctatcaaccttgctttggtattattatatgccagtgaagaattgtaggtccaatatttagccctgcataaaggaaaaaacatgcaatttttactctttattttcgtacgatgaagaaatgttgaggaaagttttttcagggttgtatttgtgttagacattaaatatagtgtaatactgtgacaatgaaggtccctgtttttc

SEQ ID NO: 3167 - DNA, 1255 bp, Glycine max
  Clone ID: GLYMA-23APR03-CLUSTER1468_3
gttaagaaatcatttttactgaagaggtaggcagggaagagagagatggcaggagggaggtattgtgagaaggaagtgcttccattcaccgcaatggttgctgttgagtgcaccaacgttggtgtcaacgttctattcaaagcagcaactgagaagggtttaagttactatgccttcatcgcttattcatttgcagtctccacccttttcctccttttgcctctgcccttcgtctttcgatggtcaagggggcttcctccactcaatctgtctctcatcttcagaattttcctccttggagtaattggacttacagcgcagctttgtggatataaaggacttaaatacacttcgcccactcttgcttctgctcttagcaaccttataccggctttcaccttcatactagcaatcattttcagaatggaaaaggtagctttgagaagcccaagcactatggccaaaatcttgggttcgttagtatccatatcaggtgcactcatagttgttctttataaagggcccataatcttatcaacttcttctccacaaccttcaccaacaactgattctccaatggattctacatctcaaacaaactgggttcttggtggatctctacttgccattgagtttcttttggttccaatctggtacattgttcagaccaatattatgaaacaatacccagcagagtttattgtggtcttcttatacaacttgactgggactctcatatctacaccaatttgcttgctattagaagccaatctgagctcttggaagataaattgtgatataacattgatcgccattatatattcgggtttcttttccacgggcctaagtagtttggttcacacatggggcctccatcttaaaggcccagtttatatatcaatctttaagcctttgtcgatagtcgttgccgctgctttgagtgttatattcctcggtgatgcattatattttggaaccgttgttggagcagtgatactctcatttgggttttatgctgtcttatgggggaaagcaaaagaagaagaattgactgtagtggactttgatgatatacgtcctccttcaaatactaagagtcctttgttgcagagctacaaagtgaaagatgaagataaccaaaatatttaactatattgtaattttatttgaaattccaaaaaaaaacaaagcattgtgacattttctatttctgattagagtgagaatctaatgcatatcaaacatcttgatcctt

SEQ ID NO: 3168 - DNA, 1671 bp, Glycine max
  Clone ID: GLYMA-23APR03-CLUSTER146_1
gcaccacgaaatgaagaaagaaaacacgaaagtaacatcagatcacccccacacacagtgatagagagaggaaaaagacctatactttgtttcccttggagagcttcatggtctcggctaatgagtaggacacccgcaagtgtaaaggcagtgaaataaatgtcaaagccaagaaggagacatgggaagaccaccttgttgtgacaaagaaggggtcaagaaagggccttggactcctgaagaagacattagaaccctatcaagtaaagagggttagagaaataaaaagagaaagccgacagcacatagatagagagaggaaaacgacttaatattctttttccttgagacctgaaggggctaaggaaaattagaaggacacacaagtataaaggcggtgaaataaaagagaaagacaagaagaagacatgggaagaccaccttgttgtgacaaagaaggggtcaagaaagggccttggactcctgaagaagacatcatattggtgtcttatattcaggaacatggtcctggaaattggagggcagttcctgccaaaacagggttgtcaagatgcagcaagagttgcagacttagatggactaattacctgaggccaggaatcaaacggggcaacttcacagaacaagaggagaagatgataatccatcttcaagatcttttaggaaacagatgggctgcaatagcttcataccttccacagagaacagacaatgacataaagaactattggaacacccatttgagaaagaagctgaagaagatgcaagtaggttgtgaaggtggtagctttggagaagggttttcagcctcaaggcaaatccctagaggccagtgggaaagaaggctccaaactgatatccaaatggcaaagagagccctcagtgaagctctttcaccagagaagccatcttgtaatttatctgcctcaaactcaaacccttcagatagtagcagctccttctcttccacaaaaccaacaacaacacaaactgtgtgctatgcctcaagtgctgacaacatagctagaatgctaaagggttggatgaaaaacccaccaaagtcctcaagaacaaactcatcatctgtgactcagaactccttcaacaactttgctgcagcaggtgctgatactgcttctagtattggagcaaagggaccaccaagcagtgctgaattgtctgaaaacaattttgaatcattgtttgattttgatcagtctttggagtcttcaaactctgatgaattctctcggtcattgtctcctgaggccactgttttgcaagatgaaagcaagcctgatgttattggtgcagaaattatgccattctctttgcttgagaaatggcttcttgatgaggctggttgccaagagaaattagttggttgtggtgatgatgccaagtttttctaagttgggttcattttgtgacatatatgagactgtggaattttttattttatttcataagttataggtagggcctcatcaattaatcttcgctttggccttagagagagaagtttttcaagcctttggtgctagacgtgtatatgttaataactattgaaattatgattattgttatcatactgtgttagatgccacactggaaaacctgcttcttttatgtaaagttgatcctgcgatg

SEQ ID NO: 3169 - DNA, 1998 bp, Glycine max
  unsure (1)..(1998): unsure at all n locations
  Clone ID: GLYMA-23APR03-CLUSTER147144_1
cgggtgtgggggccctttctcggggagccgggaggcccaagttttcggccccctgcgtgggccggtttcctcgggccagtgggttcgccgcttcccttcggcgctgtttcggcgtcgggccgccggggggggcgttgggcgggaagggcgccccgccgcccgggtgccgggcctcttgggagactctctctctgatgcccccccgggcgatggccgggctttgcgccttccgcggcccagttccccttgggccggtcttgaacatcctaatcgaaaacttattattagaccctttctcttagagccaagaggtttaagttatagtaacattacttgaggagattaccacttgctagaaaaatatgaagttccatttggtgctatttgttataatagccgccatttttggagttgggcttgaagggtgccaatgcaaggttgtgcagttcatttttggagactctctctctgatgttggaaataacaattacctttctaagagccttgctcaggcaagtttaccttggtatggtattgatttgggcaatggactccctaatggcaggttctcaaatggtcgcacggttgctgatataataggtgataatatgggccttcctaggcctccagcattccttgacccatctttatctgaagatgttatattggaaaatggagtgaattatgcttctgggggtggaggcatcttgaatgaaacaggcagttattttattcaaaggttttctctctacaagcaaatggagctgtttcaggggacacaagaactgattagaagcagaattgggaaagaggaggcagagaagtttttccagggagctcattatgttgttgctttaggcagcaatgacttcatcaacaactacttgatgcctgtttacagtgattcatggacatataatgatcaaaccttcatggattacttgataggaactctaggagaacaattaaagctactgcatggtctaggagcaaggcagttgatggtgtttgggctgggcccaatgggctgcattccacttcaaagggtgcttagtacatctggggaatgtcaaagtagaacaaataatctggctattagctttaataaggctacaagcaagttagttgttgacttgggaaagcaacttcccaattcaagctacagatttggagatgcatatgacgttgttaatgatgtgattaccaacccgaacaaatatgggttccaaaactctgattcaccctgttgctcctttgggaatattcgaccagctcttacatgtatacctgcatcaaaactgtgcaaagatagaagcaagtacgttttttgggatgagtaccatccttcagacagagctaatgagctaattgccaatgaactcatcaagaaatttgggtttgtgcgtgttgatcaaacaaaacctccttcaccatcacccgctcttgctccgtcttcagacgattaatcgtgcatgtgaaggttttattactaaatgctcttaaattgcttttgttaaatttgtaatcaaagttggttctctttaattacaagtcggttacactaatttattgatgcaaaaaaaaaaaaaaaatacctcaggcgggtcctgtccactctcctgaacggcgcccgggtcccccccttccccccggcagccgtgggcgcagagcctccggtggtcgctcgccggccggtgttcgacgcgcgcggcgtgggggttaacctgggcgttccccagtttaatcgccctttggagaacatccccccttttctnncaggctgtcgggtanaatagggaaagagaggggccccgtacaccctctnnnttcacgcccnnnnnnnnnnnnnncccacccgnnnnnnntgccgggtnnnnccccccgggagagggggggggggnncaaaaaaatttttttaaaataaanataaagattataaccaaatattttttatttttttaatcggcccccccttttttttttttttaaaaatagaaa

SEQ ID NO: 3170 - DNA, 1281 bp, Glycine max
  Clone ID: GLYMA-23APR03-CLUSTER14790_1
tcagctacgtaggccccccccccaataatttcatttcatgaacccaaaatagtttgaattaaatggtcggtttggctttgatgcagcatgtgggtgtggccctgacatcatgccctggacaactgaaaccggtaacatgtgaatttagggtcagaatccgatgctcctccaatgttggtgtttctaggcaacaagttctggagaaattggacaaggagctagcaaagggagatgatagagctgcgctcgcacttgtcaaggatttgcagggtaagcctgatggccttcggtgttttggtgcagccagacaggtgcctcaaaggctttacaccttggatgaattgaggcttaatgggattgaaactttgtctcttctttcgcccgtggacacaactcttggttcaattgagagaaacctccagattgctgctattgtaggaggccttgctgcatggaatgcctttgctatttccccacagcaaatcttctatatttcacttgggttgctctttctatggacattggacgcggtctcttttggtggaggtattggtggcttggttgttgatacaattggtcacagcttcagtcaaaaataccacaatagggttattcaacatgaagctggtcactttttaattgcctatctggtaggaatacttcctagaggatatactatttctagtttggatgctctgcagaaggtgggatctctgaatattcaagcgggcacagcctttgtagattttgagtttcaagaagaagttaattctggaaaagtatcagctacaacattgaacaaattttcatgtatagcattggctggggtgtctactgaatatcttatatatggattttctgaaggaggtctggatgacataagaaagttggatttattgctcaagggcctaggcttcacacagaagaagacagattctcaggttagatggtctttgctaaacacggtcttgctcttgcggaggcatgaagcagctcgagggaaggttgccgaggccttatcaatgggaaaatctgtaggatcctgcattgacattatagagaattctatcgatgtttcagatctctaactgaagctttgacccccttgattattcccttctgttactctaaactctgctctcagatatgttgattaatatttccataaattttcatatggtattattaccttgctcataaattttcatatgattataccgtattgttgtacagtggaaagaagtaattcaatataaaaaaaaagaaaaaaaaaaaaaaaaa

SEQ ID NO: 3171 - DNA, 1258 bp, Glycine max
  unsure (1)..(1258): unsure at all n locations
  Clone ID: GLYMA-23APR03-CLUSTER147993_1
cgagtcagctacgtaggtcccccccccgaatggaataagtttcataagattataggatnagactagtagttaaaaaatagtgttaatagttaaatgtatcagctacgtaggccccccccccactttcctgatccgacccaatccgttgtccactgttgttggccaagggcttcccggcggtgacgactgacgagtgaaatgagtctcagaaaaattaagttgttttgtttcttctaggtctcttcgttcccaacatcccatgatgcttgttgagctgttgggttatccaagcttcaaaattctgagaaaatgaacaaggccatcttcaccagattctttcactccactcctctcttggaacgcaaatcccgcacttttggggaatctagatgcaacaattactccaaaagattccgaaaactccgtgccaaacaaacgctgcttcacgatgtcaatgcctacgcacaattcatgtgtcagagctggaaagaagatgttgatgaggatggtccatctcccagtctaggcccctcatggttcagaaaacaatattctcctaaaggctctggaaggcacaggaatgacaatcaaagatcaaagcatcaatttagaagaaatcatgaattttgcaaagatgattttgacgttgaaaccgttttccgctctgcctttggtggcaatcgatctttttattggtcctttataaatgaggaaaatcctcagtggaggaagtcaggaggcttttctaatcatgggaaatcttggaattggagacgttggagtgaaaatggatataatggcacatcaaccgagtcagattgttcgcaatcagatttaatttcagatagattagcccttggaatgagtgcttctggccctttgaaacttgaagatgtgaaaaatgcgtaccggatatgtgccttaaagtggcatccagatcgtcatgatggctcttttaaggttatagcagaggaaaagttcaagcattgcagtgctgcttatcaatccttgtgtgataagctggccttggattagggagtaagaacttgcttttttttattcagagttagaacttgtttattagtaccttttctacaactttctggctctaagcaattatatgcccaagctaatttattttacacaaagcttgatcgatatcattccttttcattagtttatgtacaaactgaaggagtgaagtgagatattttttctccagcatatttatgcatactgcaaaaaaaaaaaaaaaaaa

SEQ ID NO: 3172 - DNA, 670 bp, Glycine max
  Clone ID: GLYMA-23APR03-CLUSTER148539_1
aattgaaattccctcaaaaaaactcaacaacccaactcaaacctacccccttcatagcaaccaagccaaaccttctcctgctccacaatcaaattccatcaattaaacatccctataggcttctcttccatggaaaattaccattcttctaaatccttgcatcttccatgcaaaaccttatctctagttctcctttttgtttacttgctacttattggttcttgtgatgcaataagaataggccaaactatgaagctgaatgaaagaagagagattctcaagggaaagcgcaataaccaacatggttttccatacaaaagcatggttttcaacttcttccccaaagggccggtgccaccttcaggtccttcaaagaggcataacgcagtggtggattcaacacctaataattgaagtacatgagaagtcctatttgttcaatttttccatttttttcttccttttttttcgtagaattttttggttttgtaatatttatgggagggttgcaaggattcttatcagatcaaatgtcaagccccaatagatcagatccttaaaagggtctgagattttttggctcttattctagatcacacatgtatagaaaagattgttgacatatacaggaatatgtatattattgttcagtgcaaaaaaaaaaaaaaaa

SEQ ID NO: 3173 - DNA, 907 bp, Glycine max
  Clone ID: GLYMA-23APR03-CLUSTER148769_2
tcaattcaagttctatgttgctgttctttgttgatgggctgtgaattgtggatttgtgggcttttaatttatgattgacaacatgattatcataatgcattgaatcataagcacttataaactcgtgtatgctggtttagttactacatctgtttattatattctgcattttaagaggttgtagggaccttcactgcaatattggggtgtgagtttccttttacaactaggaggattatcttgtaggttctggtctacccaagtccagagctagacggttccttccatcaagcagcgagtttccatttattaacacttcccatcaacctatgaaccttggctaatggcattactaggattccatgttgtgttgctgcttgtaactatcatctctaggaagaagactaactttcaaatgttcttgttccttttgacattggctggtgtatatcttgctgagaggctgaacagatttttgggaaaaaactggaaaagtttctctagtcagaactactttgatccgagtggactatttatgtcagttctttggtctggacctcttcttgtcatttctatgataatcttgatcaatacactcttctccttatgttacttgattgttaggtggaaaagagccgaactgagacatcgtgcaagggctgctcgcaataagcaggactagtgttttgttgtgggattttgatggcttaaactctgaaggagttcatgtcaatggcaacgtaatcatatgttttacaagagttttgtttttcctttttttttaattttttttttcagatttagtacttgttatttccagttatgtttgtgtacactattaacgggatttttttcctctccttttattaaaggagatgagaatttaacaaagtgctaattagattgt

SEQ ID NO: 3174 - DNA, 901 bp, Glycine max
  Clone ID: GLYMA-23APR03-CLUSTER149985_1
agtctcttgttgttctttccacacacagagcagagtgagagagtgttttgtttcaatgtggctaccatggcgtctccgaaccacagcttcgcgtccaaaccgatcccaatccttcaccatcccctgctcttccttcaaagacatccaatccatcctccaatccgaacctcaacctccctctctcttccgccgcctaatcgtctcgccctccctcatccgctcctttagcagcccccgcgccgccacctcctccatcgaaccgcctccggactccgaccgttccgccgtcgtcgtctactacaccagcctccgcgtcgtccgccgcacctacgacgactgccgcgccgtccgatccatcctccgcggcttcgccatcgccatcgacgagcgcgacgtcagcgtggacgagcgcttccgcgaggagctgcagcggatcctcgtccaccgcagcgtgccgctgccgagcgtcttcgtcggcggcttgtacatcggcggcgccgacgaggtgaggaagctctacgagagcggcgaattgcacgagctgatcggacggttgccgaagtcacagaggaacatgtgcgatttgtgcggagggctgagattcgtggtgtgcgacgagtgcgatggaagccacaaagtgttcggagagaagagtggtggattcaggagctgttcgtcttgcaattccaacggtttgattaggtgtcctgcatgtttcgtggtgcagccgcaacacaccaaataattccattccctcctctattcttcttcatgttgaacttagatatattcccttaatttttcattggtgatgatctctctgtgaattactcttaacttttcattgttgatgatctctctttgaatcccccaagttagattctttcaaaaatttccattt

SEQ ID NO: 3175 - DNA, 567 bp, Glycine max
  unsure (1)..(567): unsure at all n locations
  Clone ID: GLYMA-23APR03-CLUSTER150696_1
atacccattttaattttatttttttttctctcaaagtgatgatggcttcaaattaccctagaaagggactagccttaacttcttcaaaggccatagctaatgcagcttcatggtactgtgcctttgttctcgtggccctcgcgctcctaagcatgttcaaagacagctccatgcttattcctagtcaatatgccagcggccaactattgtcacggccatgcgaggaaatctatgttgtcggagaaggtgagacgcttcacacaatcagtgacaagtgtggtgacccttttatagttgagaacaaccctcatatccatgaccctgatgatgtcttccctggcctcgttatcaagattacaccctcacttcgtacctagaaattaaggttgttatataaggaaaaatcaattttcctatccatgtgagagagaaataacatccttttcttgtcattaccttctctcttctattttttttataaaaaaaactttgttcctatcttatctattggatatatcttctcaaaatcaacatgaacttgattnttgtgcaaaaaaaaaaaaaaaa

SEQ ID NO: 3176 - DNA, 1709 bp, Glycine max
  Clone ID: GLYMA-23APR03-CLUSTER15156_2
acatacacctcaaacaaataccaaagtgccttttcttagaatggagctcttgtggaaagatcacatgagggtacaagtaattagattggtttgtgctgtccttttggtgacactgctgagctcagaggtagctgagagcagaaaagtcaaaactgttggtacttcctttaagtacgaagctataaattgcaggactcatagtgcttcattgactgattttggtggtgttggagatggaaagacatcaaacacaaaggcatttcagtctgcaatcagtcatctgagtcagtatgcttcaaaaggaggggctcaactttatgttcctgctgggaagtggcttacagggagttttagtctaatcagccacttcactttatatctaaacaaagatgctgttcttcttgcatctcaggatattagtgagtggcctgcgatcgaaccactcccatcatacggtagaggaagagacgcaccagcaggaaggtacactagcctcatatttggaacaaacctcactgatgttattgtgacaggtggcaatggcaccatagatggtcaaggagcattttggtggcagaaatttcacaagaaaaagttgaagtacactcgcccttacttgattgaattaatgttctcagaccagattcaaatctccaatttaaccctcctaaattctccatcatggaatgttcatcctgtttatagcagcaatattattattaagggcctcaccatcatcgctcctgtcccatctccaaacacagatggcattaatccagattcttgcacaaataccagaattgaagactgctacatagtttctggggatgactgtgtggcagtgaaaagtgggtgggatgagtatggcataaagtttggatggcccacaaaacaactagtgatcagaaggctgacatgcatttctccacaaagtgcagccattgccttggggagtgagatgtcaggtggaatccaagatgtcagagctgaggacatcacagccatccacacagaatcaggagtcagaatcaagacagcagtaggaagaggagggtatgtgaaggacatatatgtcaagagaatgaccatgcacaccatgaaatgggtattttggatgactggtaactatggttcacatgctgatagccactatgatcctaaagccttgcctgagatcaatggcatcaactatagagatgtggtggctgacaatgtcaccatggctgcaaggttggaaggaatctccaatgatcccttcactggaatctgcattgccaatgtgacaattggcatggcagccaaggccaagaaacagccttggacatgcactgatattgaagggatcacaagtggtgtgactcccaagccatgcaattctttgcctgatcaagggcctgagaaaatcaaagcatgtgattttccccaagggaatctaccaattgatatgttggagctcaagaagtgtgcttacattatgaagcatgcatgactatacttgttttaagatgtgtcttctagttatttatttaaggccagtctttcccatttcatccagaaatcattgctcaagatgagaaatgaatgttcggtctcgtaatgaaacaattttcttatcgctctataagttaattttagaaatggctttatggttgtttgagcccaagcattatgctgttgcattaatcaaattttgctagttctgttctgtc

SEQ ID NO: 3177 - DNA, 825 bp, Glycine max
  unsure (1)..(825): unsure at all n locations
  Clone ID: GLYMA-23APR03-CLUSTER1520_52
agagacgcaaatcctttcatatgatagctaaacttgaaagtagagagagtatgctataattgtttctcaaatcagaccacacaaatgtaaaattccacaagcagtgtacttaattgcaacccgataactttatcagtaatcataacctaaatcaactccttaatgacaatttagggcactaatcgagtctacacacacacaacacccccaaaaaaagtaatccaagaccttcggagtctattataattcaccagggcttaacaaagtagcaatttctctcanaaaagcttataaataaatgtcttccaccgattcgaaggtaaacctacttgaaagccgttcgcgagggttctgaatagcttcgcgaaggaactgatcaacctgattgatgacgtcatcggaaacctcgtcgccactggacgaaggaggcggaataggaggcggcatagcatcgtcatcatcggcgacacgttggtgaggttgcttagaatcgttgttggaagagagcatgaggttcaagcggttcatggactcgtccaaatcagcgacctcccatgactcgggggctccgaaatcctctgcagagccctccatggagaaactgcaaagagaagaaagcgatttgtggagggttagggaatcgaacctgattctgatacggaggagtgtggcgtgggaggtttcatgagaagattcggttttagggttagggttagggaatggggatttggaattgggggcagagtgaatgagaatgcgagatataggatttggtttggtttgacgacgacgatggatgaatggatggatgcagcttccttcctt

SEQ ID NO: 3178 - DNA, 2153 bp, Glycine max
  Clone ID: GLYMA-23APR03-CLUSTER1520_77
atggaaaataagcacacagaaacaagtctctacatgtgtggagtccttgttgttgtggtgtgccggaaaacaaattcaacagttcattgaataacataaccatctaggtgcaccttcacactttctcactgaagctttatagagtcatataggttgataattcagagaaaagcttctatcctactatttctttggattcgccacttcatcaacatgaagctttctgtgttctggtttgcatgggctttttctcttctaatttccatggcttctgctgctacagtagaacacactttcattgttcaaaacaaggctgtcacactcttgtgcaaagagcgagtgattgtcacagtgaatggactttaccctggaccaaggatagatgtccgagaaggggacgctgtggttgttcacgtaatcaacaagtcaccctacaatatcactattcattggcatggagtgtttcagctctttagtgcatgggcagatggtcctgaatatataacccaatgcaatattcgtcctcaaaatagttatacctataaattcaatgttatacaacaagaaggtacattgtggtggcatgctcactcaggagttttacgtgccacggttcatggtgctttcatcattcaccctcgttcgggtctgtttccttttcccaaaccccacaaacaagtaccaataatattaggtgattggtatgacggtaatattgtggatatttatcagcaagtactccttctcggggatgtaaggccctctgctgcctacaccatcaatggtttgcctggtgatctctacaattgctctagaaatcagatgttcaagctaaaggtaaagccagggaagacctacttgctaagaatgatcaacgctgcattcaataacaaccttttcgtcaagatagccaaccacagcttcacagttgttgccatggacgcttcctacatcgaaccctatgtgaccgacatcatcaccatcgcccctggccaaactgctgacgtgctcttcaaagccgaccaacccataggctcatattacatggcagcctctccttacgttgtgggccagccagaagccctattcgacaccacgacaactcgcggcattgtcgcttacgaaggctacacgacatcattaaaagactcgaagcccattgtgccactacttccacccttcaacgccacaccaattgctcacaaattttttagcaacatcacgagcttggtggggggcccacattgggtcccggtcccacttgaggtggaccagcacatgttcatcaccattaacattaacctagaaaggtgtcccaggaatggcacgtgtcaaggtgtatttggacagaaattctccgcaagcatgaacaatgaatcatttgtgcaccccgttggaaaagggtactctatgttggaagcatcgttttataatgtgagtggtgtgtatactactgatttccctgacaagcctccaatcatatttgatttcacaaaccctaaaattgctttggatacgaagtatttgtttacgccgccaaaatcgaccaaggtgaagaaactcaagttcaattcgaccgtggaggttgtgtttcaaaatacacaaattatgaatgcgcaaagccaccccatgcaccttcatgggtttagtttccatgttttggctcaagattttgggaatttcaattacaccaaagataaatacaagtttaatttggtgaatccaatatttcgcaacacgattgctgtgccagttggaggatgggctgttataagattcaaagctaacaatccagggatgtggtttgtgcattgccatgtggatgatcatcagttatggggactagacatggttttcgaggttgagaatggaccaactccttcaacttctctccctccaccacctgctgatctacctaaatgttagctatatattttcctggagaatgcaatcacaaaatcacatgtcaatattaatttcccctcttctttttcagtgtatttagtaagccattttttttaaatttcaagcaataaattaataatagtttcacttaaacacaacatcaagcaagataagtaaaccagaattatctgtaaattcttgctataattaataaaaggagcttactaagcacaaaaaaaaaaaaaaaa

SEQ ID NO: 3179 - DNA, 1291 bp, Glycine max
  Clone ID: GLYMA-23APR03-CLUSTER1520_91
aattttatcattacccgccacttccgccgccacttctcactctgactgaaccacctcaccaaacaaaactaccacattaaaaaaacatgtcactcttgttctcaccgccaccttccctcacgggcctcagccttcacccccatgtgcactttagcccctccatgtctatcctacgccgcctccccttaaaccttcgcaccacccgccgccgccgcctcgccaccgtttcggccgccctacgccaggacaccgccgtctggaccccggcccctctctccgaggtcgagcacgccgccgagtcgctctttcacatcgccatcgacgtctccgacgcccccgaccttgccgcgtcacacacactcgccgggcagtacctccagctccgggtccccgacgcgccgaagccctcgttcttggccatcgcgtcgccgccgaagctcgccgcggcccgtggcgtgttcgagtttctggtgaagagcgtggcgggatccaccgcggaagcgctgtgcgcgttgaagagaggggatgtggttgaactcagccaagtcatgggaaacggattcgacatcgatcggatccaccctcccgagaattttggaaccgttctcgtcttcgccactggatctggaattagtccaattcgatcgcttattgagtcaggatttgatgccgggaagaggtctgatgtgagactatattatggggccaggaaccttcagagaatggcttatcaggataggtttaaagactgggaatcttccggtgtgaagattgtgcctgtattgtctcaaccagatgagaattggacaggggaaagtggctatgttcaggccgcattttcaagagagaagcaaatatctgacccactgacaactggtgctgtactttgtgggcagaaacagatgaccgaggaagtgacatcaattcttgttgctgatggagtatccgctgataagatattgaagaacttctgaccaaaatggatttttgagcactgttgtatcattttttgatactccataattatttcattgactttgctgagtatcaagcatctcagcctgaaatgtacaataaaaaacaattttgaaattttagtctatattagaatttccggggtccaaatataggacggaaataccaggcttaagaaagtcgaaaaatacttgcgagggttggtttgttggcactcttgcaagccaatcttttgttctatcaatgcctgtattatcacgcagccatcatcgatatattgacattaagattgacactgaaaaaaaaaaaaaaaaaa

SEQ ID NO: 3180 - DNA, 2217 bp, Glycine max
  Clone ID: GLYMA-23APR03-CLUSTER1520_97
acctcaagactagagtggacatttatattttaagaatctcgaaagtcacaatcaaaaccctatcctcattcctcaagcaatggccgccgcagcaccgcccccggccccaactccagccccggagcccgccacatccctcccggaaaccacccctctcttcacccgcatccgcctcgccaccccttccgatgttccccacatccacaagctcatccaccagatggccgtcttcgaacgcctcacccacctcttctccgccaccgagtcctccctctcctccaccctcttcacttccccacccttccaatccttcaccgtcctccttctagaagcctcccccacccccttcctcaattcaaccctaaacccaaaccctttctacaaacccatcaccaaactccttaacctttccaatcccatcaacgaccccgagagcgacacgttcaaaaccctcgacggtgttaccgttgttgggtttgtgttgttttttccgaactattcgacttttctagggaagccagggttttacgtggaagacctgttcgtgagggagtgttacaggaggaaagggtttgggagaatgttgctgtctgcggtggcgaagcaggcggtgaagatggagtacggaagagtcgaatgggttgttctcgattggaatgtgaatgcgattagattttatcaagagatgggtgctgaggtcttgaacgagtggagggtttgcaggttgactggggaggcacttcaggcttatggaggtgctgattagaatttaaaaatgtttcttttttatttttctttttccctatatatataataataataataataataataataataataataattgttatttttaggtttggaattagtcaattaggcatggtttaactgggttgagggaaattgtgagtgtaaacattttgatacctatctatctggtttgaaattattataggacttgttgttttaaaaaaaaaaaaaaaaaaaaaaaaaaaaaaaaaaaaaaaaaaattcaaaatccctgcaaattaacgaaagatgtcacgcttaagcattctgattctcctactcatagtcctatccttcagttccgcactttcagaactatgcaacccacgagacaaacaagtccttcttaaaatcaagaaagagcttggcaacccaaccactctttcttcatggctcccaaccactgactgttgcaacaattgggtaggtgtctcatgtgacaccgtcacccaaacataccgmgtccacaacctcgacctctccgaccttaacctccccaaaccctactctattcctttctccataggtaacattccctacctggagtttctttccatcaccggaacccccaacatcattggcacaatacccccgacaatcaccaaactcaccaagcttcgtaatctctatatcaaatacaccaatgtctctggccagatacctcgtttcttgtcccaaatcaaaaccctagaattcctcgacctctcctacaacaaactctctggcaacctccctgcctggctcccttctctccccaacctcgtaggaatctccttcgacggcaaccgcatctccggcgccataccggactccttcggctacttcccgaagtcgttcgtgatgttgtcgctctcccgcaaccgcctcaccgggaagattccggcgacgttggcgaagctggacgtgaagtttgtgtacttgtctaagaacatgctggagggtgacgcgtcattgttgttcgggtcggagaaacacacgcggcacatgtatctgggaaacaattcgtttgcttttgatttgggaaaactagggttgtcgaagaccttggagggcttggatcttagccataatcgtttatatgggacgctacctaagggacttacgtcgcttaaggatctgtattatttggatgtgagctacaataatctatgtggaaagattccacggggtggtaaattgcaagaatttgatgcatctacctatgctcataacaagtgcttgtgtggctctcctcttccaagctgcaaacggttctagagctcaatggagcatatataagaacatagttcacttgtgcttacgagaaaattaagggtataagaataagataaattctcttaataaataaagagaaattctttaatgttcttaactataatgttaagctactttgctaagaattttttttagtactatctatgctaa

SEQ ID NO: 3181 - DNA, 2092 bp, Glycine max
  Clone ID: GLYMA-23APR03-CLUSTER15212_1
gcccggcgcgggcaggcctccgtggtgaggggccgctaggttctcgtccccccgcgccggccgcccctcgagttcctcttgctacccccggtcgccacgttcccgctcgcgctcactagctagcacgtgtcgttgaaaaatcgatgtgttaactaaaataaatggatgaggtttgagtctcaagagctggaatggcatggtgacgatggaaactcaaatacaagaactctctccctccaaaacccgcaggaaatcctcctacggaacttctaaaaggtccattctgaagaaatccttcagccaagagcaagtcaccttcaccgctcctctctccgatgaccccctcgtcgccctcatcggtaaaggcaggaatgctagagggtgttgaatctgcccttggattatcaaaagggtcacttccaaaacctttttataccagacttcaactatggggtgcagtttttccaactaatacacatggagttccatgtatctttgatccctttggaagggctgggatatgtggtgattggctactaggttctaatatagaggcagccgtcttaagtggaattgctctagcgaaccatattgcagactattcccaaagccccggaactgaccctggagagtttgctgttggtttaaatcatgagtttcaaccactggaaggccatgatattggataattccctggtttgtggtcagaagaaaagatgaatgaaggccaagcatacgagcttgccaagtagtccttggtgctcatgaaggtctctcatctggtaacagaaaattcacttcatatccatgcaaaggaaatccccctgaaagcttcccaattctcaatgtaagatatagcttgaaatttgaacattcctttgggtgaagaggggccttatctccctcaacagccacatgatgacatgaaacgacacagaattgtaatttacgcatctcttttgaagaaagagacagtggcattattattgtcctggaatgaataaaattgtccctgaaatgataaaaaaaaaaaaaaaaaagcttatcgataccgtcgacctaaatcacagaaggggatggccaataataccaagaaactagagatttccgagtgtggtggtcctcactgttggacctttctgagcactgctgcttatggaaaacagaataaagttccacaggaaaacatcccatctgctacagcagcaaaggtaaaggcaggaatgctagatggagttgagtctgcccttggattatcaaaagggtcacttccaaaaccgttgtataccaggcttcaactatggggtgcagctcttccaactaatacacctggagttccttgcatttttgacccctttggaagggcagggatatgtggtgattggctgctaggttctaatatagaggcagctgtcttaagtggaattgctctagcgaaccatattgcagactatttccaaagccctggaactgaccctggagagtttgctgttggtttaaataatgagtttcaaccactggaaggccatgatattggacaattccctggtttggggtcagaagaaaagatgagtgaaggccaagcgtacgaacttgccaagtagtccatggtgctcatgaaggtctctcatctggtaacaaaaaagtcatctcatatccatgcaaaggaaatccccccgaaagctttgctggttttcaatggaagatatagcttgaaatttgaacgctcctttgggtgaagaggggccttatctccctcaacagccacatgatgacatgaagcgtctcagaattgtaattcacgcttctcttttgaagaaagagatagtggcattagccacatgatgacattaaaagtctcagaattgtaattcacgcatctcttttcaagaaagagatagacattattattgtcctgaaatgatcgtaaatcatctttctcatataatatccttataaacatttttcctttccaaaaactcagaacaagtagttgagaactaacaaggagaacccaatggcttcctcaatgatctcttccccagctgttaccactgtcacccgtgccggtgccggcatggttgctccattt

SEQ ID NO: 3182 - DNA, 743 bp, Glycine max
  unsure (1)..(743): unsure at all n locations
  Clone ID: GLYMA-23APR03-CLUSTER1530_4
ccctcaatcntaaatcattggncaaattatgttatntaananattagggatgttcagaaagaaaaagggtaacttggtaattcttggcagtctccatcgaaggatttcttacattattatgtgatagacaaaaacagaaacatggtattcagtttacttaagtttacaatgatatattataggcttttacctagatataatgatgcaacatagtggtcatcctactgtttttgacattttgtatacaaatgcgtgcacatatcacacgaaagatgatatgcctccataattccatccaaccacaaatacgtctttgattaaggagacaactctcctttgcaaggaatattggtgcagcggcaaacgggtctaccagaagcttcccacccattgaagccacgttccaagaccataatgttctttatcccagtatcttccttgttctcctcaagataattgacaagcctcctagcacaagttgggccacgaacctgacttagagcgcagtggaagacgagagtgtctttgcctttaactgcctgaatgagatttgagatgttatcggagaaagtgtcgcttgcgtaatgaagagaccccgatatgtgtccgtcgtagctcctctcatcgtcccttacatcgacgacggcgatgcttggatggcgtctgagagagagaagctgcgaccccgttatgtacgatatactgcgagccattatctcatacctcctcccccttctgtcgtc

SEQ ID NO: 3183 - DNA, 850 bp, Glycine max
  Clone ID: GLYMA-23APR03-CLUSTER153169_1
ctgcattgcagcgaaatatcttgcatttgcagctaaccgcaacttgctgtctatcatcttgtgtttgcaggtatcgtattgcttggcccgagctttgttttaagtcagtataggggacacagtcggagatattttgtgacgatgaatagatcaaatttcccaattatttcaaatagtgtggtgaaatggtgataagatagagcatagaggagacgtgggacatgaattgcattgaaatatcttgcatttgcaggaaacggtattgcttggcccatgctttgatttaaatcattttggtgacacacattcagaaatattttgtgaggatgaatagaaaatttggaggtggaaagcagccaacagggactccttcactggcttggtcctgcgtggttgttgtcttctctcttcttgctggtgcctctgttgttcacaatatctataagcctaatcttacattgcctcctgttgatggagttgatagcaccaagcagaaacatgatgaaaaagaatgatcatctctcctgctgaattccttttcattatcgtgaagccttgcattacaaggacttgacagagcatattcagttaggatcgaagatgttcttagtgctggacaactatttgtggttggctagttgtataatcgggccccaagtagcattagggcttattttattgtaaagtggatactgaattgaaagttaatcttagaaaaggttgcatatcctaatgagatggtctccataactttaaaaatgatgatttgagtatttgactactctgattatatattttcagagcaaatacatgtgaattaaaataaacatattataaacactgttggtac

SEQ ID NO: 3184 - DNA, 2043 bp, Glycine max
  Clone ID: GLYMA-23APR03-CLUSTER1538_9
cccccctctctctcaccctcctcttcacacattttctgtgcgctctaacaaacattcctgttcacactttcagattgtgtgttgatgggggcgggtggccgaactgatgttcctcctgccaacaggaagtcagaggttgaccctttgaagcgggtgccatttgaaaaacctcagtttagtctcagccagattaagaaggccattccacctcactgtttccagcgctctgttctccgctcattctcctatgttgtttatgacctcaccatagccttctgcctctattatgttgccacccattacttccacctccttcccggtcctctctctttccgtggcatggcaatctattgggctgtccagggttgcatccttactggtgtttgggtcattgcccatgagtgtggtcaccatgcattcagtgactaccagctgcttgatgatattgttggccttatcctccactccgctctcctagtcccgtacttttcatggaaatacagccatcgccgtcaccactccaacactggttctcttgagcgggatgaagtatttgtgccaaagcagaagtcctgtatcaagtggtactctaaataccttaacaatcctccaggcagagtcctcactcttgctgtcaccctcacacttggttggcccttgtacttggctttaaatgtttctggaaggccttatgatagatttgcttgccacccattacttccacctccttcccagccctctctctttcttggcatggccaatctactgggctgtccaaggttgcatccttactggagtttgggtcattgcccatgagtgtggccaccatgcattcagtgactaccagttgcttgatgatattgttggccttgtcctccactccggtctcctagtcccatacttttcatggaaatacagccatcgccgtcaccactccaacactggttctcttgagcgggatgaagtatttgtgccaaagcagaagtcctgtatcaagtggtactctaaataccttaacaatcctccaggcagagtcctcactcttgctgtcaccctcacacttggttggcccttgtacttggctttaaatgtttctggaaggccttatgatagatttgcttgccactatgacccatatggtcccatttactctgatcgtgaacgacttcaaatatatatatcagatgcaggagtacttgcagtatgctatggccttttccgtcttgccatggcaaaaggacttgcctgggtggtgtgtgtttatggagttccattgctagtggtcaatggatttttggtgttgattacattcttgcagcatactcaccctgcattgccacattacacttcctctgagtgggactggttgagaggagctttagcaacagtggatagagattatggaatcctgaacaaggtcttccataatattacagacactcatgtagcacatcacttgttctccacaatgccacattatcatgcaatggaggctacaaaggcaataaaacccattttgggagagtattatcggtttgatgagactccatttgtcaaggcaatgtggagagaggcaagagagtgtatttatgtggagccagatcaaagtaccgagagcaaaggtgtattttggtacaacaataagttgtgatgattaatgtagccgaggcttctttgaactttcccttgtgactgtttagtatcatggttgcttattgggaataattttgttgaaccctgatgttggtagtaagtatctagacagttgcatagcggttttgtttacagaataagatatagcctctctgaacagtttgattattgcaccatggtttgcaatcggtgcatgtcgaccaagtttctcaagactgtggagaagcttattcttgttccagttcttgaatccaagttgttaccgtattctgttattattgacttagaatccttaaccttttctgctgttttctcatgatcgtcactcgcaaatgaatcacatttcaaacttagggtgcgaaaaaaaaaaaaaaaaaaaaaaaaaaacac

SEQ ID NO: 3185 - DNA, 1619 bp, Glycine max
  unsure (1)..(1619): unsure at all n locations
  Clone ID: GLYMA-23APR03-CLUSTER15446_1
ccgaatataaaattactcacttggcataattgttgagtataaactataaaattcgaactaatccacattatctcttttttcatcaaatatatctcaaattaatgcagtactatccaaacaaaaaacatacaagggcctccaataaagcttcagaaaccagcgaatatagtacgatataaggcgcataaagttcaacatgtgcgacacacattcaacttgatttggcagatgttaaatattattaagcaatagcctctaatataaatggttagagggcagcaaaaatgggtgggaatagatcttaattggttgaaaaaaacgtttacgaaacagacttaattcgtatttctagctgcttctttctatttccatttgccggatcacacgtaatacaatcgagattgtcaggaaacgaatcctgattattagaaagagagggtgaaaaaggtagtagaattcttgcatctagctgcatgtttctattttcatttccagggtcatacaaagcaacactttcctggtaggctaaagtaagtcattagaaggagccttcatgtgacaaaggcagcaactatgatggaagaaatgggtactcagaaagaggtagcaactcaacaagcacagagagctgctacaccaacaccaataactgctcagagtatgcagcaaaaatattataacaacatctataactctggagagctgagatccactactgaatcttccacaacatgattgactgcagatgacacgactccaaagcatttattacggaccagcagactaaatgcattagaatcatttgaatattcttttgcaaacgtggtctcttcgattcctctccggttgaacccaacagcaaactacaagggcaattataattgtcttcatctaagattgccaactgacaagcatcaatttaaacatgtgaaatttaccaaaatataatttcactctgatcttttccgttctaatcgcatgaagcattggatagggaaaatgcgatggcaccaaaccgtcaaacttactgtcccggactccaaagcttgaatgatattcgacacaatagtaacagtgtcagggtgcgtgttaatgggaaaggtaaggagaagcaacccattcctcgtgagcttaaccaaagaaagattagctattccgtctttctctgcctctgctttaacaggacttgaaagtttaccatcagctccagagttagcagtgggagactcgtcgaaacattcctcggcagcatcttgtgtgcatatcttccttctcttagaagtagtatcttcttcattagggttgtttaaagtgtgataatgacccgacccaaggaacttgtgaaggatagagattgcttcttttgtagcgcttttctctcgcttgatagtacaagtgatgagaaaaccggaatgggagttacggagaagagaagagggagcgttgtaatcaaaccgaggcagcttgataacagccgagtgctgctcccacggactcatccccttctcttccgccattttctctctctctctctctcaaaacccttttcaattaaaaacaagtgttcacccccttctgtcgtcttctcgcagccgtagggggggcccggtacccaancg

SEQ ID NO: 3186 - DNA, 540 bp, Glycine max
  unsure (1)..(540): unsure at all n locations
  Clone ID: GLYMA-23APR03-CLUSTER15453_4
ggtacccatatggaaagtggctggacaccatacttatctgctctgggaacagcccaattggagttaaaanncagtgactgcgacggtccactattgccaagcaatccaatattcatcttttgttctggtcctcctgggccnctggaaaaatagtgtgaataaggggggaaagatgctccggtcatcccaattgctggcatggctgctaccctcctttggttgtccgcacttcttgcacttctctcttgaggcataattgttgttagtgcaaccggtgcagatccaatcgccaatacgagggagccaccttggaatcagaggggttttggtgtcgacgaggaggcggggttgcttgcatcggttgcagaatgatctgaaggcgtagttcctgttgttgcaactgctgcactcccaatccccttctctccctccttctcctcccatttcacctccttttgttgttcccttcagcatgctcacaggagagggatttttattttgggttcgcaggaacaaaatatatatcccagtttactcgtc

SEQ ID NO: 3187 - DNA, 706 bp, Glycine max
  Clone ID: GLYMA-23APR03-CLUSTER154787_1
gaaattcattcccttacccgagaaaatgaggtggagctcactctttgtgccctcttttctactccatattcttcttctatcttgcatttttttcacaccaactgattcctctgatggggatggggatggggatttggtagaccaaatatgcaaaaaaacacccttttatgacctttgcagctccatcttacactcaaatcccttagcccccaaaagtgatccaaagggtatggccctcataatggtcaatggaattctgacaaatgctactgacacactcagttacattgaagagcttatcaagcagacctcagatgaacaattagagcaacagttggctttctgtgctgagtcatacatcccagttgtgaagtacattctcccacaagcagctgatgccataaaccaaggtcgatttgggtttgccagttactgcatagttgatgctcagaaggaagtaaatgcttgcgacaagaaattctcgggctcaactcaagcacccttaagtgatagaaatgacattatgcagaagctggtggatgtggctgctgccataattaaactattattaaatggctgatttatttttctcttcctcctttccagcctcatttcttgtagaatatagcaattattagtgcccttatcttatccaataaatagttgagttttttgcttcagtttgtacagataattaaaaaaaaaa

SEQ ID NO: 3188 - DNA, 1672 bp, Glycine max
  unsure (1)..(1672): unsure at all n locations
  Clone ID: GLYMA-23APR03-CLUSTER15482_1
ccctcgtttcccccttaaaggcctagctctattttgggacccccagctattcacgtttttttcatgattttacttaatagttcaaaatgacgggcatataacacggggagcacgcagctgaatccttatacttgtgttactacaattattcagcaccaggaaaatattaaaaaactttaaattttcccctcgcaaccgttccagcttatttcctccttggatggtcaccgccagcacgaattttttttttttttttttttcttttttttttttttttttgaacaggccaatgcatcgttaaattttaaaataaatgtaacatgtgaatatgctacgaacgcaaacgctaaatgtcaaatgcaaatatgtatttgacaaaacatgaatatacaagataagagacatcttcaaacaaatcaacttatatggactgtacagtagaattgtctcactttacaggacggacaccaactgttcttacacgaaatcggtactgaggcaaagattcttcatcttcatcgtcatcgtcatcatcactagaatcatcttcaacactgtcccaccgtgcatagtctagagctgaatgtccttttggttttggaattgtttgccacccttttgaatgttgctctgttgtttccctgtttggtgctttaggagctatagcatctgctatggacttcttaggctcatggttttggtttcttccttgcttggatgaaaatttgaggtctgtttcatggggagcacaatcagcaataataatacctttgccaagctcaaccttttgatctgtcctaatattagaaatcgatgaatatttctctcccatctcttcattttcattttctccttgtgatatcacctcaggttcctcatcttcctgttcttgaaactcctcttctgattctggtattggagcaagtgcctttccaattgcgtcttcaaacgagcttgaagattttgataaacctctgaagatggattcaactctaaaagtctgctggcatcaaaaagtgctgaatggtactccttcagggtaactagcgtttgagcccgcagcatcaatgccccactgtgcttgtgatcaagctcaagcactgaagtacactcttctgctgcctttttgaaatcgtgaagcttgagatagcacgcggctcggttgctatgcaaagcgatcttctgagggttggtcttggccaaggcgattgcttccgtgtagaaccctaacgcctcctcgtaacttccgtcgcggtacatctggtgggcgcgttcgatcctgttcggcgccgccatctccgtcacaattcgatcgcaacaagaaaaaaaaaaaaaaggcttcagattatgaaatggttcaaatctatctgttcttggattgcactgtgcaaagaaaattgagttttggagagttttgaaatttataggttgagctcctagctcagtgacagctcgcgaatgaagggagatggggggggggggcctacctatcctgactcgagggggggcccggtacccaattccccctattagggagccgattacatttcctggcccccggcgttttacagccccgggcggggaaacaccctgcgctacctattcccccccttgcaaatccccctttcccagtggggaaaaagaaaagccccccccattgccttcccaaatn

SEQ ID NO: 3189 - DNA, 1104 bp, Glycine max
  Clone ID: GLYMA-23APR03-CLUSTER15498_1
ttttttttttttttttttgacaaggaaaactagcattcttgcttcaaattaagtgaaaacatccattgaacaagtagtaagtagtaacaagtacactaacgaagaaaatgagatgattgtccttaaaactcattataggtcaggacattgtttacttgacagactcaaatgaaactcatgatcaagtcctgtgatatgatgaagatagccttcatttattcaatagcgcagcccttggcattaaatgcttttcagaaacattatccatcttagcttggttgttactctccaacatcagcccgaaatgaatatggggaaaatgagcccagttttttgcagctgtactgaaagcttctctgtgactgatatcaggattattggctttgatcctctgaatctcttcctttataaactggttataagcagaaggtacgcgctgcctcttctcgggaggcctgttcacaaccctttcctcagttacatgagtggtgggtgcacgcattgcaatcctattgttgcatttcgacgtggagccagtgtcaatcctgtactctggattgcactgcccaggtccctgaacatcttgccatgacagtgactgaaacgcggcggccatgttcacggaccatagattggtgcagtgcccacatcgaacggtcacaatgtcaaacaggctactgcatggaacactcaccgcaagaacaatattgcaaaagttgcaggggatgtagcagagttgctcaggcgcaacatcgatgctgcagctcgacatgtctgatctcaagcttctgtactcaaacacaagaagggtggaagaagaagaagggaaagagaattaaggaggtagaaagatggatgaagctaattgaacaactagttcttctctctagcaatatcttggacaccaaaggtgaaggcaagggccttttaattattctctctctctcttaaaacccttcttcttggttagataacaactagttcttctctctagcaatatctttggacaccaaaggtgaaggcaagggccttttaattattcgctctctctctctctctcttaaaacccttcttcttggttagataatgggcctacgtagctga

SEQ ID NO: 3190 - DNA, 701 bp, Glycine max
  Clone ID: GLYMA-23APR03-CLUSTER1550_15
ttttttttttttttttggacggcatgatcaaactgctgcaaatacacttaattaacgacccacacaaaacaaaacctcttacattctcttctagtcttttacaacttactacaaaccgtacacggaataacaacccctagcgattaataaaaaggtgctctaaaccctacttttcttgaactaaacttagcagataacacaaaccaaaccaactcaaccaaacaacatccataaacctaaacagacaaaccaaacaacacacataaacctaaacagaaaccctaggcacagccttgggaacaacatccacaaacctaagcagacaaaccaaaccaactcaacccaacaacacacataaacctaaacagaaaccctaggcacagccttgcaagacagtggcttcttcatctccattatcttcacaaaatcttccaaactcaaaaacccatcaccgtcagaatccaattcctcaatcaacttttcagcgtctttgaacaataacacaccacccatcatgcctagccggttcctgagctcagatggggaaatcttaccatccccatcctcatcaaaatacttaagaacacgctcaaactctgtgttcaccctcataactgaagaaaattaacgcaaaataacacttgtgaaattgttatgcataagattatttagttatgtaggtgcgtggtcgtgagctaatt

SEQ ID NO: 3191 - DNA, 652 bp, Glycine max
  Clone ID: GLYMA-23APR03-CLUSTER15562_1
ttttgctttacccccctctccaatttaaaacaacagtatactaggtcaatcctattggatagttcaatttacaaaactaattcagcagtgcatacagaaacaacgtcaaatagaatgtattaaacaaaaacctagaaagagacataagcacgaacggcctttgacaaacaaatacatacatagatagagagaaagagagagaatatgaatgggaatttgaaatttcaatcggagtgtggatgacgatagccaaggtaggtggagagtgaacgaaacaagcgctggaaagggaggcagaagaggaggtgcaaaacgacgtcgctgctcaacctctcgggattgcaagcgatgaattgccaaaaatgcgccgatgcgtgcaccactttcgccaccacgttgatgttcagcaccatccttcgtcttgatctattctactgcgctacggcgtcgttttcttcccccctttagaccttgtcctttatccgtgtttgttgcgtgatcaaatcaaagtcaaaccctattttcagactcggccgtgtttattggacgttgcgatgttgctgtttgcttagttattgtactatttttttatagttagtttcactgtgtcatgtgataccagaaccatgtaaggaagaagtttggacgaaag

SEQ ID NO: 3192 - DNA, 1693 bp, Glycine max
  unsure (1)..(1693): unsure at all n locations
  Clone ID: GLYMA-23APR03-CLUSTER15566_1
cgatnacatatggtttgttttggttggtctcatgctgggtttcgacgggggtgcgccaagaatggagccccggaccaaggtgccttgagtcatcatgacgcctgttgcggccagccagcgattgatggtcttgaacaattggcgggccagttgatgctgctccagcaggtggcggaaattcatgatggtggtgcggtccggcaaggcgctatccagggataaccgggcaaacagacgcatggaggggattttttccagagcatttttcattgcgccatcggtcaggttgttccaatgctgcatgcagtgaatgcgtagcatggtttccagcggataaggttgccggccatttccaaccttggggtaaaacggcttgatgacttcccccatgttttgccatggcagaatttgctccatgcgggacaagaaaattttttttttggtttggcggcgctttctgctgaattccccgttggggaaggtaagttgatgactcatgatgaaccctgttttatggctccagatgacaaacatgatttcatttcaggggcttgtttgccccttccctagtggatcccccggggtgcaggaaatctttttttttttttttttctttttttttttttttttttttttttttttttttttttttttttttttttttatcacaaaaaacaacaactattaagttaaccaaaaccagagaatcagcatcattatttgattagtccatcatcgatttacattggctatatcgtgatgaggaaaaagctttaatttaaatacattccaattcaatatccaagattgatacaatagaatgcgtgcaaacttatatgataacattggtcttgagatgcaggtgttcttccaaattggagcggataacttcataagcacaagaaagtgtatggaatgaagattcttatgatgctagaataggcttgtgaatttggcagaggtggtaagagtggtttcttgaatttggtaggaagtggtatttaaggaagaatagggtttttgaagtaaaggcttaggcttaacaaatggatttgctattggtataggcttaattacaaaaatgagaaacgactatggaataggtttagaaacttgaacaggttgaggcattttacccactgggaatgactttggtataggtttaaatattgaaataggtaaaggctttttcaccattggaaatggctttgggataggctcaaatactggaataggaatgggtttaacaagtgggactgactcaggtataggcttaattattggaataggtagaggttttttaactaatggaaatggctttggaataggcttgaatattgaggtaggaattggcttaacaattggaactggcttgggtatagacttaggaattggcttaaggggggggggcctacgtagcggactcgagggggggcccggtacccaatcgcctaaatggcgggttttatttgtttggaaatgcaattttaaatagcgcgtgggtttaaaaaccggggagttcacaaataatatttgtggttcacccccccctttttcccccttgggcgattaggaaaaagtaagtcacgattgccctttccaccaatgagggggggccgctcccgaggcgcacctttccgaacaggacggcgcctcccttggggtggggcgtgagaggtgggggcgagttgtg

SEQ ID NO: 3193 - DNA, 1319 bp, Glycine max
  unsure (1)..(1319): unsure at all n locations
  Clone ID: GLYMA-23APR03-CLUSTER15869_1
aaaacctttttttttttttttttcctttttttttttttnttntttttttttttttttttntnnntnnntnnnnntnnnntnnnnnnnttttttttttttttttttgccagcgtcgttctttggttccttaacttttgaaataacggcgcaccccactcttaatcacaacagaacgtaatcaggcacgaatttacatgtcgtttaaatactaaataatgagatgaaacattgataaaacagaataatttccaggaagtgcaattgtgcaagaatgtgaattctggagaggaaaaaattcttctctaacagcaacaatgcaacaaaatagtgatagaatagttatatggaacctttatttttgaaataacagtacaatccagttgtgatctccgcaacatgcaacatgcaacaagacaggatattacaaggggaaattacgccaagttcatatcctttttcacctacaatgtttgtggcaagttcagcaacactcacttaggtggggtagagaaatgttggaggatatcatcataagggtccctcctcccagccacttggctaatctgtgcatcccaagcaagctgagaattgtggcgttcgaaagtccaaaacccatagggtcgcatagggtagctccacatctccttcgtcttctcgcacctgtccttcactctataaacgtgctcccggaacctccgatccctttccttcggatcctccatcaacttcaataccaagttctccgcgaatagttgtaatctctgcaacatgcaacaagacaggatattacaaggggaaattacgacaaattcatccttttcaccgataatgcttgtggcaagttcagcaacactcacttaggtggggtagagaaatgttggaggagatcatcataagggtccctcctcccggccacttggctaatctgtgcatcccaagcaagctgagaattgtggcgttcgaatgtccaaaacccatagggtcgcatagggtagctccacatctccttcgtcttctcgcacctgtccttcactctataaacgtgctccctgaacctccgatccctttccttcggatcttccatcaactttaataccaagttctccgcaaattccattatgaaacccatcttctcctctcttctattccctgtttgttccgatcagcacccaatgaaaacaaactgtgctttcccttcttgcgttttcaacgtttctggatccccctttctgtcgtctttcgcagccgttattcaggtaaaagtcttaanctgcccccccgatacgtacnctatgnccntnnagtctaaactgacagaa

SEQ ID NO: 3194 - DNA, 1358 bp, Glycine max
  unsure (1)..(1358): unsure at all n locations
  Clone ID: GLYMA-23APR03-CLUSTER15870_1
ggggcggacccacccctccggggggggggggggtcttttcttctcccccccnntttccccacccccatatttttttccccccactgaaggggggggccgcggggcccgctctcagcctgttttttggggggccccccccccccggggggcctctgtgtgctccccgccggggggggggggcgggggggcccccccccccagcgggctagtttgtgccgtgggggggctccccccccccccccccccccacgtgggggccgggccggcgggggggggcctccccgccccccttttcctgttctcgcccgcgctttccgccccccttttttttttgttttgggccggcgcgaccccccccccccgcccaccttcctctccccggcctccccacgtgggcgtttccccggccgttatggggggagggcgcgaccgcccccgcggggccccccccccagagcccgggtattttcgggttttttttaataattaataatatgagtaataattaataaaagaccgaagccggtaaattgtttagtttcttctgctgctgcagaaacgcttacaagttacaagggatctctaggaaaataacacaataatcttattattattattacatagatagaatagagatctcatagttgagaaagtaggtttctacattgtaatttggcaattgatgctatttgtagctgttctggacagattgaaccttagtaccctcttcttgtgcaccatcatatgacttttcaacattctgatttgccacctcttccttggtttccttggctttttcctctgcaactctttggaactcttcagctgtggaaggtgccctctcttccatcaaacggttactacggtttccagttccattgctcgcttgcccataattcataatgttgttgaagaatggcctgctactgctagactttaccaaggaggatcttgaagtggcatggagaagagattggaaccgaccaccagccatggttcttctctctctctatatatgcagatgtttgtttgatggatagagacccgttaatataatttgggttgagactggggggggggcctacgtagctgactcgagggggggcccggtaccccgggcccccccacacccccctcctctttgcaacccccccgccccccccgttgcaccaaagtcccaaacccgcaagagccccccgatggtgccccaagcttcgcctgccccttgaacgggggttttccacgggcgggagaaaccccctttggcacccccgcccccccaacgccccggttttcccgagcccccccccccccctcatctctccccctcttcgggggccccagtaatttcaccccat

SEQ ID NO: 3195 - DNA, 777 bp, Glycine max
  Clone ID: GLYMA-23APR03-CLUSTER15894_6
agtcaacagagttattctcagttataataaccattaagagtttcctttcctgtatgctgtgagtgcaaaatactgagaaaacgagggggggaatcttcatagaaccaataccaagactgaaattggtaacaggtcctgatcaactatatgaaacaagagatatgaatctacccagaggctcaagattgttagcacaatttacatttactgatttagatgaagccagctatttcccgtcacataaaacaaacaagataatacatgggtggacataacctggtataatttgaagctccaagtcatatcttggtgcaccttattcaggatgagaagtccaatataccagtccacagatcaagacaaaaacacactgcaaaacacctgcaactccagtccaaactgaaggggcggatttatcaagtgaatcttggatcagcaggcctgctgatccagctaaagaaacaaaggatacaacatatgcaatgaagagccacagcttcagtctccactcgccttcgtcgtagggagaataatcgatgtcttcttttctaacgcaattgaacatcaaagccgcaagagatgcgaaaattccgggaaggtaatgaaggaagggaacggtgacggtactgcagacgacggcgtcaagccagatccaccatccggcgccgaagacggcgccggcgacgccggggccgaaaattgcccataactccagtaagtccatcttgttcccttctgctattatgttctgtcacactgttaagtttattatatgtc

SEQ ID NO: 3196 - DNA, 2032 bp, Glycine max
  Clone ID: GLYMA-23APR03-CLUSTER158_1
ctttagggcgaattgggtcccgggccccccctggagtcagctacgtaggcccccccccccacatacacatggaggaagcaatgaggcgtctcaacggggtagctccgattatcggacccgactcgaaaggcgacggtggactcatcgccaataacccgaaacggacctcggccgtgaacaagagggctttaagagaagacggcggcggtggtggcggcggcggagcgatgaggtaccgcggcgtgaggcgcaggccgtgggggcgttacgcggcggagataagggaccctcaatcgaaggagcggcgatggctgggaaccttcgacacggcggaggaagccgcttgcgcctacgactgcgctgctagagccatgaggggtctcaaagctcgcaccaacttcgtttacccaacttctccgcaaccttcttccgccaccaccgaacacttgttccctaacttcaacaacaacaacaactttcacaaacactcactcttcaatcaccaccgtaaccgccacataaccggttccaacacttgttttgaccaacctcactccgttgacttttcagcccctcgaaacccttcttctctcaacatgcttctctttcgtgaccttattcactctaacccttctttgctttcttcttcttccactcagaacttccacgaccagttttacaacaagagtacttctactttttcatcgttacctgtttctccttctcttgctccccctagttattcgatgaataattcttgtggaggaggctctttgtctgttaagatgaacacgtttcccacttgtggaactaattttgctgaaaaaggtgatgatggtgatggttttttctctcgtgagtcttcggattcggggttgttggaggagatagttaacaagttcttgcctagaacgaagcctagtaaatgcgagactacttttgcaaatcctcaggaggagtcgcttcttctccctccgcttgtttctgaatcaacgcttgtttccaccgggcaacaatactatgatgatgacatgaaaaaagggtttccaaagaacgggggtctaggtgttttttattctgatcaaggttttcccatgcagcaattcgacacctctaatgggtttaatagcatggctatggagaatgatcaaaacattattaataatgcagagaactgtgtcgttgaagatgtttttcagtaccaagagcttcttaatgctttcgcaatcagaatgcaaaatgcttaattagttaacatttccagtgtctgcatctcaatgctagttgtgtatgtagtcatgttgaatctgtcacttctcaatgttggtctggcctttcaattagaaacttattaatcaaaaaaaaaaaaaaaaaaaggtttaattaaccaggttattttgttcgtgcttactatgtagtattatgcccctctggcttccttccagtagtattatgtatggaactatggataatttgaaagcaatatatttttagtattggtattttgggtaacctttgaaattgtcatgtttataattgtttttggttaagcacgcctttgcccttttcactatatgttttctttatgatatatggacattcattttttaaacacctaataactattttttattttttatacgtgaaatcatattatctataacatttatgttttttttttatttctgagtgttaggtattcattaacatattgggtatttatcgataatttttgttttgtttttctactctgaaaaagggattaatgagaaccacgcactcagagtgaatttgtttttgctagatgacgatagcttttgcgttgactttggaaatagaaaattagtcttgcgttgcacaataccttttttctgctttgtatggatctatatattcttccttctgtttggagaacgtattggtctggtttcaatagtgcctggttggtgttgtccttttcttcttagtattttgttgtggtattgtgaaaaaaaaaaaaaaaaaaaaaaaaaaaagcggccgctctagagga

SEQ ID NO: 3197 - DNA, 732 bp, Glycine max
  Clone ID: GLYMA-23APR03-CLUSTER159329_1
ttttttttttttttttgacccaaaggtactatataggaatctcatctgaaaataatggataagaaattgatacactctctctctatatatatatttatatataaaattcacacatatacatcacttttggctagacaaaaagaaaaagaaatacatgtaaattcctgtgaatatgataatacaatcataggaaatttttggattaattccatttgtattctaaacaagaagcattgctgaaaaaccttcaattcccgcttttgtttacattcactgtcaggcacaacataacacactgaaacaaactctgaatcttttgccacgtcttcgtgatgcatttttgcttctgagtctttcaagcatttcttgctcagtgaatattctccccggtgagctcaagaataccgtgcgtggaactggaggagaccacaatccactttgctcgtaatcgaaatccaactctgactcatcatagaacttctctagcaacctatccgacacacactttggaacatgttggacatgaatcttctgtggagataaggtctcatggggcacgttggttttagctagcatttcactctgagatataattatgatttatgagttatgatgctaaaagaaaaatttgaatgatattgttgttgataacacgcgaatgtggtgcatgtgagatattgaaaatacagggtgggagtgatgtagcatttgaaatggagacaaatcttatga

SEQ ID NO: 3198 - DNA, 1105 bp, Glycine max
  Clone ID: GLYMA-23APR03-CLUSTER159372_1
gtttttctttgtttccagcagcaattaatgtttgccaattgtatgccattgcaaggttgtaacaaagcataagccaacattctttctagctagttgagggctttcattcttcaaaatgaaacacaagctaagtccttttccatgtcgataattaagatctcaatatactatatatcacaacacacttgcatgcgtctccacatgacgatttgctgaatcaccatattcaagccaaggtcgatgttgattgattaattactgaaacagaagaagtgtagaaggggaatcaaatggcactttcctcgacaacttagattcgtgaaatggttttagatttttttcgcaaatagagagatcaaggtttaaatctggcaatgcacatgatgactcagcctcaccactcgcagcatctgagacttcaccatggttgtaaacacgaggtgatttgcttgtctcgttcttgctattattgtctttcatgccaaagtgttttgaactatcatcagacataggtggattctgataaacggaagggattgtatggtttaatctatgattatttgggtcaatgccattgctaataagcttttttcttatatgagaattccaataattcttcacttcattatctgtacgtccaggcaatctcccagctattagtgaccaccggttgcctagcagggcatgaagcttgatgatgagatcttcttcatcttcagcaaagttgcctcttttgaggtctggacgtagatagtttatccatctcagcctacaacttttaccacaccgatgtaaacctgcagcctgggggagtgtacgccaacaaacttcaccatgtttcttgatataatctacgagtttctggtcttcttgtttggaccaagctcctttgttcaattctttgatatcacaactaggcttcctcattctttctacctttgcttggatttcctttcaaacctcaaagggtataaaccccagctacaaaaacggaagaacctaggtggggatgatatatataataagcaagtgttagagaaagagtaaaaagaaataaagaaaaaaaaagagcgatatggaggaggacacacgagaagaatgggag

SEQ ID NO: 3199 - DNA, 2093 bp, Glycine max
  Clone ID: GLYMA-23APR03-CLUSTER15993_1
tttttttttttttttttctttttttttttcaatgaaaaatgctttttgccataaaaaaaaatatcatcaaaattgtttacatgtgtggcaatatacgtatgtacatgacactcataagtatgtttatgtttcacatgtgtacacacaacgggagtagttcatgaaacacataagtgatcagaaaacgaaatggcaccaactgtaatcaaataataagaatcgtactttttaagttatataactttcttcagtttacttgtttgaaatggctaacaaatagaccctaaacagataacataatgtaacagctccctggtcatttaaagcattatctgccttaagtatggtttttcttgtatcgctcgcaaagcttctaaaatgaagcatctctattcaaatacaagacattgatgtctgcagtaaactccactctttagcattgataagttattacacaaaatgtgcagcaagcgtctcaaattgctgaatctaagaggacaaattcagctatcagaatcagagagcacttcagtttcagttacgagacattttacaatgttatatgcatccttacattcaacaacaatatccaaccctttattaatacattgcttagttgtgttattgatcccaagctgcttaatgagtcagtggttttgaaatgtctctaataaatgcatcaaggttcccatatgaggatccccctgcggcaatcgctctgagacacataaccttgatttctcttgccctgtctctgatctcctttccctcttggctttgaagatccataaacctcttaactagttcttctatcttttcttttgccacaataacttcactgtccaactttgatgtctctaccttagacccattcttccactcatccacaatttggctgctatttggaacttgatccaagaaaagagggaatgtcagcattggcaccccagcaaagagagcttcaagagtggaattccatccacaatggctccaaaatccaccaacggaagaatgagacaacaccttcaattggtcacaccatggcaccaccatgcccttatctccacacttttctttcaaaaaagaagcattggctcgagccacccaaagataacgaacttcactactgtttagtgcttcaacaatttgatccatttgggtagtagacactgaaaggaaactaccgaaagaaatgtacaatactgattcaggtggctgagaatctagccattttatatagtcatgactatgatcattgttcaaagggttttgtcctagttctaaataaggtatagcagggccaataggatagactggaaagggaaatatagcttttaaggactcaattgtttcagcttctaactcttggactgtggtgagtaaaagataatttgctctgggaactttcgaaatacattccaaagcaagctgcatgactcgttgatcattttcatgaagcacagttcgaaggtctgccaaatgagctgaagaaattcccgggatgttctcggcttgtccatccatcgtatccttatcgacggtcaaaccccggtgtcgtgcaaagacatcaaggtgatgcagcatggaataaaacgacgccgacatggtccaaaacgcagccaccggaatattcctccgattggctacggcgatgggccagcggagctcgacgcagccaaggatcgctgtcggcggtggctggagccgatcgaggagccgctcgaacggcgcctgcatctctgtcacgacggcttcatagaacgcgggaaagttagcggctttgaggcgctcgggagggaccacgttggggatggcggcgaggcggacggcgtccggcttgggctcggcgccgatgaagccaagccactcctcggtgaccacgaaggttatgagaatctcgttgggtctcttcgatgcaaggatcttgcacaggttcatcatcgggttgatgtggcctctccccggaaacggcatcgccaccacgtggcacacgccgtcgcttccgccgccgccggggttatgcatagccggagaagtgagtaagtgagagtggggggtttgtcttttcaattgtgtatctactcgcatcttag

SEQ ID NO: 3200 - DNA, 964 bp, Glycine max
  Clone ID: GLYMA-23APR03-CLUSTER1602_2
gatttcacaagcaaaaaaatcagagaacatagaagaaaaaagagggctaaaaaaagagagtttgagaaatggggaggggtaagattgagatcaagaggatcgagaactcaagcaacaggcaagttacctactcaaagagaaagaatgggatccttaagaaagctaaggaaatcactgttctatgtgatgctcaagtttctcttatcatctttgctgcatctggaaagatgcatgactacatcagcccttctaccacgttgatagacatattggagaggtaccagaagacctcagggaagaggatttgggacgccaagcatgagaacctaaacggcgaaattgagagactcaagaaagagaatgacagcatgcaaattgagctcaggcacttgaagggagaggatattaactctcttaactacaaggagctgatggccttggaggatgccttagaaactggtctagtcagtgtccgagagaaacagatggatgtctacaggatgttcaggagaaacgacaagatcttggaggaggagaacagggaacttacttttctctggcaacaacgtttggcagtggaaggtgcgagagaagtggacaacgggtttgatcagagcgtaagggattacaattcccatatgccatttgcctttcgtgtgcagcctatgcagccaaatcttcaagaaaggatctaagtaataaagctcttgtattcaaaaactccatcttggtgttttcagaaacctatgtgtcacaactctttaagtatgctggtatctgcaaaagttgtaagtaataaatttataagcaactgaacttggctttgtgaagttacaacatatctgtgtgtctcatatatacctttgttgggtgatatgacatcttattgtgtgtcttgtagctatatatgcacgcaaattactctgattcagctacttatctatatcgaaggtttttcaattat

SEQ ID NO: 3201 - DNA, 1339 bp, Glycine max
  Clone ID: GLYMA-23APR03-CLUSTER16085_1
gagaagcgcttctcgtgccggcttctcgtgccgtttttaattttctatgaacaaaaatataacagagtactaattaagtatttatcagtcatttttagaatacaaaaccaagcatgtgactggtgagagtatctacatgtgggttgcaagatagcccacatagtataatcaattcacaacaattggcacagcggaaattcatccacataacaaaccagaagggtagcataagttactaacagtctagactcgtaatatatcagattttgacatcgggagattcaacataggagattgaaatcaattcagacctaaacttgtcatcccaatcaccgtttggtcttgcaaagctgtctgcgtccttgctttcgggcacaaaatcggaatccagagttttatctggtaaagaatcagagatagcaataagcaactcacgtgccagctcctcagatgccttattgctcggtgatttgttatccatataactttctgctatttcctttttttcagcacttgagagaagaacgtgtcttcgcccttcacctttttcctaaaccccaaatacctctttcctttttcttttttcgtacccgattactcttactatcatcattcttcccttttcttttcatgtcagtaataaggggattgaaattattgcgtgcatttcatgtacgtgtgcattgctggagcataccagttttggatatctctcactctcacacacacagcaaccatatcgtaaataactactaaaatgaattcatatactaaaggaaaatcattaaaaattagcaaactaatcagtaatttaaccgaaacactaaaaaaatggactagcagcattgaatggcatatgggcacttccatatcaccctttttttttaatatttgaagagccacagaaaaattattacagcagcagcaacatgttgtaaatccagtgttcagaaaatattttcagggccattccactagtacgatcaaccccaacacattgaacagtcatgtaacaacgatatatgcagcaaaaataaaactacaaataagggcaattaggtcagccacagtaacaccaataacgaagcaaataatggtgagaaagtataaaggaaacaagaaacgagagttggtaaggctaagatagcaacaaatgacgatgatgctgtctaattgaatagtttagacatccataaaactggtgacattattaaggtggtgaagatgggttctacattccatggtgtattttgagtagtttgacagactaacgattagcatggatgtaacctaggtttagttaaagtttggtagacaggtgttgaagatatacaataga

SEQ ID NO: 3202 - DNA, 1305 bp, Glycine max
  unsure (1)..(1305): unsure at all n locations
  Clone ID: GLYMA-23APR03-CLUSTER16091_1
ttttttttttttttttgataataacaataataataattaaagaaagggttaataaaaggtacaacaaccccatcaactattcttctaccttgtctttgtttctattttttgtaggcagccaanacacctatttcattttgaattggctgagtcacctatgactgcaaaagtccaaaagcctcttcctcccttccacaatctcgtcaaagaaatcatcaagctgagcaacaatgttgtctgccccagatctgagaaccccaaaacacgttctgagattctccactctctctctaatagcaacctcactctcccactccactcccccctgaccctcttctctctaactcccctctcagctcctccatggccaccttcgacctccgaaactcgtgcanaagcatccccggcgagccgcccatgtgcccgatctccgccgccacccgctgctgcaacctggccgtcgacatcatgaacgccgatcccaggaacaggcacccctcgtacccgcaaccgcccaacacgaagtccgaggagtccccatagcagtacacgagtccgtacagaagtaccatgagcagcaacgaactcacgttcctcattgcgtacagcacccctctgaagccgttgaagccgttcagcttggactcgatggacagcctctcttggaaccgaagcgacaaggcctcaatccgcgcctccatcagcgccctgttctcctcctccagccccaccgcctcccgacggcacccggcaatggcccttattacctggcgagagacttggggggtgatgtggcgatgggagtcgagggaggaggtgatgttgagggcggcagagtagtagctatccatggccgaaatgccggacttgatgaggtggcaggcgtcccagagtttggagctttcgtccatgtactcgtccagccacttgtcgcccactgggagctggagtttctggaccaggagggtcaattgggtgtggaacgatcttagaacagagaccactctttggaggaattggattgacatgaagtttgtgctcaggaacactctctctagatcgtcgattcccagcgtcaggaacgagtagaagccgttcacggacgagggatccatttatttactagtcgtggtggaggggagaggagagtgatatttaaattgagagagagaagaagaggacccaaaaagtgaaaagaatggaagaatggaatatcttggaagctcaggtttctaaggttgaaaaggattgttgggagaaatgatgggttttcctctagaggggtaacacatccccggcccggcc

SEQ ID NO: 3203 - DNA, 1315 bp, Glycine max
  Clone ID: GLYMA-23APR03-CLUSTER1613_6
atccatatcatacccttcactttcctggaaaaaaattggaacctgcctctcttaaagtttgtatttttttgagtgggtgggttgattgagagtactgtgcaagctttggaactttgtcccaacctgctacttcaatggctactgaagaggttaacaaacctcaatcacttcctccataccctgaggtaattcacatcataattcagattccctttttttaatttttttttctccaaaattaaatattgggaactatttacctagtaaagttggtagattttacactgatctaattgatctgtacattttcactgacttgggtttcttgtttaggtcacccaatttaaaattttatcacttttggtaacaaaagtaggaaaaattaggggttttcagcaattgaagcaaacagtaaaaaaggatgtcccccagttttggtctctaatgagtttgaccccaattcatgaacatgagctatgatatttactacagagcagctctgttgctgaaaaagacttggtttttggtgacacttagtaatatgttaactctgggtgatgctgttgttgtagatgatagtgaaagcacttgaagcactgaatgagccaaatggatcgaacaagtcagcaatatcaaagtacatagaaaccacctacggtgagttgccagacgcaaccgttttggggagtcaccttaacaagatgaaagacagtggagagctttctttcaaacagaacaattacatgaaagctgacccaaatgccccaccaaagaggggccgtggaaggccaccaaagccaaaggctccattgccaccaggcactgttgtgtcccctccaaggccaaggggtcgtcccccaaaagaccctaatgcccctcctaagtctcccaaggctaaggccacccctggaagtggcaggccaagaggaaggcctaagaaggttcctcggtctccggccgtcgccgctccgaccgccgtctccagtggcaggcctcgaggtaggcctcccaaggtgaagcctcagttgacagaagtcagtgttgagtcatagaatggcttctttctttctaattgatgtcaaaactcttgtagaagtgatgatgggtgtggtcttagatattgtgttaatgtaattcctttgtaaaattaagtagtggtagcttgcttattatggggctttgtgttggttattcttgctaattactactaccaaagagaacagtgacttgagctaatggtgatttggtttcttgtggtttgttccttagttctaacttataaatccataatgtagaaggaaaaaaaaaaaaaaaa

SEQ ID NO: 3204 - DNA, 1048 bp, Glycine max
  unsure (1)..(1048): unsure at all n locations
  Clone ID: GLYMA-23APR03-CLUSTER16208_1
ccctccccccttctggtcgcgcctcggtggggtggggcgggccccgcgggcctttccgcttattcgcctgctggcgacatggggaggttctcgcgtgacattttttttgtttttccttttcttttttcttttctttttttttattattttggttttttttttctttttttttagtaacattatttcttattagtaccaacgaatacaaccagcattacagcatgcttaacttcattccaaacaagaaaagagcagagaggctctgcatacgaatagcagatgaagtacacacagataactacttattcacgagtaccaaaaagtcaaggagacctagtaactacaatttgtcaaaaggtgcaatcatgcataatgcatgatagaaaagagcagagaagcactgcatacgaatagcagataaagtacacacagagaactacttacttattcacggatacaaaaaaacagtagactagtacttctatttgtcaaaagcataacgggcttggaaactgcacaaccttaactagtgcaatcatgcaaaaaatgcatgatgcctcatcatgattgagagcactcacggattaactggaactggaactggaactccaccaccactcccagggtttggaacctcaaaaccagggtttgggacaaacgtgtcatcaccacctggaacgtaaccacgaccagctggtcctgaccctagtccactaccaccagtgtttgggttttgaggtgtaaacccaaagaaaggtggcaaccctactcccccaaagccaggaaaatggaaattaccttcaggagggaacaaaaactgaggctctttcttgtccccattgtttgagtgttttggaccaatgtggcgtctagcaactgcttgccatgtagtggcaagaaggatagtggtgatgagaagaagtgcaaggaaagaagaaggtctacaagccattatatgatgagattttaaatgagattgttttgtgggggggggggggcctacgtagctgactcgaggaagggcccggtacccaatngnntnaaancc

SEQ ID NO: 3205 - DNA, 616 bp, Glycine max
  Clone ID: GLYMA-23APR03-CLUSTER16208_2
aacattatttcttattagtaccaacgaatacaaccagcattacagcatgcttaacttcattccaaacaagaaaagagcagagaggctctgcatacgaatagcagatgaagtacacacagagaactacttattcacgagtaccaaaaacaggagactagtactacaatttgtcaaaaggtgcaatcatgcataatgcatgatagcctcataactgggaggactcacggattaactggaactccaccaccactgccagggtttggaaactcaaaaccagggtttgggacaaaggtgtcatcaccacctggaacataaccacgacctagtggtcctgaccctagtccactaccaccagtgtttgggctttgaggtgtaaacccaaagaaaggtggcagccctactcccccaaagccaggaaaatggaaattaccttccggagggaacaaaaattgaggctctttcttgtcccctttgtttgagtgttttggaataatgtggcgtctagcgaccgcttgccatgtagtggcaagaaggatagtggcgatgagaagaagtgcaaggaaagaagaaggtttgcaagccattgtgtgatgagaatttgaatgagatgtgtttt

SEQ ID NO: 3206 - DNA, 1771 bp, Glycine max
  Clone ID: GLYMA-23APR03-CLUSTER162135_1
ttttttttttttttttttaaggattttgtctcatcgaagttccatttaaacacagaggaaaacgtacacagtacattaaggaaatgcaggcctaaaacgacaattcaaggaaatccaaatgagacattgtagataacaaaaaacttcatacagaggaattagaaccagtaaacaaaacatgcatctcccaaagggtacggacaaaacagaatcactagatgcctgcatatacgatggaaccaattttcgtgacatgaaaaaaactaatgctcacaattttcatttattcatcccatttaaactttaaaaggattcatgtcctccaacaaaaagggtactaaaagcttccatctcacgttgacataacatcaaaccaatctcaattcctccactgttatccctactttcactaagagaaaacgctcccgttccatctatggaagtcatgtccactttctttggccttccccaaccaaaatcagtgccataaacctcaaacaatggcgatccagcaatactgaataatcgaggcacactctcccctctttcaagcattaacgaaacccaagtttctgctccactcagcactccctcacccttcactatattcaaagcctcgcttatcccttccaaagcactgataaaaccatcgcttattccaaccaagttctttgtcacagccacaaccttttgccccgcgacgcagttcccaaaatacgttgcaggaatcggaggattcaagcgggatctacagtccacagaaaatacgaaacccacatcatcttcctctggttgttttgctttgaccaagcaagtcaacacataagcacacgtaacagcaaacgtcgaaaacgaaaagtccttcgttttcataagcttagactttgcatgttgctttagcttctgaatttgtgaaggtgttaactcaaatacacctttgcatccatcactcggtatttcggtgaaggattcccacaccttgaggcttcgattgtttggtccgctactctcctgccacgcgtccacgtaggcttcagcaattccagaagggtctcttatcactgatctgtcaaagaacggtgtgagatgctgaggtaataaaaataacggtgtgttgttgttttgaattaggttggagcatgtataagcccatgatttgatgaacatggttgaagattttccgtcgaaagctgcatggtgtgtggttattccaatgcaaaaaccagcgtttgggaacactgttacttgaagtgccaacacagacgctttgtcatgggaagcggtcaagtggggtatcaaacggtgtcgttgcgatgcttcacacagacgagaagtgaggttgttgaagttttggttggattcggcgacagtgaatgaaacggcgtcgccaggggtgtagttgatgatgggtttgggagagtgagagggccatgtgagggtgccagcgaaagggaggaagtgatggaaagtgagggagagagagtgttggagagtggggagaagggagtgaagaaatgaagaggtggggtgtgggaaggagtagaagaagagacgctcaacaggtgggaagcgtagccacaagaggtcgaagaaggttagtgtgagagagtttggaacaacgacggtggaaagggatggttcttgaagcggtgccactgaacaaacttgaattactttcaaagctgttgctgctgctgctggttgcgtcgtcatggcttagacataggaagggttgctagtgggggggggggggcctacgtagctgactcga

SEQ ID NO: 3207 - DNA, 1410 bp, Glycine max
  unsure (1)..(1410): unsure at all n locations
  Clone ID: GLYMA-23APR03-CLUSTER162266_1
gatgctnntcagcaaatnaaaaatataaggaatacttcctcgcgcgctccccttttttttttttttttggacaggaaacatgcccattggcatggctactcttttattctacacaaattctctcatggtcatgaccacgacaacaacaaagcacactttatatgtttctttagtaccaaaataaagaagcacacacttaatagtgctagtcttggtaccatgttaatgcttcctttgtgatttgatgcctttaatagaagtcatcaagtgacaaattctcaacagagccaaaggtttcaactggtccaatccttgaaaaattggtcattgatccacccaaaaaatcaagaggggagtcatttgagaaggtagtctcatatatgaatgacatgcctgtatcattcactgcaggataggttacattgaagcaaccaggtttgttcacttcataatcattaaggaagatatcattgatggtatcactagtttcttccataaattcatcctgatcagaagcctttttcgcctgaataacataattgttgttttcactatcttggtaaaccaaaatggaatctccaaagcgaaggccatgtgtgttgacaaagtctccagtattttcaagtacatacatccgactgttattgttaggccaaaacctgtacttgaaactccatacatgaagaccatctatatcatccatgctgattacaattccttctttggattcaagagctggaaggaaagcctctgctgctttctttggcaatatcattctcctaagggagctaacatcactgttctttaactccttctggaaaaggaatctcaaccttctttgatcgatttcacgtgcgggcgggagagttgaggaggagagtggcacgtgcgaggaggaagcaatacttggagaaggaagagaagaaccagacttgttgttgttgttgttgatgagagggttcatcaacaaagtggggttagtggatcttctttgtctggccatccttttcttcctgtgaacagttccgaaggtggtggtgacagcagccacgagaccaaggtggtggtggtggttttcatggatccgacccgaccggtgagattgagaatgagaaacgttgttgttgttgttgttaacgttgttggtgttgttgttgttccctggaacggtgacaagggaaagctccggaacaacacctgccacgaaagcacaggcctcggttttgtgaagtagcttctctcgctgtcgcggatccatcatcattagcttagggtttttttttttgacacacaaacacacacacacagtgtttttttggttttctgtgactgtagtagttggttctctttctctcagtctcagtgtgtgtgcagcaggcagagaaaaaaatagatagaacgacgctcggc

SEQ ID NO: 3208 - DNA, 1641 bp, Glycine max
  Clone ID: GLYMA-23APR03-CLUSTER16266_1
cttttttttttttttttttgaccattttcttcaactattctttcaatgactgtatttcagtgagtgcatgcatttaaaaaaacggatcaaggccagaaacaaagacccctccccccctttctttccctcccaacagccagaaaataaaagggataaagaactacagtagacaggataggagaaactgatatatttcttaaaaatgaagtagaacaaggcaagggaagttcacatcaacattttgcttcaaccactgcttcccatacaagacacttgaatcatggttacagctgactgagttttgtcgtttccattgccacttccattaattgctgtaactaccaagatgctttgactaccatctgaaaaatgggtgtctattcatgtttcaataagggttaatacctgagtcgcattccaaggtcaaataattgaaatatccttgtatgttttcaactccaatgatccaaatcatcattttatccaaacctcaccattgttcaaatccatgtccttattaatgacctatgaaaaaagctcactatgttattatggatgcagcgcctctgaagcgcttcctgaatttaagaaagctccagatactgcccatgcatatgttgataacattgactgcatcctggttaagcctttttaatcctcctttctcttgaagtgcatcagccattttgctctcgccttgattagcagtctgagcagcaagtacacatataattgcttcatgtgaaccaacctcacccatgagaaaactgacaagtgcaagaactatggatgctaaaattcctgccaatgttccttcaacactaacagccccttctgtgcctcttgggactatcttgaaagttgtaactaggtacagttgtttttccatatgccttcccgatctcacttgagacagtgtcactcaacttggtacagaaactggcaacaaacccaagtctccatagccgagaaaatgcctctcccccaacaccaaaaattgtgaggaaagcacaaatgcaaccagcagcactggatccaataacactgcccggaccccttcttcctctttttttctcagcaaccccctgagccactttctgtgccattttgacctttgtagcagcagtaccaataacaaagtacgtggcaacaaggaagaacccagaaggcccaaaagcgcgccaagtgagcgttccgagcagaaacgcagcaccgatcccggaaagagacaacccgctgaccaaaatcggagaccccaagaaaaagatcagcgcgttgctgagaagcgcggactgccacgtagcgggggacgattggacgagggccagtgcccctccaacggcatcttggatgcgcgaggcgtgcatggtgcgagggaagagagggcgagggttgaaagaagtgggttttggagagagagaggaaaggggaaatgggtggaaagaagagggagaagaaagggaagggagtgagaaagtgtgaagagttgaaaaagccataaatttgaaggcggaggggtggcgtgaatgcgaaggggaagggagactggaaagtgggagagggttactccatgatgttgcggattccatgggatgggtaagtgttgctcagtgtcaccttcactgcaacacctaaaatcac

SEQ ID NO: 3209 - DNA, 1251 bp, Glycine max
  Clone ID: GLYMA-23APR03-CLUSTER16306_1
ttttttttttttttttttccaatgaaacaggttgtgctttctctattttttgaggattgttctccatacttgcaacagccggaaagaggtgctcctttaagcttaaagataaactagtatttcctgaaactaaaggagtctcttgtttacaaatatcttggacattttgtttggttacatcagctccaatgctaagagcaagaccttcctttgcagccaataagagttcaggattccccttgatagtttgggattccaattttttattgctaccttcactgagtatcaccttctctttgctatccatgacatttaaagtacatgattgagttccgacatttgattgctcaagtttgggtgtaaggaagcaggagttgctttgcaccatgttagcattggtaacatcaatacttgctttcttatcttcaaacgcagagattccattagcatcagatagaccagaagaactgggagaaagagttgaacccggtgatgtgcttgaatgttcctttcgcaaggcatcactttcttctgaacgtgaagcctcttccaaagaaggcggaagacacgggaaccttcttttcttgattggtgcacctgcagcatttggtaaagctgatccttgagaagtgattgaattttctttacgctgtaactcggtttcttcagtgagagaacatggttccccagacacaggagaagaagaaggctgaaacgtagggaacctccttttcttgataggcacacctgcaattaaaccactaaattgcccagcataggactttaccccggtctgtcaatagaagatcaagtaatcaatatccaaaaaagaacaaattggcatggttctctaatcgtagttagctgtaaatcagaaaggaaataaacacctcttcatgtcctgaaacaggcatgattccaaagtagtcagtctgctaaaaagctcacaagtcaaaacccttctttttaaacttcagttattacgattcaatagcaaatcctcaacaaaatatattgaagtaggctaaaaaaatctggcactgaattaaccatcggtaggcatttatatcttctaaaacgcttctcctttccaagtaaaacaatcctagccttgctctcacttccaagatacagacaaacaagtagcgtggacctgcaaaacacaacacattataaactcccttaaaacagattattggttgacaatcaaagtcaaaaacaaattaaacaaacatgccgcgagcaaatttt

SEQ ID NO: 3210 - DNA, 966 bp, Glycine max
  Clone ID: GLYMA-23APR03-CLUSTER16330_6
acaatttcttgcgtattaccctttcaaaacatgacaggttctaaggattgaaataaaactgcataatcttaattcttaggtggtaataagccacattgaaacaaaaaatctagttgacgacacaacaaaagcaaataaatacactgtagatactaagtatgacagatcatgaatcataaaaaatgtcccccaagatgaagatcgatgtcaatttttaagtgggttcattctctccctcagatagtagagtttggcccttctcactctcttcttgtcaagcacctttatctcctttatgttaggtgaatacagagggaatagagattcaatcccaaccccagcgacctgcctcctaattctgaatgtagtattgagtccagcattacgtcttgcaataacaatgccttttataatagagacacgcctcttattttcaggtacttccactttgagttgcacaatataaccgggctttatgtcaggtatctctctttgccctctcacctcctctactgcctccttgtctaaaatctgcataatgtgcctggcagttttgtctaaatctcttaaatttgatacgaggaggaacttcaggctccagccatcgaactatcttgagaagaagaatcaacagaagttgcctctgttgacataaacctgctagcaaaaggcggtacaagccccccagctggctggtacaagcccattccagagcttctcagcactgatgctaaaccattaccggactcaaattgtgagaatacctcagtcccaggtaattttgtaatggcgatcggagaaacgcgagtggaaaagtttgggacagagaatagccggaaaggggtcggagcttgaaattccggcagagatggacggaggaatggtcggagcagagatgatgagagcctgcgagaagccataaccgaggacgcagcgaaagagagcgagagagaaggggaatagccc

SEQ ID NO: 3211 - DNA, 1905 bp, Glycine max
  Clone ID: GLYMA-23APR03-CLUSTER1641_20
cttggatcttagcgaaagaacagcatcaccttaatattatcatcatattcttaataaaataaaataaattgtttgactatagttgcgtaattcaataaatttgggtccacaattggttgattgatgacttcgttcttttgagtctaaaacagggaaacatccttgttttcaacgctttggcttcctgtcattgaagaaataaaagtgaagttctaattggtgttattgagcagatagcatggagccacagtgtagaatcaagaaggatgccactgaattgatagggaataccccaatggtatatctgaacaacattgtggatgggtgtgtagcccgtattgctgctaaattggagtacatgcaagcgtgctgtagtgtcaaagataggattgctttgagcatgattgaagatgctgagaaaaaaggccttattacacctggaaagactgttctggttgagtatacaagtggtaacaccggcataggattggcattcatagcagcattgaggggttataaacttcaggtgactatgccgtcttacgtgagtcttgagagaaaaattatactgcgagcctttggagctgaggtatatcttacagaccctgccaaaggaattgatggggttattcagaaggcagaagaactaatagccaagacgcctgatagttttatgctcaaccaatttgaaaatcctgcaaatccaaatattcattacgagacaacgggccctgagatttggagggactcgggagagaaaattgatgctttggtttcaggaataggaactggggggtcaatagcaggagctggaagattcctcagggagaaaaacccggatattaagctgtatggtgtggagccagctgaaagtccagttttgaatggaggacagccaggtaagcacctgattcaaggaattggtgctggtatcattcccaaagttctggatgtaaatctcctagatgaagttattcaggtttcaagtgaagaggctatagaaactgctaagctgcttgccttgaaagaaggtttgcttgatgggaatttcatcaggagctgctgcagcagcggcaataaaggtggggaagagaccagaaaatgcaggaaagctcattgttgtgattttccccagttttggagaacgttacttatcttcaccactgtttgaatccattaggaaagaagctgaacaaatgacatttgactaaggtgcataaatagcttaggctagtactcactgagtacccgttaagcaagcactactgtcggtatagtgtggtctaaaataagttgaataacatctggattgacacttcaagcttcaatttcttgcttatgaaaataacccaacattacttatatgggatttcaaaagttgttttgcactcatccatatagaatcaaaaccaaaagtgtttaattttatgtgttcataatgtaaaaaagtttgtactatcaaccaatcagaaacttatcacacatgacagtttttgattgaatgactgtataaaatttcattagactgtcaaaaaaaaagctatcttcattatatcaaaactgttacacggtggcattcttgtctaccattacaataagaaaatacggaaacttgataagttatcttgcagcttgatcttagatgcaagaacgtattttgttaaggttctctatcggagggagggacttctagtatgacaaggttggtgctatagaagaatactccaagatgaatggggggatcccacgaaaatgactcattttaatgtctcatcacataaaccggatcgcacataatataaacctgatcctacaaggtgggattagtaagattattacttatatgtattattgtaattttaaattatttggatcaataaatattttaattattaaaaaatttaa

SEQ ID NO: 3212 - DNA, 968 bp, Glycine max
  Clone ID: GLYMA-23APR03-CLUSTER16448_1
tctcgctgctcccagcacgccccgctctccaccgacccgacgcttcctcggcgcgcccctctctgccccctcactttcttatgtctttccccctctccctgtggttgtgccctttataaattccatggctcccgtgcccacacccatgcttgttgttttctattcattttcttgtacacttttattccacttttgtaggataattcaagttgacgaagctactaaggatcctatgatatccatggccattattataagcaccacgatcagggggttgtcaaaagagatttccattagcgagactcatggcctagtaagctcatgaccttgccatattttgtttctctacaaacatcaacacaacttgcttttgaaaataatatacgcaaaagaaaattctacaattaacaccaaggaacatgaatgtattcttccactctgatacaaattacaataattattagataggcttatttcttcctgagatcaattccagccttctttgcaactgcatcaagtccattcttctctatcgtcttcaatgccttagttgacaaacgaagctttacgtagcgcttccctgcttcccaccaaattctcttgtactgaaggttcacaaactgcagtttctttgtcttgtggtttgaaaatgatactttgttggccctgtttgatttctttccagtgaagggacacactctcttggcaacgatagggaggggtgtggggaagggagaagcagtgaggggtgtgggtggcaatttggggaagcagattctgaggccgttcagacgagagctcaagaacccaagatccgagggtttactcacaccgaagctgtttctaaatgataccgcacaacttgcactcgccgttgccatagctatgattatcaatgccttccttatctcttcccttctgtcgtcttctcgcagccgaatagacgcgtggacccgcaacccaattgg

SEQ ID NO: 3213 - DNA, 1537 bp, Glycine max
  unsure (1)..(1537): unsure at all n locations
  Clone ID: GLYMA-23APR03-CLUSTER16465_1
nnttttttttttttttttttatgttagcatttttgtttacgtattaatttggccataacactggctaatctttaagattacaattttaaaatgaaaatattccaggtccgaaaaaaaggaacaaaacagacaaaaagatatgagaccataagtattcatctcgtgagtctccactcaacatgatttttagttaggaaaatgtttaagatactaataatcctaaattatgttataataaacataacaattactaaaattctgcataagttgccacgttctttttttttttcaaaatcaacgagaaggacaacacgcatctttctcttgatcacaaattgcgattttcaggttgctagctccaagggcaaagcatattccaagttgcattgaccaatatttcataatgaattagccaaatcatcctatggtcctatcttagcccagagaagcaactagatccagtgcagctgccaaccttgttgacatgtaaattagattgattgactgctagacagggtcctgtatatcttcctaatagtatccggagtcgttctgcaacagccacctacaagggaagctcctaactcacaccatttatttacatatgagataaaatcttcatctgtaacaccagtattttgcacccactcctttaggtcagcatcgtaagtttccccactgtttggatatataacaattggttttgtagtcaccttcttaagcaaaacaatcagaccatgaataaatcttggtggagtacagttgattccaacagcgacaactttattacatgattcagcaatagagccacattccattaaagaatcaccgctaacaacattaactccatccttagagttaaaagaaaaccatgcaggaatttttatgtcctcttcttccagaagctgagcataagcctcagcttcaagcttattgggaactgtttcaaatgcaagcaggtcagcacctgaatctgctaaaatttgaactcttctccgatgaaaatctttaagagtttccaccgtgatagcatcaccataatccccactgtactctgacccgtcggccaaataagccccatagctccctactgatgcagcaaccaagataggccgttgtttgaggattctaccatcatcatccccatcacccgaacgacatccagcacaatttttatagtaaacttcgcgtgcctcccgtgcaatttcaacactgcttctgagcaaggcttcactctcttcatcagaatagcctttggctttaaacccttgaatggtggcttggtaagatgctgtgattataatgtctgcaccattttccaggtaatcaaggtgcacttggcgaatgaggtgagggaaggaaaagaggcacttggcgctccaaagaggatcattgaggtcggcgccatggcgctccagctccgtcgccagaccgccgtcgatgacggcggtgccgccggtttgacggagcaaatctgttatcaacgacgacatttttacgccagaaagaggggggggggcctacgtagctgactcga

SEQ ID NO: 3214 - DNA, 1644 bp, Glycine max
  Clone ID: GLYMA-23APR03-CLUSTER1650_3
aaagaagtagatcaaaagtttccatttatatcataattatatacataatttcctccatctttctcgatcgcgaaaaagtgcagaccaagtaaattaatttgctagttatgatgtatgtatatttgtttgatacacacacctgcatgatttgattaattaatttgtttatatgcatatataattattgaaggagatggtggtgaaaccaatagaagatatagtggtgacaaatacatgtccaaaggctgtggaaagtaagccaaggccacagaaggaacaagcaattaactgtccaaggtgtcattcaattaacaccaagttctgctactacaacaactacagcctcacacagcctaggtatttctgcaagacttgtagaaggtattggactgaaggtggaactctcagaaacatccctgtaggaggtggctctaggaagaacaagagatcttcagcttcttgttccacacctaataatagtcacaataacaataattcaaccaataagaagcttctttctgatctggtcatcacacctccaactctgtcacacactcaaaaccctaatagcaataatactattcatcaaggccaagatctcaatttggcttttccatcctccaccccagatttcagaaaaatctctgaattggtccaacaaaacaacaacaacaacaatagtagcaacaacagcatgtcagcttcagcttcttcttcttcaaccacaactacaacttccacttctcacctttctgcattggagcttcttactgggatcacttcaagttccagtgctggtttgacttctttcatgcctgtgccggttccatctgatccaaattctatctacacatgtgggtttcctctgcaagatttcaagccaaccttgaatttctctttggatgggatcggaaacgggtacacaagccttcagaatgttcaaagtgggaggctcttgtttccatctgatgacttaagacaggtttctagctccaccatcaccacaatggatcagaaacaacaaggagattcaactgggtattggactggaatgttaggcggaggatcatggtaattaatcatcaagagagtcataaagatatatatttatttacttaatttcttctcttgctttctactaagttaattttccttttgaacttttttcttttgggttttaatgagtttccgtcagatcatgtggggacttcacttgtttggatttcttcataactggctaacagctgataggatcgattcatacatgagtttcttttcctcttctgtcaattccttatatgtatatctggctccgcttatatctcttcatgaccaagtttattttgggatcttgaaatgaagcttattttaggcaggcttcagtagtacttggaaaattaaaacaagggttacattacatttgattatatgtaatgatagaagagatcaagattaactccatttttttagggttaacaagtagctagaaaggggggccgggtaaattaagtgttattgctgttatagtatttcatgtaatttcttctatcactgaagaagggcaacatcatcaattgatttgattgtctagcttaccgggattcgaaaatgtataatgtacaagaatatattattattattatt

SEQ ID NO: 3215 - DNA, 1210 bp, Glycine max
  Clone ID: GLYMA-23APR03-CLUSTER1650_4
gacaaggtgaattctctctctctctctctctctcaaatcatcctctgcttttctctttcttttctttgaattttcatggctgtagctactgcagtggccaaaggacaatattggacttataattgtgagagtagtcatggaggggatggctcccaattcatgtgcaaggccagttgtagagaagaaagcaaggccacaagagcaactgaattgtccaaggtgcaattcaaccaatacaaagttctgctactacaacaactacagcctcacacagccaagatacttctgcaagacttgtagaaggtattggacagaaggagggtctctgagaaacgttccagttggaggtggttcaagaaagaacaagaaggtctctgtgacagcttcatcatcaccaaaggttccagacctaaacccaccaaaccactcagctatctcatcacacaaccctaaaataatgcatggtggccaagatctcaatcttgctttcccagccatggaaaagtaccatcatcatggcatgtcaccttataacgttgagatgcaaaacagtaacaccaccactactcatcatcatcaccaaacctctccttcttgttctgctcctccagctaattctctttcagctcttgagctacttaggtccagcatggcatctaggggtttgaacccttatgctcctaattcttccttgatgccaaactcaacaaacaacaacaacaatgccctttacccatcagggtttcccatgcaagaagttaaacctagtcttaacttttcttcagttgatgggatcggaaataatagatcatatgatcaagagaggggtggtggcagagttttgttcccttttggagacgtcaaacagctttctgctgctgcaggtgctgctgatcaagtggaacaacaacaacaaggaaattcaactggttattggactggaatgattggtgaaggaacatggtaagaaagaaaaaaaaaagggaggacaaaggaaaattaagagaacatgcattaataacattatatttatatatcttttttttttattttggtcttccctttttttttctctttccacaatatggatatcatttggcagctgaagttgttcaggaactaacaataggacacacatggttaattatttctttgttttgtacacacctcctttgttttatttgagagaacgtaagaggattttacttct

SEQ ID NO: 3216 - DNA, 1347 bp, Glycine max
  Clone ID: GLYMA-23APR03-CLUSTER16524_1
gcgaggtgaactagtctcgtgttcttttttttttttttttataaaaaagtaaggtagatgctttcaatgatcaaaggttgccagattagcatacatgtgattctgatcattcaaagaaggaatataaatgggattgaatatatttagggccgacatgcatcagcaaactaaactaaacgcaatgtacaatacatgccaaagaatgatgtcaacggcgaaggccataagaaattcgagagcacaaacactgccctaaaaaaaaaagaaaaaaagtttccaacaaagaagtttccaaattgcagctatctagaactatagtcaccgaaagagcaacaaattccacttttccccctcctctcaaactacacaatataactcgacaaaccaatccttatcaatctccgttcgaatccaatttttttatcagtaaaataaaaaaactaatcaaattcaacaataaacgccaagaattcgaattgaaggtcgaatttgctaatctaagaaatagttgaataagtctatagaaggagtatgcggtgaaacaaaactgaagtttgaagaagggctaggcaagacgaaagaactaccaccctccgtaaaatttcttccgctttgaaacataggactcaaatcacgaaggaagctaatcatgcttggatccgaagaagacggtggagagaaaaaattcgaaggaatgggagatagcgaagctggacccggggacagaatcccttgaaacatattttgttgtgatctctcaagtacaccatcacctatactaatctctatcccttccacatcgcttataatattgttcacacttggaagaagaacatgttttttccccataggggacatggctttctctatggtggcgtaacgcgccgccggcgacaacattccggcgccgttgttgaaagggtcgacatgagtgttgttgttgttgggcaccactacagaggaagaagaactggacccagtgaggcgttgaacgaggttcatgaagtcacttggtgtggtgtgaatcaccttgggggaaacggtgtagattattatgggttggcgcggtgggggttgatgagggtgtgagggttgttgtggtgccaagggtggtttcttgattttatgagagtctttgtttattctgagaggtgtagggcgtggaccttggagttggagttctcttctgggtgatctttctgtgggaataatgtgtgagaattgatccatgttgtggttagaggggaagggtggtggcgataataatatagaggactggacaagcatagtttgggttgtaatttatgctggagaatataagggctgtgacatgggacatataaaaag

SEQ ID NO: 3217 - DNA, 1650 bp, Glycine max
  Clone ID: GLYMA-23APR03-CLUSTER1654_1
gataattgcgcaatgaggacccgaaagcgtgaagccagcgaaccagaaagcattggccggaggcagaattcggtggcagtgcaagggaggaagaagaggagatacggctgcgagaagacgacagaaggggaaccaactgagttagattttggtgttatcctttgatataaactaagctctttcatttttccaatattaaaacttccagcttcttccttcctctgtgactcaaactgcatcaaccaagttagtgggattttctataaattgttgtcaatttgtcatgtcatgtatatgagaaactcatgaaaactctggtggtgacttattagttctctcggcaagtaaggatttcaaacaaactaaagttgaagagagtataaatgactttggaaactcttcaatccaatgagttctccaacttcattatctatgacactatctctgcaactccatttagcagccatggctccccagaggctagtttcttggaaagttttgtgaactatcaggagcagcatgaccaccctacatttgataattgcgcaatgaggacccgaaagcgtgaagccagcgaaccagaaagcattggccggaggcagaattcggtggcagtgcaagggaggaagaagaggagaaggaagccaagggtttgcaaaaacacggaagaggctgagacacaaaggatcacacacattacagtggaaagaaaccgccggaagcagatgaatgagcatcttgctgtccttcgttcactcatgccggagtcctacgtccaaaggggtgaccaggcctctatagtgggtggtgccatagagtttgtaaaagagctggagcacctcttgcaatcacttgaagctagaaagctgcaacttttgcaccaagaagtggcacaaaccaatgaaaatacggccatttccaaactcatgcaacctccttttgcacattgtttttcgtatccacagtacacatggtcccagactcctaacaaatacacatccaagaccaaagctgccatagctgatatcgaggttactttaatcgagacccatgcaaatcttcgaattctcaccaggagaagcagccacgggcagctaacaaagttagtagctggttttcaaacgctgtgcctcaccgtcctacatcttaatgtcaccaccatagaccctttggtgttctattccttcagtgctaaggttgaagaaggattccaacttggttcagtagatggtattgcaacggcagtccatcatttgcttgcaagaattgaagaagaggcttccctttgctgttgatcaggttcatctggggacacgagattttagtgaaatgaccaaatcaaccatctacaccaacctcaacagagagagagggggggaaagaatatttgctaatggctttagttttttatttttgtttgtttgatgtccaactgatgtgttaatgctaaactttagtttcagtagatgatggtgttttttaaaagttgcttcaagcaagtacaactaaaaatcaaatgaaaaagaatgttgatacagtttatctcgtttgcagttagttgagctctattgtcctcttcagtggccctaatatgaaagtagtttgcaatgaggatgataatcttcataacataaaaaaaaaaaaaaaaaa

SEQ ID NO: 3218 - DNA, 1295 bp, Glycine max
  Clone ID: GLYMA-23APR03-CLUSTER166286_1
ctgaaccctaaaattttctctcgttcctgagaacggccgtgctgtgccttcctcgaaatttttctcccatgcttccgatctccttcctcatctcctccgatcatccttggtcatctcttccgatcatccttcgtcattttttcttcttcctttgttagcatcacaggtttttttcttcgtcattctttttcttcttccttcgtcactttttcttcttcctttgtatgcttttgtttgtttcgttaagcttgtgaaatgtctctcaatcaagttcctgtgaaaagaaagaaagcagaatggtgtgataaaaatactgagattatgttgaaagtgtgcatagaagaggtgaatgttggaaataaacctcacaaccacttcactaagcttggttgggcaaatattgcagaaaagttcaataaggcaacaaatttgagatatgaatataagcaattcagaaataggtgggattctttgaaaaaggaatggcaattatgggctaagcttattgggaaggacacaggtcttggctgggatggggagaagaaaaccattgcagctagtgatgaatggtgggaagccaaaattcaggaggatcctgaagtagcaaagtttagagagcaaggcctcaaatttttacctgagatggaattcctttttaaaggtactattgctactggttttgcagcatatgcaccatctgaagattcaagacaatatgaaggattcaacacaagaacagaagagacaaatgataacattgatgataacactgacatggaagtgaatgagcctgagatagacacgacaactcaaaacacgtcttcggcaaaggaaaatggacagaggaagagaggaagagagggtgataaaaaaattggggttgctgccaagctttcctcacaattagatcgtattattcaaacatttgaatctagtgtatctgctcaagacccaactagcattactacatgtgtagcaaagttgaaagatctaccaggacttgagcgtgggagtgaactattttacaaagccactaaactaatgaaaaaaagggcaaacaggatcacctttgttgctttagaagagcctgagctacaacttggatggatcaagtctgaaacttaagcacaaattccttagtttctcctctatttgatatcattgacacttgctagttttgcttggttatgaaccttggttgtgttatggatcttagtttttaatttcagttatgtcatggatctttgattttaattttggttatgttatggatattagtaaaaaaaaaaaaaaaa

SEQ ID NO: 3219 - DNA, 1163 bp, Glycine max
  unsure (1)..(1163): unsure at all n locations
  Clone ID: GLYMA-23APR03-CLUSTER16642_2
aagcaaaattttaaaatgtttatacatggtgcaaacttcaatattcttgaactcgtcgacaatatgctaactaaaagtcaggcgattattgatataagtctcgccaaagggtaacagttacaatttccaagttacataaaccacttgctaaacatacccaacaagaacttgaaggtaaaagacgtccgaaaggcgcattgtaatccaaataaattttaaaaaaagaaattgtaaactcattccgcttgtatgcagaaccatatttattttcaaccaatcatcaacttgttttcttccaagaaggtgtaagtaggaacctccagattgtatggtgctggccccttcctaattctgcctgaaanatcataatgtgatccatggnaagggcaaaaccatcccccaaagtcaccagcatttggcaatggaatgcaacccaaatgggtgcaaaccccaatcacaatgagccattctgggtccttgactctatcagcatccagctagggatcgcgaagagatccaacatcaacactgtttgccagcttgatatcatcctcggttcggcgcctgatgaacactggctttccacgccacttaacggtcactgtagtgccaggctcaatgctggagagatcaacctcaagtgaagccagagcaagaacatccttactggcagacatgctaagcacnaacttgaggacaaggagacggaccaaagaggcataagcaaacctaccacctgtaaggacgaagtaggcaaatgccctcttgcttgggtcacctgggggaaatctttcatggttgtgctcatcatagacaatcttagaagtagggttcttaacagcagtaacagttgcaggaatctcaggaataatgctgttttctattgggtggatcagggattcagtagcaaaacctctgaagggaaaaaggggatgggaggaaggatcggatctgcggtcatcaacgactgcgtttcgagagacataagcggaagcggcgtggttgggccgccacggagaggaggaggagagagaagagagccttctagctgcaaccctcaacatcttcttcttcttcttcttcttcttcttctttctttcttttttttctattactgcagagaaaaaaaacaaagtgaggtaacaaactgcgaattgtcagaa

SEQ ID NO: 3220 - DNA, 1171 bp, Glycine max
  unsure (1)..(1171): unsure at all n locations
  Clone ID: GLYMA-23APR03-CLUSTER16670_1
acctannnnnnnnngaatttctttgttatcttgtggacagcatagaccccggcgtacagcattttttttttttttttttgcacgagaatatgaacttggttgcaatttatatatattgcgtgaagaaaggaaatctatgtatgttttatagttccattcattagagatcaaacaatctacttcactacacttgcttcgattttcgtcgcaactctcccctgtggcgagctaggtagtaccaaattaagtcatggggataaacatctttattgagattgatggcgctagctaattctttcatcctttaataataaaatgacaggattgtgtaggttcatgctgcagcaagaatagaagatgtgagtgtgacaggattgtgctctacaacacgagatctgcacttgactacgtcttggtgatcatcgttgctaatgctaatgtgtgtctcacggcattctgcactacaaaacgctttctcgcctctgtaaatgaagatgtcaaccccatgaagatgtttgtcgcaaagattgcaggaattgagaaaatgagggaagcgggttccaatattgttgagaggggaagcatagaaaatgccatagtcataggttgtggttccacgaaagttagcagcagctttagcagaggagacaacaacatcagtggagttcatggctgctactatgcccaacccaactacccctctctccaaaatcatcctattccaattctttggtggttttctggaattagaatttgaattctccattaattctgactgtcttttcttttaatttcttgtctagtctctcaaaaagaaagaattatgtggggagggagcatttggaattgatgaaagagttccataagcagtgagagggaatatcttgataaaaatctaactaactgacatgcacaccattgccacaatttaggaattgttttatagactaaaacagtcataatacgtacctatcaattataataaatttatatgtttcctatttttcttttaagtattgtatcggggggggggcctacgtagctgtgcccccggggggggccgggaacccatctcgccctatagtggaggcgaatacnatttcactggccggccgtttcacaacggccggactggggaaaaccttggggtcaccaacttaatccgcttggg

SEQ ID NO: 3221 - DNA, 1150 bp, Glycine max
  Clone ID: GLYMA-23APR03-CLUSTER16727_1
ttttttttttttttttttcttcatcaactataaccatttacatttgcaagttatacaactctacagagtcaaagctgcagacaatgtataaaaaagcactgcagataccgaattccttgaatattgaaaatctacacgctaattaagaaacaaagcaacagaaatttcaggcctcttgactgggctcagtttcataagctttacatgtgaaacaagtgtaccacaagttcacttggtttgtgtatagaggttgtgcagatgaataccatctctacctcaaaaagaggcaggaaaaagttgcatcctagagagtattttggagcaccaagagtaaccacgaaagaccaaattaattaaaagccgagaaataagcccttgcctaccagtgtataagcaagataccaccagaatgaactctcatatggacaatggcagtcttctttccctgttcctcgccaacgtttgcctagacattcttagccgggtaggaagaaatatattgaagcatatgacaaccccaaaaagccaaaagtgcctcaagtaaagagtcataagggatgagaaaacaagcatgaaaaacagtaaagcaaaaccaatcgccacagcaacatcaaccctggtttgtatatggggcttcgccgagaacgaaggacgagcagagttgttgcgcttcaactttgcacccaccatgttaacttctatcatattattttgtcctcatctaaaatccgcctactccccctgccccttctgcccaaatttttgcgatccatcactctaacgggcttggccatatccccactccacaccattctgcaagctctctacacccatcaagccaaagatatcctcatcatacctggtttggatatggggcttcggcgagaagtaagtaagagcagagtagttgcgcttgtgacgaatctggtaatctcggagctgctccacaattttagagcgggttatcatttccgcctccacccacaaccaaaatggaaaattctaacccaactcagattaccttatgttggctgcaaacataaaacctattcgctttcgctaattttcggtcaccacaaatccaacaatggcgttcttattcttcgggttttgggtttaggttttttgcaattgcaaatgcaaattgcag

SEQ ID NO: 3222 - DNA, 1651 bp, Glycine max
  Clone ID: GLYMA-23APR03-CLUSTER168027_1
agaaataggtaacaacttaccaatctaacgcgacaatataaagatgttgctgattgcaggtgcgaggaaaagcaattagacgttggcatacatgatatctacaaaagtactccgaaatttagagtgaagcaaaacattaaaaaacaagcccaagaaaatcgagttttgtttatgtgaatcttactgtaattttagttgaatttctttcaaatgtttccattcatttgccatattttgttattacttatttcagtggcagtcttcaatatttcgtaccttatatctcatttttgtaataaatactgttaaggatactaattggaacccaatcttatatatatatatatatatatatatatatgttaactataactataataacgcctctttctgtcactttctgagaaaagatcacttagagtgtgcaatatttctcagtcatggattctctgtctcttcttctctccccttatccactctccaccaaaacccacaaattcagcaccttgaaacccttctctcatttctcaaaccctaaaataccaccttctcaaccccattcaccctctctttctgcactccaaacaccttctcttaactccctccaaaacccattaacaaaacctttcttatcatttaccatgctcaacctcttcactccacttccctgcctcgctgacgtagcctccgacgacgccggaaaaataaacctggaatcggtgctggtttccatcgacaacttcttcaatcggtacccgtttttcgtcgccggttgcacctttatttggctggtggtgattcctctggcggaagagtacttgaagaagtgcaagttcgtgtcggcgattgacgcgttcaggaagctccgcgatgacccgaatgcgcagctgctggacataagggacgagaagaacgtgaggtttctgaagtcttcgaatttgaaaatgttcgagaaggaagtggcgcaggtcgagttcgctgaggatgggaacgaggacgagtttgtgaagaaggtgttggggaggttcaaggacgcgcctaacactgttgtatgtgttttggacaggtaagtaaaaataaagaaagagaaaaatgttttgcggcaatttaaagcattgcattgaaactgaattcttattcgggtatgattgagatggagaaaagaaacgctaaacatgtcttaattttttgtttcagtttcctaaaattaacaaggttttaatcatcggtggcgtttgttgataatgcggtcccaattgacagttaaaaaaccttgatgtttcgacccaaatcatgctcgcagactattttttagaatctcgtaaaaagtttcacttttgcccttaaatgtctccgttagactaaattggtctttctgttcgttttttttctgtagcatcctcctctccttatcccaattacccggatttgaagccaccatcatctccaactccgtcaaagccacaatagttttgtttgttataccatgctcggctgacatctgtttggcagaaatgatttctgtaaagacagaaatacaatttggtgactgtgaaatcgtttatttctaaacttacaattattctttttcaaaaaaaaaaaaaaaaaaaaaaaaaaaaaaaaaaaaaaaaaaaaaaaaaaaatttcctgg

SEQ ID NO: 3223 - DNA, 1304 bp, Glycine max
  Clone ID: GLYMA-23APR03-CLUSTER168027_2
cagctacgtaggccccccccccgagaaaagatcacttagagtgtgcaatatttctcagtcatggattctctgtctcttcttctctccccttatccactctccaccaaaacccacaaattcagcaccttgaaacccttctctcatttctcaaaccctaaaataccaccttctcaaccccattcaccctctctttctgcactccaaacaccttctcttaactccctccaaaacccattaacaaaacctttcttatcatttaccatgctcaacctcttcactccacttccctgcctcgttgacgtagcctccgacgacgccggaaaaataaacctggaatcggtgctggtttccatcgacaacttcttcaaccggtacccgtttttcgtcgccggttgcacctttatttggctggtggtgattcctctggcggaagagtacttgaagaagtgcaagttcgtgtcggcgattgacgcgttcaggaagctccgcgatgacccgaatgcgcagctgctggacataagggacgagaagaacgtgaggtttctgaagtctccgaatttgaaaatgttcgagaaggaagtggcgcaggtcgagttcgctgaggatgggaacgaggacgagtttgtgaagaaggtgttgcggaggttcaaggacgcgcctaacactgttgtatgtgttttggacaggtagttttgacggtaattccatgaaagttgccgaggtactgttcaagaatggtttcaaagaggcctatgcaatcagaggtggagttagaggccagcaaggttggatggctatacaggattcccttttgcccccttctgtgcatataaggaaaagggtaaaagcttcaaagaaactcaatacaaatggaaatggagccatccagcaaaatgatagtaacaataatagttccttaacccaagatagatcttctgttgaaaaccaaacaacagacgatggtcatgtgaaaagctctgtagagtctatttcagaagtgaaaactggttctgtagcatcctcctctccttatcccaattacccggatttgaagccaccatcatctccaactccgtcaaagccacaatagttctgtttgttataccatgctcggctgacatctgtttggcagaaatgatttctgtaaagacagaaatacaatttggtgactgtgaaatcgtttatttctaaacttacaattattctttttcaacctttttgttgagttttatagagtgtaaagcatgcaatccataaacactgtacaaacagaatcaatctagatatttagtatatatactctt

SEQ ID NO: 3224 - DNA, 1087 bp, Glycine max
  Clone ID: GLYMA-23APR03-CLUSTER168507_1
aaaaaacaagtaagtacaaagaaacatcccttaaaaaaaaataaagtttctctctcctttaataccctaacgttcccaagtttcagacttcaagtcagttcgcacaatgtcccatctaaacggcgcgtactacggcccctccgttccgccgccgaaatcctaccaccgcccctcccgcggcggccgcgacggctgctgctgcggctgcctgagctgcttctgcggctgcatcttcgactgcatcctgggcctcatctgcaagatcctcaccacaatcctcatcatcgtagcaatactcggctttctcttctggttcatcgtgcgccccaacgtgctcaaattccacgttaccgacgcgtccctcacgcgcttcgactacaccaccaacaacactctccactacgacctcgccctcaacgtctcgatccgcaacccgaaccgcagggtcggcgtctactacgaccacatcgaagcgcacgcgctgtaccaggatgttttgttcgggaaccagacattagggccgttcttccagcaccacaagaacaccaccttcgtgaatccccttttcaagggccagcgcgtgacgccactcgccgggaaccaggtcgaggtgtttgacaaggagaagggttcgggtgtttacaccatcgatttgaagctctttatggtggttcggttcaagttcttgctgttcaagagtgcgagcgtgaagcccaagattcggtgtgcgttgcacgtgccgctgaaatcgcgtaacgcaacaacaactatctcccccgatgctgcgtttcaacccacagagtgcggttgggattacgggaaaaaatggtggatccattagattaaaattccaccggtttttttttcccttagtatttcttgcgaaatttcttgttttgttctggctttattttaggtagtgtatattttcttgatgacattggttccctgactgaaacgtagccattctcctagtggatcgatattacaaaaaaatattttttttttatatagccttatattcacttttgatacattttgatgtctattcgtattgttgaaattttatttttgtaaaacctcgtgc

SEQ ID NO: 3225 - DNA, 1476 bp, Glycine max
  unsure (1)..(1476): unsure at all n locations
  Clone ID: GLYMA-23APR03-CLUSTER168659_1
atgcaagtcgatcagttcgcccttaagaaataggcaacatcggttcgaatccgataccgataaagggctttttcctttttttttcggtatgccgctccgccagcaaggagcgaaagaaccaagtggtttgtggtaatgttagaatttgcacctatttgtatctatttagtgatcagtctgctagtttctttgatcttactcggtcttccttttctctttgcttccaatagttcgacctatccagaaaaattgtcggcctacgaatgtggtttcgatcctttcggtgatgccagaagtcgtttcgatatacgattttatcttgtttccattttatttattatttttgatctggaagtaacctttttctttccttgggcagtatctctcaacaagattgatctgtttggattttggtctatgatggcctttttattgattttgacgattggatttctctatgaatggaaaaggggtgctttggattgggagtaatcactagtgatagggcaaaaatagggaggaaggataaaggaaagagcgatgcctacattaaatcaattgattcgtcatggtagagaagaaaaacggcgcacggaccgtactcgagctttggatcaatgtccccagaagcaaggagtatgcctgcgtgttccaacgagaacaccgaaaaaaccaaattcagctctacgtaagatagccaaagtacgattgagcaatcgacatgatatatttgcttacattccgggcgaaggtcataatttgcaggaacattctatggtgttaataagaggaggtagagtgaaagatttgccaggtgtgaaattccattgtattcgaggagtcaaggatttgttgggaattccggatcgaagaagaggcagatccaaatatggtgcagaaaaacccaaatcgatatgaatggaggatgcccctggaacttcttttttttctcggtcaggagaggtacgaagtcactcgccctatatataatagaatagtgaaagcaggagaggtttagcggatcagtgaaaaaaatcttattctagtaagtcatttgtccgttgctggtcatcaatctccggtatcgattcccggttttcccgggcctactcccttaaagcttgttacggtattctcactccgatcgccccaatgaagggcaatctctatcccttctaactttattctgggatttcttattggcattggattttacaagtgagctaatcaccaaatgagcattaacccttataaagtaagctagtacaaggtagacttaagcaatctcattgccctgaaagaaagctcagtaggtggatcttctttccaggtcgcaggtggagagccggttgaaaggccttctgccaattgagaatgatccattaatataaaaaaaaaaaaaaaaaagaattcctgcagcccgggatcttcagcccnnnnnnnnnnnncggccaccgcgggactccctttttnnnn

SEQ ID NO: 3226 - DNA, 793 bp, Glycine max
  Clone ID: GLYMA-23APR03-CLUSTER1686_4
aatgatatccattcacctggttttgtttgcctttctaatttccactatgtcctgcaaatatggtattgcagttgcacttcttatcatggctgcttattattgtattattttccaggctactcacatatgtcatggaaagaacgcaaaaagattgaaaataggaatgttgtttctcttggtgggaagccccaaaagaatcagagattacctttaagtgtggctcgactaatgatgaagaaacaaaaggagagggagcagaaaatgctccaagagcgtttgattcttggacaatttgggggaaagcttggtggtagcagtaaaagatctgctgggaagcacaagccaggaaacaggggtctgaaatcaagcgaaggtcattttagaaatggcatactcaatgtgaagcatttgttaaattcaacagcatcaagagatcgtgaaactggaaccaatatgtccaatacatggaaagggaaaggtggtaagaagaaaaatggcaacaagggtgctggtggtaagaagcaccgttcagcgcatccttgtgaataacgtgttttgggaatatggaggagtcctttttaataggtatgacccttgggtaagcttttcagttttgacagagagtgaaatggatagaatagaaaacaggccaataatgtcttgtgtattttgataattataaaatttgaacaagaccttgtgtcttgttttgagtttttgtgcttatcaaacccactaggacattgggggtagttcaatggaataatatatattcttgtcctgtttgaagtgt

SEQ ID NO: 3227 - DNA, 1564 bp, Glycine max
  Clone ID: GLYMA-23APR03-CLUSTER1687_1
ttatctagttaatgaatctccacacgagacgtgaaagaatttattagaaattgacatatattctttaaagcaagtaaagacagccacaaagaaaaagggaaagttggttgaactacgtcgttataagacatacttccagatcatgtcgtatacgtgtcgccccccccccagagaaaccctctttcgtttcggtaaagggaactaaccacttttgtcttgttattgttacaatgatcttctcttagtttaagtaagggagatagatagctagagagtgtgttggatcgatctcaaagggtagagaagataatcaagaaatgatgtcaacaacatcccaaactaatgttaaccatagcttgtttgaagagcaagatcagatccctacgcagatggggttgttcaatattcctttcccaccaaaccaaacataccctcctttgggttgccaaacaggcactttgaaatccatcagtgcaatagctccttcactttcatctgctacaagtttttctgaaaccctactttcaaccgcagttcaaagaccacgagaagatctcacttcaaatttgctagctggaggaggaggccaactcctttccttgaacagatccagagtgaattcatggtgagaaaattaactgttatttaattatcacatctcatcatgcatgttagttagccattttggttttataagtaattgtatgactcatcacttaacaatacttgttatatatcctcgttttcaaaaccatgggagaggagtcaaatcattttgttttatgataagatttataaagagataggtctcatatatatatatatatatggttgcatatatatcatcctatgaatttagggcatgggaagaagtaagcgattgtttgatgggtaaaagaattggaggagatgataatcatcatctaggggtttctgccatgaagatgaagaaaatgaaagcaaggagaaaggtgagggagccaaggttttgcttcaagactatgagcgatgtagatgtgttggatgatggctacaagtggaggaagtacggacagaaagtggtaaagaacacacaacacccgagaagctactaccgttgcacacaagataactgtcgagtaaagaaacgcgtggagcgcttggcagaggatccaaggatggtgataaccacatatgaagggagacacgtgcactcgccatcaaatgaacttgaagactcgcaaaccccttctgaacttagtaatttcttgtggtagtttacaccaacataatgtttacatatatgtatattttaatcgtagagagtagagatcgatgaagaccgaataagtagagaggaatgagtaaaaattgacagtgtatcttggaaatgatgcatgcatgctttgtttggttcattgtcaattttcactcgtttccatccattcctcccattttcaccctttccaagagcacaataaatatacatatacagttgtgcttttttttcttctttttgttagttttacaagcataattaatatttctaagttgtaaaaaaaaaaaaaaaaagttttatatattg

SEQ ID NO: 3228 - DNA, 1958 bp, Glycine max
  Clone ID: GLYMA-23APR03-CLUSTER168_3
actacttgtaagagagagggcaaaggaaagtagtgagaaggtttgggtagtgcgtgcgagtgtgacaaaaataggaagcttacgtgtgtatttgggggcttggcctgtatttatgcatgcaaagcaaaattttactgtgtgatgaaattacgagaggagagagggccggttttgtttgtttgtggggatgtttttcttctggagcccatcaagttttgagctttctgattgggtctcactctctctgtctctttttgaaagtttattaagacaatacctgttgaagatgagggttggaaggaagagaggaacccagagagagaaagctgttgcaaaaagctgaaagctttttttaatttccttcctctattctagtcttaggtacccgtatctatcatcatcctccttctcttaattctagctattatcatacaactaattaagaaggattgacatgttagtagtcaataactcatctcccacttctgaggccgagaatggtactgctgctgccactaataagaggaagagaaggcctgcaggaacaccagatccagatgcagaagtggtgtccctctcacccaagaccttgctggaatcagatcgttatgtgtgtgagatctgcaaccagggattccagagggaccagaaccttcagatgcaccggcggaggcacaaggtgccgtggaagctgttgaagagggaaacgccggtggtgaagaagagagtgtttgtatgcccggagcctagttgtttgcaccatgacccatgccatgctctgggtgatcttgttggaataaagaagcacttcagaaggaaacacagcaatcacaagcaatgggtctgcgagagatgctccaaaggctatgcggtgcagtccgattacaaagcacatctcaaaacttgtggcacccgaggacactcttgcgattgtggccgcgttttctcaagggtggagagcttcattgagcaccaagacgcgtgcaacgtggggaggttggggccagaaacacagccacagccacagacacagacacaggcagtgcaagctgctgcatgcttgtctcgaacagcttcaagcgaaaccaatttcagcaatggagccccttggccccaaagcggtactgtaataattccaaagccctccgtaacagtattagaaccctcctcatactccaaccctactaccactgccgaaaccaacatcatcaacgacgtccaccccaacctggagcttcagctctctacagctactccttcatccaaagctaattataaccactccatacagacacagttgcagctatccatagggatagggtccttggaagagcagttgaggatagcgatggctgagaaagcgttggcggaagaggcaaggaagcaagccaagaggcagatcgaactggctgaacttgagttcactaacgccaagaggataagacaacaagcgcttgcggaacttgacaaagcctatgccttgaaggaccatgcaatcaagcacatcaattcaaccatgcttcaaatcacttgcctcggcttgcaagcaccattttcaatcgccaacctcccacgacaactctttcgtcttcagctacataacacaagctcaaagccaactagaaaaacatcgactcaaacccattattaactcttaaacattctccattaatcccttccttcttttattaccactgctactactattattttgtttttctagctaccctagcgaattaatatccttaatttgtgaattggtataccatgtgaagtgagtgctatggttatgtacgtgggattaatagccagcggggtgtgttattattaatgtaaatgtaaattagtcgcatcttgtgccatgttgattaattaaatgcagactataatatgatgagcaggttttgctggatgtacgtgcgtatatatgggttaaataatttggttctttaatttgt

SEQ ID NO: 3229 - DNA, 1440 bp, Glycine max
  Clone ID: GLYMA-23APR03-CLUSTER168_5
cttaggtacccgtatctatcatcatcttctctagcgagctcagagctcatcctgctccttctcttaattctattatcatacaactaagaatgatcgacatgttagtgatccataactcattacctcccacttctgaggccgagaatggtactgctgctactgccactaataaaaggaagagaaggcctgcaggaacaccagatccagatgcagaagtagtgtccctctcacccaaaaccttgctggaatcagatcgttatgtgtgtgagatctgcaaccagggatttcagagggaccagaaccttcagatgcaccggcggcggcacaaggtgccatggaagctgttgaagagggaaactacagcggtggtgaagaagcgagtgtctgtatgcccggagcctagttgtttgcaccatgacccatgccatgctctgggtgatcttgtcggcataaagaagcatttcagaaggaaacacaacaatcacaagcaatgggtctgcgagagatgctccaaaggctatgcggtgcagtctgattacaaagcacatctcaaaacttgtggcacccgaggacactcttgcgattgtggccgcgttttctcaagggtggagagctttattgagcaccaagacgcgtgcaacgtagggaggctggggccagaaacacaatcacaggcacaggcagtgcaagcagctgcatgcttgtctcgaacagcttcaagcgaaaccaatttcagcactggttccccttggccacaaagcggtactataataattccaaatcccaccgttacggtagtagaaccctcctcatacaccattgtcactgccgaaaccaacaacaaagtccaccccaacctggagcttcagctctctaataccactcctactgcatcatcacaggaagaaagggttcatcaagagcagttgaggattgcgaaggcgaagaaagcgttggcggaagaggcaaggaagcaagccaagaggcaaatcgaactggccgaacttgagttcactaacgccaagaggataagacaagaagcgcttgcggaacttgacaaagcctatgccttcaaggaccatgcaatcaaacacatcaattcaatcatgcttcaaatcacttgccgagcttgcaagcaccattttcattcgccaaccgacgaccaaatcttctcctacataacacaagctcgccaagtacaaaaacatcgtctcaaacccattattaattaactcttaattagacgacatcgatcccttccttcttttactattactactatgtcaagtgagtgctatggttatgtacgtgtgggattaatagccagctagcgaggtggtggaaaaaatgtgggttattattaatgtaaatgtaaattagttgcagcttgtgccatgttatttaaatgcagactataatatgatgagcaggttttgctgg

SEQ ID NO: 3230 - DNA, 1943 bp, Glycine max
  Clone ID: GLYMA-23APR03-CLUSTER16935_1
ttttttttttttttttgccagagaagccatttattttattaaaagatttacaaaacaaatacaagaacagaatttgacataaaaataaaaaatacaacagaataatcttacgtgtgtgtgatacactatagatatatagaagcattgaagatggccataaaaaaaaacaacggacttcatgtccctaaaacccaacaggttcagtacatccaagataagtcttgcctgaaagacacagactttgcagctccttggacacctctttcagaaatttgaggacaatcttcaatggccaacaaatctaacttcaatgatccaacaagcggctttaatccatcatcagagatccccaaacacttgcttaaccgtaaaatgcacaatctgggaaactgactcacaagctgtagcccttcatcgctaatctcttggcatttcacaagttcaagtgattcaagatactcagcggagcaaagagcttccattccaacatcattgaaggaataaacatgatcaagagcaagctgtcgaaccaggcccctttgaatcaaacaaagtcactaatctcttggcacctcaccagttcaagcgattcaagatactccagggagcaaagagcttccatgtctggagcagttttggaataagcccgtgagactcccagccgccgatctcaacggattattcaccaacgaggggagtgaaaaatcggatggaactctaagtgaacccgatttaagttcacttgatctttgggacaaacagaataatgtcagagtccctcaccccaacacacatgtctaggtgaattttctgcaagttcttgcacttactcaacacgcaagcaagccctctcccgggactgatgatgcaattgaccaggctaagttcaagcttgggcccaccagggaacatctgcttttgccacccatccacagacaaccggtcataaactttcatgtatccgtagttagcatccacttcaaactgcaaccttgtgagtttctgccaaccagggccaagcttaattaagtccccttcaccaatggccctgcaattcttaatggagagatcctcgagccttccgagcttgccaagatattcaagccattccacactgctgacattaaggcatctgataaggtgaaggctggagaggttcttgcagcccacaacaagagacagaatgccacagccagtgatccttggtgtgaaattcaaccttaaagatgagagcttggaagaagaagccaagtaacggagaccaacatcagtgatgaatgtgcagtagctcaaggagagatcacagagtagagggcagtgattcgcaagaatgagaaggcccttgtcatccaattgttttcccaatttggacatccatccagagtatgtaatctccactttggacaagttctcaaaccttatgcatagacagctcaaagcttcatctgcaggatccattccacacccaacccttatacaattcctttctgcattgtccaaataataaagccgtttacaaacaagagaaacagcatttctatcacttgttttctttatcctactcaatatctcccatactatgtgctctggtatgttatccatcctctgctcttcacaacatggatgcctgacaaaggaaggaaggaaagccgcctaatttaccctaatgacaaattcttaaaatgagaaaaaaataacataggatactacgttcatgtgtgtgtgtgcgactgtcggttatctatttaccaaaaggttaagatctggggagaaaattgaaaggagtgaaggattcattgtgagatgataagttaatttaattgggattggaagaacaataggaaaagcgaaaattaaacataaccgaaacagaaaaaaaacaaaagggtataagaattgaatttgagggaataaagaaggatccatcgcctacctgctcttca

SEQ ID NO: 3231 - DNA, 1585 bp, Glycine max
  Clone ID: GLYMA-23APR03-CLUSTER16943_1
gtttttttttttttttttgacaaaccaaaggaagaaaccagatcaattacgggtcatttgagtcaatcttttttataaatcaaaatttacactagactcccgtaactttcacctgactttattctactttaatgccttccacaaacattttccaccatagtcttagttatgtatgcctgaagattaatgcattggttttgtatgttaaccaatgcattggaaggagatgttttacactatcatccttagcaacattttctcttcttatttggggcttaagtcccaatgttgaaaaaaccctaccttaaatccacgagtcacctaaacaaaaattgatggctcataatggtatacaacaccctttcacaatgttattcaaaattgtgcaccctctttgcagagatgagtgtattttgtagaagcattgctatggtcattggaccaactcctccaggaactggtgtaacagcagaggcaattcttatggcttcttcataacaaacatctcccaccagtttgtaacctcgggggctatttggatcctctaccgggttgattccaacatcaataatgactgcaccaggctttatccagcttcccctcaccatgtttgcttgcccaacagcagcaatgataatatctgcctgtcttatgatctcttcggggttactggttctagaatggacaatactgacagtagcatcttccctttgaagcaagagagcagctggcattccaacaatattgctccgaccaatcacaacagccctctttcctttaatagaaacattgtatctgtgcagtagctctatgcatccctttggtgtacaaggaacaaacagaggttctcttccacgcatggcaagacgaccaatatttaacggatgaaaaccatctacatccttctcaatcctgacagcgttcaagatgttctgctcattcatatgcgaaggtaagggtaactgaacgaggatgccatgaactgaaggatcatcattgtagcctgcaatatagttcaaaacttcttcttctgtggaattctcaggcagatttgcttccaaagaattgattccaacagattcacaagccttcttcttgttacgcacataagttgcagagtctttcctatccccaacaagaattacagccaacccaggaatcacaccaatggattctctcatcctggaaacctcagccgttatctcatctctgatttgcttggcaacggattttccatcaatcaccttagcagaagaatccatagccatagcagcaacggaggcaacatgagaagaagagaatcggagagaggtgggacccacaccaacttggcggaaaacaagagaagagggctttgaagagtagcaatgggagtgagtgaagaacaccgaagaagccattgagattcggtggttcctcaaacaacgattcagcaagctatacgttgtgctttgttgttgttctcttccctgtgtttttgtttgtgtaaaaaacacgacgctaggattctccgaagtgaaaacttactttggggttttcaggggacagattctctgttttttggggggggggcctacgtagctga

SEQ ID NO: 3232 - DNA, 1291 bp, Glycine max
  unsure (1)..(1291): unsure at all n locations
  Clone ID: GLYMA-23APR03-CLUSTER16984_1
ttttttttttttttttttcttttaggatttttgttttccactttatttaatgggaatatctttataagttcatttcaattcaaaagtttacctactcattcccccctcataagtgccgttgagttatttggcagttggtcacttatttcccccattaattggcaaacaaagacataaatttctgaaaagtgggggcattagttttcctaattactaagtaaatcctagttgctatgactaggccaagcgtaataactccagggcttcacccttgtgcatcttgttgctaattctgagcttcctatagtcttcataaataaaaggttgatacaaacgggggtgatcatggtccaccaattctgctggggcttcaacattcctattcctgggtgctatcataaatgtagcaattgaaaaccgtttggtcgcttccttgcattgtacacggtgtgtcaaattgcaaaaccttccattgctccacacacgagcaatgtctccaagattgacaaggagggtccctgggaaaggagggattgacacaaaagagccagaattgttcatcacttgaagacctccaacattttcatcatcttgaagaatggttaggaagcctgaatctgtgtgtatttgaacaccagaggaccctaccgcttctggggtgaagttatatttgttaattctgaattggcatggccagtcctcaaaatcagcaactactacgcctagagattcagccatcttttgtcctattttcaccgccaaaccgtgaatggcttggccatatgcctccattatttgcctctggtgaggtgaggcatcaagttgagagcagaaattgtgcatagcttgtgaggaagccaagtcatagaggcccaaggcctcatagaaagggttgactttgcttggtgccatgtaaccactgccagcaatgaattctgtgttgcgtttcttgatctccataggaagatcaagaagagcttcaatgacttttttcatgtcagccatgagggttgcaggaatagagtggttaatgatcctgaaacaaccccatctttcacatgcctctcttagcttcttgcattctccttcatcagaattaatcttctccacatcaatcactggaatagtctcctccatagttctacttctatctctattgcttgtttttttttttttttcctgtgcataggcaaggatatgatcaagggaaaagggatggggggggggcctacgtagctgagnctttgaccgtcctgatagaatctttcctttttcaaaaaaaaaaaaaaaa

SEQ ID NO: 3233 - DNA, 1836 bp, Glycine max
  Clone ID: GLYMA-23APR03-CLUSTER16997_1
ttttttttttttttttaggattagttctcgatcttcagcgctcttcaattccgaaacaattgtatctttttaagcacatggaaatacatggcatgtagatgtataacaacaacttcagtaatgctacaaaccagaaagaattaatacaacaatccaactcctgcatcattcctcttttggaatagatcagtgcagaaataaataaaggttacaatgaaagacctcatttcatgtgaataggtgaatatcaacaaccaactaaatttatatccaaaccattgccaaaaattcagattcttaagtacagcttccctaactagagaagcctaaggtgtgcagtatcattcagcctttttatctgccaaccagttctcagagaatgctgcaacacagtcactgaagagtcttctatgcaaaacttatgtgacatcagagggctacatccaagaaggccagtcaggagacacttaattggcagagaatgagtaaatagtcctatacaagacacagttggtgaaaagctgctgaaaccagaattatgcagagaacttccgtggtttacattgccagaagaaatttcatcttcaatttcatcaccagtggttgtcacaaattgtagtctgctcttaccagactttttccttgagaatggaggccggtgcctgttgagcaaatcccattggtttggagggagagaaggtccatcttggtcgtgaagtgagttagtgagaagagcatgggagttgttctgtgcaaatgcctggttgtcattttgatgtgatgataaatctaatagtttttcatgtaatgcaaggacagttccatttaagaagtgaatcatccggaattctacttgtctaagtgattcaccagaaggtgcagtaaaatctggctggaacctgtcaattaagccctgaatttcgggagtatatatttctgatcgaaggcagccttcccaattcccttgactaatctctgcaagagcatctgtggattgaatttgttcctctgaaaaattgacttccttgcacaccgacaccgccgtggaccgcgcccgatccagcggggacgaatacacggcgctgaaccgaaccccctgcgacttgagaaacacggccagagccctggcatggcgcttcccgttggccgtcagtgcggcggcggggcagcggccgccaaccaaatccggcgccagattcagctcgcactcgccgtggctgatcaggaaaacctccgtcaccgcctcgtcgtccgccacggcgaccatcccgttccccgaaaagctccgggacagcgcgggcggcgacggaagcgggggcggcgggccaaggacgttgtaggggtcccagaccttgatcgaggggccgagccgcggcgtcccgagggacgagagctgcggcgagagcggagacgccgacgcgtggcacggcagcatctcgggctcctgttccagaaccttcttcaccatgtggttgcccaattgggcccggcccatcaagggcccgttgaggttcctctcatcttcttcttcttcgctgtcttccaccacttgcactgactgactcgcacccatttttcacgaaacggcgtcggatcgtgcgagatgcgggggtttatgactccgatttgaaacgcatcgcgtggcggggtttgggtagagagggatctgaatagagaatagggttgggggggttaagtgagtgagcgaaaaggaagagaagtagatctcaatgtggcgttttcgatcttcatttcatcgtgttggggcttcaaccctcgttcttcaatccgtgtttgtatataaaatgtataaaaatatggtgtgaactgtgaaac

SEQ ID NO: 3234 - DNA, 1739 bp, Glycine max
  Clone ID: GLYMA-23APR03-CLUSTER1703_2
ggtttcttcttcttcttcttctcctgcgcttcgtctcaatctcaagcgtcaattctccatcgccaatcctctctttctgctgatttcggactcgtcacttacttgtgaaatgatgctctcagcggcaataattacttttggacgctggacataaggcgtgatgggcggttgctgttgttgttgttgttctgctaaggagactgtgttgagcgctccacctgcgtactattattatccaagagcatcagaagagcatgttcctctatcatctcaccagggtgctgcttctgctttctctgggcggctcttggttgatactaatctagatacttcatctcctgatacttatagacctccccctgctcctatccctttcaatgttaccttgggtaccactcaaactccacctgcggctcaagaaattcgtagtgacaagaataatacttccttgcattctacaaattctaatgcaattcaagaaccagttgctggagacaatcatgggacctcggctaagttggaagagctgaaggaatcagactgcaaagttcaaaccgatctagagctagattctgcaaagggttccgaaattgaacttgcaaagtcgggaaaacctatagatgtagtagaagaggaggatacatgcccaatttgtttagaagaatatgatgcagagaatccaaaactcgcaacaaaatgtgaccatcattttcaccttgcgtgcattctggaatggatggaaagaagtgagacttgccctgtgtgcgatcaggatttggttttcgaccctcccattgaataagacatcaacgtgggagttcaaatatactgcgtagtgtttgagaagcaaggttacaaagtcatgagtttgatatgatagcaacccgagcttatggctgtattttgattgtttcgttttccgagttttctgggtttattccattttttactcagtcccctgcgttgcagcatacaggaaattaaaggaaatattctctgtttatagttttatcaattagaatgttttaaagtgatagctggatactacaagcgaaaacagctggcgatatgatttttcgaatagattgtaagacttttgttacattgtcaaagaatggtaggatgttctcactctggtggtactgctttcatcttatatatatgtatagggtgggaataggagcaattcttgtttgagttattactttcaataacttttttgtatatattaaatttcaataatctagtagttgcatattttgatattatatttatatcatgcatgcaaaatggaatggatggaaaaaagtgaaacttgccctgtgtgcgatcaggatttggttttcgaccctcccattgaataatacatcaacataggagttcaaatatactgtgtagtgtttgagaagcgaggttacaaagtcatgagtttaatatgatagcaacccgaacttatggctgtattttgattgtttcgttttctgagttttctgggtttattccattttttactcagagtccctgcgttgcagcatacaggaaattaaaggaaatattctctgtttataatttcatcatttagaatgtttttaagtgatagccggatactacatgcgaaaacagcggtcgatatgatttctcttgtggattgtaagacttttgttacattgtcaaagaatggtaggatgttctccctctggttgtactgctttcatgggaataggagtaattcttgtttg

SEQ ID NO: 3235 - DNA, 1381 bp, Glycine max
  Clone ID: GLYMA-23APR03-CLUSTER17143_2
gaacaacaaacgcttatagcacaagtaacataaaacttgaagataccacattcacatgcaccacctccaccttttactccaaacaacgaataaaacggtgtcaaaataaaaacctagcatctagcatcccatgataaactcattgcactgcacatgctattgattaatgtctctccttcctcatttttccatacatccccaccaaaatgtaaataacaatttccttttttttcggcagttacattttcattatgtttcctttccttgaacctaccctgtagtaatgtaaccactactgtataataattaattaattaattaataatgataaataaatatatcaaacaagttgcactcaactgaatttatgaatattcctaatctaaaaatctgtaaaaacccaaaaccaaaaataaaaaatttcctctaattaacgacaacatttggagcagaggatcaagaaaacaatgagaaagacaatagaagagagcgcaatggcgacaccaagaacaaacttgttaggtccatgatgatgctccttcttgtgcctactcccttcctcatcaccctcatcgtaatcatcgtcgctgctatcatcggcagaagaatccttcgacggcggagtgaccggcattccgaacttatcacagggcgagatcccaagcttcaacttggaagacaccatggaatggttatagcaaagattactgttgccaccaaccttgaacacttctaatcgcttaatgaaagagaggttaaaaggcacaaccccgtggaggttgttgttggcgagattcaggtgcttaagagacttcatctgtgaaatgaacttgggtatggtgccgttgagctggttagagctcagatccatgtgaatcaaactcggtaaagcagatacggaatcaggaatggaaccggagaaggagttggaggagagggagaggtttttgagtgaaattaggtcaccgatggaaggaggcatttctccggcgagggagttagaggagagattcaaaaactggaggctgtcgagcattgttatggaagggggaatgttgcctttgaggcggttgttggagaaatcgatgtgtgtgaggttggagtggaggtggccggggagggatccggtgaggttggcgttggagatggtgagggttttgagcttggtcatgcgggcgaggatgacgaaggggccgcccacggcggaggccttgacgttgacgtcggagacggcgaggtcggtgaggttcaggaggttggagagccagacgccggagagtttgcggagggtgctagccaaccctccttccacaatgccaccctctgcgacgccgccaagcccttccgccacctcatctccctccgcctggccaactgctcc

SEQ ID NO: 3236 - DNA, 627 bp, Glycine max
  Clone ID: GLYMA-23APR03-CLUSTER17175_2
ggaagtaaataataatataatatatgtgggaggtatttgacttgattggggtggtggtaactggtaattaactaattattgttattaagattattatgatgatggtgatgatgatgttgttgttatgataatcatacccagagggcgccgacttggacgagtttggggacgaggtggccggagacgtggagggcgacgagggactcgaggccgccgacggaggagcctccgatgaagacggcgggggtgcggtggtcggggagggggagggcagcgatctcgtggtcgtccaattcgatgacggtggggttgacgccgatggtggcgaggagcttcttcatgacgtggcacatgcagcaggaggagcgcgtgaagattatgacggggtgctcggagatcaggcgctggatgcgggcttccgttgattcgtccacgtcgatggagagagaacaagaagaggagaaagaagaagagtttgtgttgtttgtggtggtggtggtggtggtggtggttgttgttggggtggagaggtctagctggacgacgtcgtttgagcagcggcgcaggccttgcatcgttgaattgagtgaggaaaaaaaggacaagtagtgtagtgagaatgaaaat

SEQ ID NO: 3237 - DNA, 876 bp, Glycine max
  Clone ID: GLYMA-23APR03-CLUSTER17221_2
gcaaaagcagatccatttttctttttttcttttttccatcaagaaatacattcagaatcagtacatggcatgcacataaaagagaaagacatcaattattacgtgtcctaaagatcttgctacctgatattcaaatacaaatcataatcaggattctacaagttaaacaaactaacacaattcttcaagacccttttctttccagaagagcccccaaatcaataataatttaaaaccctaactaggagtcagtaatgtgcttaaggcccaaaccatgcttgccacggacacacccaggcctcacaaacagataaggagatttcttcgaaccgtgcattttcgaaaatgcccttttccccaatttcctcatcctctgcctcccgaacttgttgctcacgttccatggcacaagctcatcatccaaaccatacccatcgtcatcctcatcattatcatcaccgcccatatcatcatcatcatggtgataatggtagtgatgatgattttccaaacccgaatcttcttccgattcatcaacaccatcatgtcgatcttgtaaaccaacatcgggatgaagaagaaggtgtcgaatttcttcaattggggcatcgcagggagaagaatcggattcgaaccaagaaacggaagaatccgaagaaccaaagccatctatctcctcttcggcgtcaacgacgtcgacgagttcccactgcaagagggaatcgtcgttcaccttcaagaactgaacttgttcgaggatgaggaactgcatcgatgatgaggcttgattttccattttgttaccctaaattgaacttttgacttttgttctttcttcttctttcttttgggtttcttagttgcgttggggagcat

SEQ ID NO: 3238 - DNA, 576 bp, Glycine max
  Clone ID: GLYMA-23APR03-CLUSTER17229_1
tttttttacaatgagaagtctccctatccagttgctgtgcttctttctggaaaatcatacctaaccaattttattatataaggaaattttcttatacataatttcttttttgtttcccaaataaaagactaatttaacagtatgcgaatatggaaaaaggaagatggatctccatcccatagaataaaactagagagaaaaggacatccaacaaacatatttgaagccttttaattaagtgttactggaaaaagtatgctcttcaacagaatgttgatgaagatcatttggcagaagcagaactggatgagagtctttggctcctggctttatcagctttttccaagtaatcttgatgagactggtgtttggtccctctgctcataaagtaccatgggatggtaaagacagcggtgatgagagttaaaccaacgaagacatgtttcttgtcaccgctatagaggtagtgattcaacctcgacctgaatccccctccaacgttgctgttgctgtttgtgtccattttcgcttctgctcttcttccctcttggcctccgctaaataaaaatccgtggg

SEQ ID NO: 3239 - DNA, 959 bp, Glycine max
  Clone ID: GLYMA-23APR03-CLUSTER1726_15
gctccttatttgggggaaattgggtaccggggccccccctggaattcagtttagttaggccccccccccccttctttttttttctactctagactcttcctttctcttctctgtctaaggggtgccctgagatcacattgaacaatggtgaaggctgtggccgttcttggcagcagtgagggtgtcactggaactattcacttcgttcaggaggggaagtggtccaaccaccgtaactggatctcttgctggtcttaagcctggtctccatggtttccatgtccatgcttggggggacactaccaatggttgcctctcaactggatcacatttcaatcctaataacaaggagcatggtgcccctgaggatgagaatcgtcatgctggtgatcttgggaatgttaatgtcggtgatgatggtactgtcagcttcactattactgacagccagattcctctcactggaccaaacaacatcataggaagggcggttgttgtccatgctgatcctgatgatcttgggaaaggtggtcatgagcttagcaaaactactggaaatgctggtggcagagtagcttgtggtatcattggtctgcaaggataaactaatcacatgaagttggaaacgtgctttagatttgtggaataaagtagcacccatttaaacccgtttggttaggtccggtctgtactgctgaattctgtgttttgcttgtattgtatcgacacttgatgcttaatcaaattgttacattgcttgaagtatgtgttggtggttatccttatttcttgtatcaatttgtgcttgaagtatgatgatactcgagaaatgtgagattttcaattggaaaataatgacatggaatggaatacaagtgtcattttattgtttggaaaaaaaaaaaaaaaaaaaaaaaaaaaaaaaaaaaaaaaaaaaaaaaaaaaaaaaaaaaaaaaaa

SEQ ID NO: 3240 - DNA, 734 bp, Glycine max
  Clone ID: GLYMA-23APR03-CLUSTER1727_23
ctcagttggttcttcctacgggatggcatccaggaagaggaagagcattgcttttaagccacaggctcaatttgataccaggagattccaatccttggaagcctggaacaaatatatagataacattctggattggaggatccttccaaaaaggaatgttaggatttatcatactgaattggatgagtttaaggcggagttggagaggcgtaaccttcaccaacgcctcgccaacctttaggagggaagcatagatgtggcggttgatgtgccatcattttcttctattttctaaaccctttttgcaccattttaattattgattggtcttaattgtcaattaattaggcagttttattatttgggctcatttagctaatttgatgtttttaatctaatttcaggaattaatgaaacattgggcttaatccggattttggttgtggacttgaagagggcaaataaagcagcgcttaccttagttaatttctaattaggaaatttcgcaattttatttaatgatgttcagtgtttatttcgttttgggccagagtattgtaatagggcccagtgactttgagtgactctttttaaatagctgccttgggattcgtgcagagcattctatgctgctatgctattttcattattcagagctttggttttaggttttcacgtttttctgttcccttgttacagttttcgttcttaatgcaaatttccgttttctgctt

SEQ ID NO: 3241 - DNA, 1309 bp, Glycine max
  unsure (1)..(1309): unsure at all n locations
  Clone ID: GLYMA-23APR03-CLUSTER1728_56
atatacaccccattgctacgaagggctatatagcataaacattttagtcttcattgcacaatgtcgacctcttccattaacgggtggtgcctctcttccatctccccagccaaaacctctctcaagaaggccacattaggcccttctgtcttcgcaaccagagaggatatggcaaaggaatacgagcaagctattgaagaactccagaaattgttgagggagaagagtgaactcaaagccacagctgctgagaaagtggagcagataacagcttctctgggaacatcatcatctgatggcatcccatcatcagaagcctcagacaggatcaaagctggtttcattcacttcaagaaggagaaatatgacaagaatccagctttgtatggtgaacttgccaaaggccagagccccaagtttatggtgtttgcttgctcagactcaagggtgtgcccatctcatgtgctagatttccaaccaggagaagcctttgtgggcagaaatgttactaacattgtcccaccatatgaccagtcaaaatacgctggaactgaagcancagtgaantatactattttgcatcttaaggtgtctaaaatgatagtcatggaacacagtgcttgtggtggtattaaagagctgctatctttcccatatgatgaaacctactctactgattttattgaggagtgggtcaaaattggcttgcctgcaaaggcaaaggtgaagacacaacatggggatgcaccttttgctgagttgtgctcacactgtgagaaggaagctgtgaatgtttcccttggaaaccttctaacatacccatttgttagagatggcttggtgaacaagacattgtcactaaaaggaggatactatgactttgttaagggatcttttgagctctggggccttcagtttggccttgcatcctctttctccgtatgaacatcaaccattatcaatgacctcatcttggttccctaagtattctcctatctaaaatgttaaagatgtggccaccattctgcattggaagctataggggccatgcttagaggtcgtgtgtatctgcaatgaagaggcctagccaccttcatcaccatatgatatttataaaaatatatatatatgaaactatgaactgcgtttatgcatgtcggaaaatcttcttttgataagagtttggaaatcctcttgtaacaaaattttcattattcaaccttgatctttatatagcccgcaacaccgagagagatgacaaattaatcttagttaattatataagcaatgctaaattgtatgaagattc

SEQ ID NO: 3242 - DNA, 2811 bp, Glycine max
  Clone ID: GLYMA-23APR03-CLUSTER1728_74
aaaagggaagaatctagtgaagaaatctacccccaagaagaagaacaacctttaatggttaaggaggagtgtaaggaggtaagcgtctcctccaagaggttagctaagaaggaaagacattttgaaataaagacaaatattaaagttatttcccttcttagacaacctccacattttctcctttgtaaaaagacacttgttagcattgccacatctcttaggcttgagtttattcctcaagtaaaggagttgttggatgagggtttggtttgcaagagcttaaatccttgtgctttgttggtgcccaaaataggtattattaggcatcaaatccctaaaataggtggtatgatgaatgttttgagtggtgcaaccctcttttgtaaaatcactcgtgcacctaacatcttcatgatttgtgtacatagggactcattgggtaggtttgttcttatttttagtttcaatacaaacttaggtactcatatgggacaccttaggtttttcatactttttggtaggaataatcaacatgaaaatacagaaaaaggtatgttttattgcattacttttcttaattttttaaatagtgatcaaggggttcccatgaaccctaaaagaataaaggtcattcctgagtggcccactccaccaagtataagaaaaatttggggcttccatgacttaacaaacttttacaaaaggtttgtcccatatttttttatacttgtagcaccactcattgagttggtgagaaaccatgttctttcatgggaagatgcccaggaaatgggttttcagaccttaccttacttcaacataccaaacaccactaatacatatgtttttgttctttttacaggtgttgagggaaggagtccagagtatgaagaacctcgggatttgaggtcaaatcctttctaaggtggagggaatgatgcaatcctaccccgcaagggcattgggtagaagactccaagtagattgggctagagatccaagggaaggccctagggttctcatgagccttagggtagatttcgagcccatgggctaagtatgagcccgcttatctttgtaaatattagaataggtatttccttcgtctgggccttgtattttggccattctagtagtatagggttttagccttgtatttcggggcattttgagtagtctttgtagtaaggacttttttttgtattttcatgtttttttgtcatggggtgttcttagctattatagggggtgtgtagctaagctctagcttctcatctcaaggaggtgagcttagctattagagaggtatgtgtagctaagctcaagcttctttaggaatcttcttaaggaagcttctcaaggaggtgagcttagttatgagaggggtgtgtgtagctaagatctagcttctcaaggaagttttctcaaagaagcttctcaaggaagttttytcaagaaagcttctcaaggaagctacctagtctataaatagaagcatgtgtaacacttattgtaactttgatgaatgagagtcttgtgagacacaactcaaagttcaacttctctccctttttcttccttcaatttcgtgctcccccctcactctttctctccctctttcttttcctccattgaagcatcctctccaagcttcttatccaaggctcatcttggtggtgaagctccttcttccatggcttattccttaatggatggcgcctcctctcacctcctttcctttgtcttccgctgcatctccatggtggaaaatcaccattaaaggaccccattgaagctcaaagatccagcctccatagaagccccacaagcaagcttccatcatgtgttattctgaaagagaagatagggagggcggtttggtttggtgcaaatggattccttagaagacagcggctgttgggattttctcgattactctttcatcgatcaagcgccccctgatttcctttggtccaataacaataatagtgtgagcaccgaaattgacattccaggtgatgctgttgcttgtcaagagaacaccaagaagaggggacgcaccgattcatgcttcaaggcgggatcaaaagcttgccgtgaaaaattgcgaagggagagactcaatgaaaggttctgtgacttgagctctgttttggagccagggagacctgtgagaacagataaaccagctatacttgatgatgctatcagagtcttgagccaacttaaaaccgaagcccaggagctcaaaaaaacaaatgaaaaattactagaggaaataaaatgtttaaaggcagagaaaaacgaactacgcgaagagaaacttgttctgaaagcagataaggaaaggattgagaagcagttgaaggccttgcccgttgcaccagcagggtttatggctccacctgtagctgctgctgctgctgcagcatatcaagcaggggtgaacaagatggccgtatatccaaactatggctacatcccaatgtggcaatatcttcctcaatctgtcagagacacatcacatgatcatgagctcaggcctccagctgcatagttgtttctattattgttgcactttggataattatttaacatttgcgaagtattgacatgtaaatattgtcatcgtttcgattatttatttttattttttacttagtataatgtgctaaaaataggttttcaagtaatctatgatggcaatgacatgaaaactctgtcgatgtacattgcaaattgcccagttcttcacttcttagtagctcgctaaattcaatactaaatttattgaaagttttattttatgag

SEQ ID NO: 3243 - DNA, 1270 bp, Glycine max
  Clone ID: GLYMA-23APR03-CLUSTER1739_2
acacactgactcactgttctgattcatatccgaaatacaattccgttattccctctctctcttttgtttcatcgatgggcgacactgttgttgctgaagtacccgcaaagaggggaaggggcagaagggccctgaaggagaaaaccccatcaacgaacgatgccaacatcatcatagccacaccaatttcgccatcatccgataaggcacaagttccctcaaagaaaaaacaagattccaagaagcagcaatctttcgagaaagaattgcttgagatgcaggaaatgttgcagcagatgcgcctcgagaaggagaagaccgaagagctcttgaagctcaaggacgaggctctcaagcagaaagacgaagagctcaaaaaccgcggccgcgagcaagagaagcttcagtccgagctcaaaaaattgcagaagttgaaggagtttaaacctaccatgaatttgcctgtgttgaaagataatgaagaaaagaaggataagaagaagaaggggtgctctgagaagaaaaggccttctccaccttacattttgtggatgaaagaccaatggaatgagatcaagaaagcgaactcagaggcagaatttaaggaaatttctaccatgctgggttctaaatggaagactgttactgcagaagagaagaagccttatgaggagatataccatgccgagaaagaagcttatttgcaaatgattgcaaaggaaaaacgtgagactgaggcaatgaggttgttggaagacgagcagaagcagaagactgccatggagttgctcgaacagtacatgcaattcaaacaagaggcagaaaaagagggcaagaagaacaagaaagagaaggatccattgaaaccgaagcaccccatgtcagcttatttcttgttcactaatgatagacgagcagctcttgttgctgagaacaagaatttcttggaggttccaaagatcacagccgaagagtggaaaaacatgacagaagaacaaaagagaccctatgaagagatggcaaagaaaaataaggagaaatatgccctagaaatggaggcttataaacagaagaaagatgaggaggctgcccatttcatgaaggaagaggaggagcatatgaaacttcaaaaacaagaagcattgcaactgctgaagaagaaggagaaaaccgaaaatataatccatgccaggagcagaaaaccgaataataattaattgaaaaggaagaaaaaaaccccttgtgcgccccggcaaagttatacccttgc

SEQ ID NO: 3244 - DNA, 1080 bp, Glycine max
  Clone ID: GLYMA-23APR03-CLUSTER173_30
attccaatcccaatcccatttcaacctctctttcttttcttctcgcagagcgaaatcccaatcccacacaaatggcatgctcagccacctctgcttctctcttctccgcaaaccccatacctctcttctctcccaaatcctccctctccctccctaacaactctctccacctcaaccctctccccacgcgcccttctctctccctcacgcgcccctcgcacactcgccgctccttcgtcgtcaaagcctcctccgtaagcttcttaaatagcgagcttccgctagttggaaacaccgcaccggatttcgaagcagaggctgtgtttgaccaggagtttatcaacgtgaaactatctgattacattgggaagaaatatgttgtgctcttcttctacccgttggacttcacttttgtttgtcccacagaaatcactgctttcagtgaccggcatgcagagttcgaggcactaaatactgagatattgggtgtttcagttgacagtgtgttctcgcaccttgcatggatccaaacagatagaaagtcaggtggccttggtgacttgaattatcctttgatttctgatgtcaccaaatccatatcgaaatcttatggtgttctcattcctgatcagggaattgcattgagaggtttgttcattattgacaaggaaggggttattcagcattctaccattaacaacttggcaattggtagaagtgttgacgagacaaagagaactctccaggccttacagtatgtgcaggagaacccagatgaagtttgccctgctgggtggaagcctggggagaagtccatgaaaccagaccctaaacttagcaaagactactttgcagcggtgtagctaggatactagatagttaagagtggctatctgcatctgtatcagtcagtgtgaattgcaaaagggtcttgtttcttaatgttttgtaagtccttaaattttgagccgcagggtatgggaatatactaataaatgcatgctggattttgaagtgtactatgtattaatttgcaatttattttgattatgatctctgtttcgtgttcatatatgagcc

SEQ ID NO: 3245 - DNA, 1065 bp, Glycine max
  Clone ID: GLYMA-23APR03-CLUSTER1741_5
aggcttcagacctttctccttcgagatctcgccccacgcgcctgtttccgcctccatcatggtcgtgagcggagggaagggcctcaaacgcgccgcgaagaagagagtcaccgccgacttctacgacttcctaacgttccccacgccggcgctcgccgagtcggagaacttcgccggcggaccgttccgctccaacgtgcgcgcctttctgacgaagcacgcgctgcttccgccaccgtcggcgctctttccgcacctgctgacgtggcagatcgtcttccgcgtcggcgaactcaccgagggccccgacgcgccggcggtgtgcctcgacgtcgtcgaggaggatgtcgccagatccagatccgtttactgcgatcagtgccgagttttcggtgagttgactcgccagtacttcagccggttctcttttttgcatgaatcgctttggttttatcgcttttttcagctttctcttcggctcccggttcccgatcatgaacttacttgaaaacatgcaaaatgaaaagaaggaatctattccctatgtggagtgtggcgacacaccaggtgttctgacatccacgacactgatcctgttccagcacgttttgtttgccagaaatgccaacactctgaatcaaaactcaaatctagtgggcactgcaaagatgagactgtgactaacgttagtggtagtagttgcttcagaaacggcttgccagtgccatctgatgttatttaattagtcagataagatgtgtatgaaaagctcctttttcttctgtttattttgctttggcctgaaagtacctgtacataacacagataggccttagaggtagtaggttcagggacggggcatgtcttgttcatatttcagcaggttctaccttcggttgtttattttgtgtatatagtctaacctgtgaagggtggagaggggaaatgtgagcatattcaactttcttttcttcagttcaaaaggagcttcttggtatatttagagcacattttaatgattatatgggtcttctgacaactcatctatttcaacatttttcttta

SEQ ID NO: 3246 - DNA, 1630 bp, Glycine max
  Clone ID: GLYMA-23APR03-CLUSTER17438_1
tcgctcccctccctccgctcccgcccggcactttatttttttttttttttttttttaattaatataatctataaactttcatctattctggttcaaacggacaggattacataaccactgaccaaatatcatcgacagagattaagattaagaagaagaaaaaaatcatctaaataggtgtcagtgttttcaatcttataaaatccagatgaattaaaacgaaaaaaaaatctatataagattgaatcagtcattgttcttacaggcacaaatcaacaaagagaacccaattttgtcctgttccttgtgcgcgtgcaaactcttctccaaccatagcctactatcgaggccactccttgtcctgaacatgaacactgcagatgaagcagaattcgaattaaaaagccaatcgtgcacgtcccacatcatatcaacgaccaaaccatcgacaaaaattgtttggttcccacgaaagttccacctcagcctcttaacctggaacattgtcttcttgtccacgcacacggacaacacgtgacccttcggctctcctcgctccgcctccgcgccgcacctaatcaatatatcgtgagaacttcccgtctgcgagaatttcgccttcgtcgcgtaagccgctgtgccggaaaacgtctcgctccgtgaaaccatcgagaaagtcgcttcctttgcgtcaaagtttggtaacaattcttccattgaggaatttttgtcgccgaggcgtaggcccagttcggagtccaccaaaacgtcgacgtaaaagccaccaaccggttctggtccttcctcgtactttgcatcggagagatcccacaagacttggacttgaaaattttgggattggaatgtttcgttgcctttgttctttctcaattgccttgcgttggatttattattagagggagaaagaaaatgttcagaattggagatggttatggtgaagccttggcccaagagtttcttggcccaagttattgtgatgaagagttgtttttgcgttttgatgagggagagtttgtacatgcaggtaacggaatctctggtggaagggttgagttctggacagagatacgcctggttcgaaggtcttgaacaatatgaatcggacactctaattgcatgttcgttgtaacaagatgctatgcttctcattataaaagggggggggcctacgtaggactcgagggggggcccggtaccgacatgaaaaaatgaaaaggatcaagacaattttgtaatggaaggagaaagaaaagaaagtaaggtcgctggttacgcttgtgcttgcatatgatggaaggaatagaaagaattagctagcaccgtctgtgagcgcccgcgcctgcctgggctgggtcgagtgcgacgctgacgtatgcctgggcgcgggcgcccgtcctcggttcttccttgtgcggttcgtcctttctcttcgctcgcgtggccgttgcgtgtttcatctgttgtctcttgtcctcctgcttgattttctacccttacgcgtgcccggctttatagcattgttctcgtctcctcctttccgccctcttttttttatgttcttttttatcttcgcgtctgtttgtacttgcacttatattttttggcccat

SEQ ID NO: 3247 - DNA, 1091 bp, Glycine max
  unsure (1)..(1091): unsure at all n locations
  Clone ID: GLYMA-23APR03-CLUSTER17460_1
ttttttttttttttttttctttttttttttttancttcccananaattaatcaaacgatnccaataccatatgcaatatcatacacattattttcatgactatataatatgcttgatagtgtaaatatatataagtaaatataatacagggacttacccccaatgttaaacttttcgtcaacttcattctaaactctcattcaaaataacaaaatacactccttgacacataaagaccaccgaagggttaaagttgacccagggatatgtccagatagtcaattgtaactagaattccaagtttgcagctgaagttatatccaaggcctagcaacagattcatgactttgaaacaatttagagatatcacatgctcctctttaattattattactgcataggcaagtttgaggaggaggtgtctccgttgggcttgataacattcctcttcttctttttcttcttataagggattcctctagccttagcctgagaatctctcacctctctaagatagactcttatggtgccacttgcaaaaggattggtctcaggaaggcctccattttcttcatatgcagctctcaatcttccaatgagtgcatcaaggctcccccaagcttgtctgagagggcaagtgcagggtcctggcggctcagtttgcccaaagaacaagcacccttgtgagtgcactttggtcttcccaaactggtccaagtagcgaaggaactcaagaacatggttggagctgcactgagaaagtgccactggaggcctttggttcctcaggtactgtccaaaagtgttccaatcccttctcttctgagactcatagcgactcagtggtaactgttgttgttgttgctgctgctgctgattgtggtgatgatgatgatcgtcacctccatgagaggatcttgttgctgttgttgttgttgatgatccttctgctatctcctttcccttgctggacatgtttgctgctactgacaaatcatttagtatttcttttttgtgaagtgtgaaagggaaattttggtggggaaggaagagaaagacaaatagaccggggggggggcctacgtagctga

SEQ ID NO: 3248 - DNA, 1204 bp, Glycine max
  Clone ID: GLYMA-23APR03-CLUSTER17548_1
ttttttttttttttttttataaacttcattttgccaccactgcaatgcaactgatatccaaacatgcactaatcatttcacgtttaattttcacgtgacactatatgagaaaacattgtccctttataagtttgaaactgctttccttgacaacgtcctatatcagctccatacacaatattgaaaaaaaatgtaggaataaatagtgtatttcacgataccaccttatatgttatatgttttacactgacactcccatgttgtgaacatttaaacaaggagggatatcacttgcttattcactatgtcacttgcacaagcatcattgcaaatatcagaggagatcaattttgccactctctacaagtgcctttattgatttgtaacatatgaagtggaggacacctggctccatctcaaacagcttcgacctgtcatcaacaggtccatcttcgagttgaatgcccgtgagatactctttacttctacacaaaacaaatgtgtctagttgtggttctgggaccatgtcatcctcttcactcattgaagattgcctcagaacagacttataatctttaggcaacttcgacagaacactctcatccagatgttgctctaggtcattttcacacattttggcaaaatctttctcgtatttagatagcctgttcctaagttcttcagttttttggatgtggaacacgtacttttcaatcttctggatgcgaatcctgagataggatcttaacaaaaagagagttctatccaagtccatctgatatagagacaccgaaagaggatcagtaccgccactggatttttcctccacaatttcttccatgagttgaatgactttgttgacgcgggaaaccaatttagattcgtagcggagaatctctggggccgccttctcgttgcgccacgctctcttcagaagctccacgtcggtggttgcaatcaaggtttcgtaatcatcgtccattgatactccttccgccgcagagctcgaagccattgattcacaacaacggagtgatgtttctcttttcagatttgttgctgagagaaagggttttgtttttctttttgcttccaacaatcaattggcgccaaagagagacttcgcatggcgggagagactgggtcaacgaaatcaagttttgttaagatacacagtaatcggggggggggcctacgtagctga

SEQ ID NO: 3249 - DNA, 1093 bp, Glycine max
  Clone ID: GLYMA-23APR03-CLUSTER175919_1
ttaggaccgtatccatctcctcgacccttctagaacccctctctacacacttcctcatttctctactaatcccaccccaaacggcactgtttcacctcttgctcgctgcaccgccagagccaccacttctcttcttcgccaatcacgttccaacgagtggaaataggcaaacacaagatgtacctattcttaaggattgttcaatttgcattccttgtaggtagttttggatgcttattggacccaatgggtgtggaaaatctaccctcttgaagaagataagaaagcttttggaatgactcacagtcaaaagaggcaacattgcttgaagcagagaatatttcatgtggaaatagacaaacacatgatgtaccggttcttaaggattgttcgatttgcattccttgcgggtagttttggatgcttattggacccaatgggtgtggaaaatctactctcttgaagaagaagataagaaagcttttggaatgactcacattcaaaagaggcaacattgcttgaagcaaagaagatttcattgtaaatctgaagtgaatttcattgtctttttttttaatggtaaacccgatatgatatggtaagttcattcccttttgtcatttttatggttttatttgtgatgtttccttgcactttgaaatttcaagaagaagagtttcttctatttttttattgttctatttttttttttttttgagattttgcattcttttgttctcactttgggtattgttaggttttcagattctgacaaggataggattctggcttcaatattcacaaaattgattcttactcaatttttgctgctcaagattttgcatttttttattcttacttttgtaaaatcaatagcttattcttcacttttgtaaaatgcccacgcgtccgaagggaatgatggattttgatttttagaatcaaaattttgattagtatatgcccgaggtaaggatgtaaggaatggaaaatatagttggacattttctcgaacagattacgttcaagctttagattttgattgttttgatttttcagtggaaatagacaaacacaggatgtactggttctt

SEQ ID NO: 3250 - DNA, 1201 bp, Glycine max
  Clone ID: GLYMA-23APR03-CLUSTER17663_1
cggtggtgccgcctccctgtgttggttactcagcgtcccgggatttgtagcatttgttctaccctctgctggcccctacacccccctgaatcaaagcagctgttacctttcacctctaaacgcacatcaatgcatgcaggtcatcgctgtttgattccaaaaaagagagaatattctaaaactataatttttatcttcagcagccatttaattttacaaattagtacataaatccaaccttagaagatggacacatctgggggtggtccatatacactcatccaagaaagtggaactcgccatttgccaccttcaattccagtagtagggtgactcagctggagaagtttacatactgcatcgcctaactgaaaagcatccgatatgttgtccccttctgagcaataacataacaagcaggtgaccttcaaacctttagccttgagaaaagaaaaaagtgcagcaaaaggcaagctagcataataattttcttcttctagctcatcttctaccgaagtaatatcttccacagttacatttccttcagctaaatcactaagatatttccaatgcatttgagaagggtcatactcttgaagtttcttccacccaagctgttcacaattttcatctgttccattgctgttggaactagaaaggtaataaatctgcaaaccacttgacatgtcaactttttgccattttccaaaatctaagctggagagaacaacaatatgcttctttccactaccagcaagaaaatcagccatattttttgcaaactcaatcatcatacccttaaccaccggtgatctctgttggatgatagtgagagcattagaaggggaatcataagcttcaagaggaagagccaggtctccttgaggaaagggtccataagcatcattgccaacacagggcaaaacgttaggatcatccaaatacccaactctctcagaacccattgatgaaatcaaaagatctgcaactagctgccccacattgccaatcgacagagcaggcaaaatcaaagtggagcaatcctcgtgaaggtgcttgccttcttcaggaacgaactccattttctaagctaatgctgaaatttgttactttgtcacacacgaagaagcttcagctctttctgcctttgctattcttttcagctgttttcgtctggcggctcctccctgcccgacctcga

SEQ ID NO: 3251 - DNA, 1331 bp, Glycine max
  Clone ID: GLYMA-23APR03-CLUSTER176778_1
ttttttttttttttttttctgtaaattctgcttctggctgtctctcttcttgactactgtcatcaattgcttcatttccgactgatgttgtgttgggtattgtttgcagggctttatcttcaggcatgtctttggtttctgactttggtatatccacatcagttgattgtttggcatctgttgcttcctctgctataatttctcttgcatccttgttttgtaaattgtttgccgagcatgattctactgtcttctgttcatcattgtcagcatcatcgcttaattttgtgatgctttgtgatgtgacaggtccttctgcggtgatataatttgtaatgacactctgcaggcttgactcttctgattggtggtctgctttttcttcttgtgctatgctgacattgtccttggtttcaggttgttcaggttcctcagcaacagtgtactctctgtcatgttcaatttcaggtatgcagcccttgccattaacaatcgctttggattcatcattatgcagtgattgttgctgtgaaatttgatcagtatcaacttggacaaaggcaggagtgggtaatgttgtcttgacttcttcattcagtaactgtatttttgttgcttcttgttgatcaaaattgccaccatcctctattccttgttgcaatgttgtcttgtcagtgtcaatcactactgtttcatcatttttatatgtttgttgctgtgagatttcctcagtttcacctttgacaatttcagaagtgggcactgttgactggacattatcctcaggtggactgtctgttgcagtttttaataactgcatttcggttgcttcttctgtctcttttgctttcttttgtttgtatttcccatcatcctcattctctatctcttctcgagtgtgtgacactggaaccttttcttgttctttggtgtcattagttgggtttatttctgtagtctctccttccaaatttggatgctttatatttgtgttctcctggttcttcacttcaatcagggtttcagctggctgcacattttctacacttgtttggtctgtcacttggtgttgaccaaatgccatagcagatgcatcttctggagaattggtttcagcttccatgttgcacgcgtgacctactcggtagagggtgaaattgcataaagaatattggtgaattcaacaagaaataaatatcttgtgtagttttgcttcaattttcgtgtcctaaatcttagatagctagctcaattctgtaagctctgccagagctttgtgaaatctaatcaaaactaagccttagtgtatgggggggggcctacgtagctga

SEQ ID NO: 3252 - DNA, 853 bp, Glycine max
  Clone ID: GLYMA-23APR03-CLUSTER17728_1
ttctttgtttctcggtgggcgctcctttggcccgggtccttgctgctccgttttttcataaattaattaacaatatatattacagggccatggctcctatcataatatagctgcacaaataatttaacaccccggctttatgatggaattgcctataacttactgcatacatatacagcatcagctcaatttttgcgttctttcttgagagctagttagtatgtccattcctttggaagaaatatctcaggagaagaactttgactctcatgagaaacaacaacactgcattgcttgagagcatctttctgattcgttttcttttttgttgactcactggtgcatacttctccgcttctcgggctatatttgggagcttgagaaggtgaaatctgcaggcctaattggtgcactttaagatttggagcttgaactactcgagctggaagaaggacaggagcgcacgctggtttcctgattgattttgtgcctgctttttggggtaagaacacgccagtaccacatgatccttgccccgaaactaagaaaacagcttgcattccaggtccaccagtggcatgtttcggcctttgatcatatgaagatcttgtagaaaattttgagcagtactgtgactgtgtttcccttggatatctgtagtgttgcagcagtttttggtggcggttcctcatatgtatcttggagtcacatgcctcgtccataacatgagaaggtagccagaaaatgccttcttcaaaaccaagttcatgagcagcaatatcatgaacagaagccatgagcggaacacaaaagattacaaaactaatattgatggattgtgatgaatcgttct

SEQ ID NO: 3253 - DNA, 2305 bp, Glycine max
  Clone ID: GLYMA-23APR03-CLUSTER17729_1
ctccttccttactctccaaaaaccatcttttttttttttttttttaaataagctgcaccattcactaaaaatgtacaagagatactaggccattctcgtgaatgcggatcaaataattgtaggcatcatcaaacagggttgaataagatttctgacaagatatgcacaaaatgagaacaatgaagcacctcatcaacataggctcatctttcaattttcctttaacccgaaggtggtcagtgcaagaacggaaccagaatcacatatatatttccacagctattgacattatcttgaaggagggacgacaagggagaaaaggcacaccaagtgttaactcatcaattttctgagtcttttctcagctagactagcatccttgttctgtggctctagaacaagagcatgcttgaaatcttcaagtgcctcttcataacatagtagtgattctctagcagttccacgtctcagatatgccttcacattcttcttatcaagcaatattgccttaccgcagtcttctgcagcttgctgaaagcatcctaactttaagtgagcagctgctcggttgcagtaataagttgtattcgttccattcaatttgatagcctcggagtagtaactgagtgccttactccactgcctttctttgaatgctgcatttcccttctcttttaaaagttcagaagtttccctgttgccattgatattaggtaatggcaaagaataggaaccaacactaacttgctcttgaagagttgaataaatatccaagatcgtgtctagaagaaatttatcagctccatgaaatgagatgaatgagacagaaagagaacaatcatcatgatatcctaatggaattgtaacctgacaacatccagatacactagcaatgctcgataatgcaaatgttctgtcatggaactcagaggaaaaacctttctttgtattaagctttagttgactgcctgctacagtaggaataacaagtattccatcatcctttaatagactttgaaaagcacctcgcatctcagtcctgactttatacaaagcttttatattatcatatgtagtattaatggctgcaataacatgatcagacacaccacaacctaacttatatttgagtgatttaacccattcttcatgattggttttaaattcatacccttgtaatgaaagcataactgaagaaagagttttcaatatagatatttcattttgttggtgggttgattgctgatgaagccttagactgggcaccctagaatcaatatactgacaaagattcaaatgctttggagcctgatacccggacatattctcaatagctttaccaataacatatattgtattctgtgtaggaattttagataactgaaagagatcgtctgcaaatatgaaatgtctggaccttttggtctccactgaattcaattgaagtaaaacatgtccaacacgatgcaggatagatggatcgcgagcaaaccatccaatagtgtctaagctttgtgcatttggaagaactccaatggtagatacagccccatgggatggacgaaaaccaaaaataccacagaatgatgctggaattctcacacatcctgtagtatcagtaccaacggcaaagtcaacaagccccgcagcaactgccactgctgaaccacaagaagaccctcccagtttacatgatggcatctgaggatgagttggagttccataatacttgttctcaccagaaatcccaaaagagaattcatccacaacagtcttgccaacacaagtagccccactcatgagcagagcagtcaccacaactgcagtcttctccgctgccttgtgtgtactcttccaggtagaatttccaaaccctgtcacgtagtctttcacatcaaatgtgtcgtttatggcaaaggttagagcagagagcgattgcttggcagcaggaggaggaggctgagggaagggaagtagctcaaaacgctcaacaaaagcaccaaagtcttgtttgtgtgtctttccccgccgtgttctccgccgtgtctccaccagaaccacgattccggcaactcctattccaatgaccaaccagagtttggggttggaggcgtgttccttgattagcttcagtgattgggacatggttaagcagagaaacagagtgctaaaaggggtttagaacagtgtgggttttgggagggttttactgttagaataggtggtggtgggtgcatagctgagaaaagaagaacagaatacagaactctcaagaagaagtggggtcccgagcggacgcagctga

SEQ ID NO: 3254 - DNA, 1597 bp, Glycine max
  Clone ID: GLYMA-23APR03-CLUSTER17747_2
aattttaccgaactaaattttcttcttaaaatttggggaattgaatttgttcaccacatctgctccttggaagcacagggcactcaatgagatttgacccagaagtgtccacgcacatgtacacttggtaaagttgactattacgagctgaatctctattgcactctatccctggggtaaacccagtgcctttttttatagcttctgtaaccctttctagggtgtaaatttcatcatctggctcaatccctgcattcttgaggatccgaaggaggttaactttttgcttcagtttgagagttgtttcaaagtactcacgctgatcaagctcagattctgcacaagtaccatgtttttcccattcgtgtgaccagaacctcatgccattgctacttgggcagctcagggatggccaatccttctccatgttgctaatgaggtctgagatctacaccaattattaaattcaaatgcatactcgttttaaaaattagtgatatgattatataaggttattgattaggtatcttcttcttcttccttcccttttatttcttttatttttttttaaaaaaatgagcttagcttattttaatttaattttactcttttgcgagatctagatccatactttttagctgattcaacatcatgtatatcaagaaaattgatgaaatgcctaggtattaaatttccatcacactaattaaagttggttaccaaaataaatgtctcagagcaacagaaattaagctatttacttatggagggccatgacatggtttgcctacttatattaacttttgtctcttccaacaccaatatttttcagattgtttaaggccaaacacagcattgctctggatatcatgaatatatcatattagatgatcaagattactatgcacagagtcagtcctaaaccctcctttaataatccgtctagttattatgatctatgttttttattactacaatttttagtccatcataaacttctgtacactaaaagcattcttaatcaatcaattgcatttgtgctggttaccaaatcctaattacttgaaaacccttcattggctcatagtttaagtgtaaataatttatacctcgacttctgaaagagaaattattaaatggggggggggcctacgtagctgagatttatcaaagacactgtcagggtcacagtttgagggccatgatccatcattgtagttaggccaaagtccatgaatgatgaaatctgctgaaggtttcccagtcttgggataacagcagctatgctttgtgtcacagtatgctcctggccactgctgaacaaagtagaagaaatcaaattcctgagaaatggatagatctgctagatattgcagtatcaaaagcttaaacaaaaatgaaaagttgggtttcatctttgatgcttttccttctatctctctgtttctctcttaatttggcgcttcacacaagcaaaaggaattaatgaatgatgttgatataaacttataaagtgatcttttttatagccccgtaagtcaatgaaatgatgcgtgagcttgtaaggcatgctatggaatatgcgaatcctcgagcc

SEQ ID NO: 3255 - DNA, 1938 bp, Glycine max
  Clone ID: GLYMA-23APR03-CLUSTER17941_1
tacttcctgagggtagatttaccagtgccgcggcactcatggatataactccctctcttacattctcaaattgatttttaaaaacaccaaggtgtttttagagttaaatctcacaagtccactttattgttggaacatcaaagttactataaaataggcattctgctttctttaaaatataagaaactaacactagaccaagatcagctgccccttattccatctaagatgaaatcttcactccatacaccatggttgaagaaataagtttacttagggatgaagtgcccaaaacgaactttgagagcaacctcaacgttaaagtattgtattcgtcatctaatatggatagtagacgactgaaaaagccagatccagctcgtccttgaaactatccttaaccatccttatccatccttataatacatacgaaagaatatgagccaattctggaactttggttcaagcagggtccgcaactagacccctaaaaacctatttaccatcaatttctatccttgaatccaacgcccacgttacacgataaaaaatacacacaacactacaaaaatttggctttctaatcaccttaagatacaacaattggaccatgatgagtggcttatttttccaactcagctgaatattttagtctttacaacatggttgaagaatagacatacttgggatgcagtcaactgaaagagctgaccgtgcaacctccctgatcaagtattgtgttggccatttaatgtggtggattgttaacgactgaaaaagccaggtccggctcgagaaagaagctcctctccagcatccttacccatctttatcatatcttcgaaagcatatgggccaattctggaagtttcaagcacacggattccatcaggggatgcaactaatcctctaaacaagcaattgccatcctcatttctgctagcatagcctgcaataggagtgcggcaagacccttccaacttttcaaggaaggctctttcacaggaaactgctagtcttgtttcttcatgattcagtgaagcaaggtattccgccattttatcatcattacttctacaggctattccaattgcaccttgggcaacagctggaagcatgtcatcaattgataggatcgaagtcacattttccgtcatatttaaacgtttgcgtcctgctaatgcccatagtgtgatgccatgagtttgtttatggtgtcatatgctcgtggtttagatagtggacttccaattgtaccacttcttatgagatggatatctgtgcagtatctgtgactttcgtatgagtgaagcagtaccaacaatacttcctgagggtagatcagccagtgaagctgcactcaaggatataaatgcatctcttacatcctcacgtggaaggttgcatggtagaattgttttatcaggtaagtacgtaggaacatctttcattgagtggacagcgatgtcaatgtcaccgtttatgagtgcctcatctatttcttttgtgaataggcccttcccaccaatgtctgcaagtggctgtgatagtattttgtcaccagttgtttttattattacaatctgaatagccccttcttctgctagctctgcatgtgatgccatgagcttgtctctggtctcatatgcctgagccagagctagtggacttcctctggtaccaattctgaggagagcaaccttagtctgggaagtttgttgctcaacggcaatggaagccctgatgccacatttggagaaagctgaagttctgattctgaaagatgggaacaccaatgcagagcagagggtctccatttcacaacttgaattgccttgccgcgccgatgatagatagataagatttcatctcccaaagtcccaagattaaaagatataattatgtgatttatgatcagtatatgctgtgaggagtgtt

SEQ ID NO: 3256 - DNA, 1836 bp, Glycine max
  Clone ID: GLYMA-23APR03-CLUSTER1802_1
cagctacgtaggcccccccccccatttgggtcgtctcttgatcattccgtcccttgaaaaaaagaccctctttaatttctgtctttcatttctcccacctatctgattatatatattaatattaacttgcttagatatatttttacatataattgacgttgatgaatttggtgcatgtgtgcatctcggcagaaacaaaactcatcatcaggaatgaggcctccaactctcaacattttcccctctaagcctatgcatgtagagccatcatcatccaaggccaaggctaacatagagctagtttctccacaaacaagtggatcaaagaggccatcagagccgtcgatggagttggccaaccctcgaaacgaaactgcttctgcccctcagccacccaaacctgtcaagcgagagagcaaccgcaaaggtccaacgtcaagttctgaacatgaaggacctaaaacaccagatcctaagacactcagaagacttgctcagaatagagaggcagctaggaaaagcaggcttaggaaaaaggcatatgttcaacaactagagtcgagtaggattaggctgaatcagctggaacaagagctacaacgtgctagaactcagggcatgttcttgggtggaggcgcacttttgggtggagagcaaggccttcctgtcactatgaatactattagcacggaggctgcaatgtttgacgtagaatatgctagatggcaagaggagcaccaccgcatagtgtgtgagctaagagctgcagtgcaagagcaccttcctgaaaacgagcttagactgtttgtggacaattgtttggcgcattatgatcaagtgatgaacctcaagagcttagtggccaaaacagatgtgttccatcttgtttctggcacgtggaagaccccagctgaacgttgcttcatgtggatcggtggtttcaggccatctgaactcatcaagattattgtgcgtcaaattgagcctctcacggagcaacaaatattgggcatatgtggattgcaacaatctacacaagaagcagaagaggctctctcccaagggctcgaggctcttaatcaatctctctcagacactataacatcagattctcttagttatcctcccaatatggctaactatatgggacagatggctgtagccatgaacaagctctccactcttgaaggtttcgtgagacaggctgataatcagaggcaccaaaccattcaccgtctgcaccagatcctaacaacgcgtcaagcagcaaggtgttttctggccatagctgagtacttccatcgtcttcgagccctcagttctttgtggctggcacgccctcgccaagaataggctcagtactccctagctctagctagctatatatgcatgcccttaacttatatatatagcttcttaatttctctttaattataaattaaatgttatatctctcttcatcactcctctctcccactgcatcatgggctgtatagatacagtgatatatagacagatcattaatatagaatttaatgttaacaactacagctctcccttcctggttcttttctgcaattttttgaaggtttatatataggaagccatttttgtgatagaagaactatgagggagaattaatggagagaggttgggttaatttaataaatatttaaagaaaattggtttaatttgtttggttttttttctttttatcaatacattttgattttgtgggggaaattatgttcctccgaggtaaagagagtaagacaacgtttttagtttcaagaggcaaaatggaagcttgtgtttaactcaatcgtccatttggcc

SEQ ID NO: 3257 - DNA, 1355 bp, Glycine max
  unsure (1)..(1355): unsure at all n locations
  Clone ID: GLYMA-23APR03-CLUSTER18037_2
ccctnaactccaaattntatactgatctcaatgatgcctacccataatacaaccagattntgttntaacagngctcacacatacagcactaactaactgatactactaattcccctctttatccttagtcacactcccacacctctattccctttggacttacgagaatacacaagtgagggctcattccatttcgatttgggcttggaccccgtgataatattcctatcagtctcccaaataacagaaaccatagaacatttttaaaataaagcaacagtgtttagaaagttcacaaattcaagccatagattttttcttctcttcctcaagtcgctgcaactcagccagtctttctgcccactctctttcccttgcaactgcagccattttacgttctaccctctgaatatttttcttccgattagcctcttgcagctgagccttccttttcttcttttcagccaatataaaggcacggcgttgcctcatgcgtttcttctcatttctccttttgacactcccttcattaggcttatttggaagtatgggttggcacggtgtatattgaacccaagcataaggcccagagggtctcaagctggctctctttcgacgaggtttttcagagggtcgtctcttggggaagcgagtgtctgtcaagctgtggaattgattccaaaggggatgaagccattgaggaggtttgcagggagatggaaaagcaggacaaaatggtgccatcgaagcattgatggagattcgaggcattaaagctcttgatgatgcaactgagagagggcgaacaatgttccttagggctcctgcaaatcccattctctctgccttgagaaaagaagagttttttccaaaccagtatttggtcgccaacgatatacagacggggcgttgcttcatgcgtttcttctcatttctccttttgacactcccttcattaggcttgtttggaagtatcggttggccaggtgtatattgaacccaagcataaggcccagagggtctcaagctggccctctttcgacgaggtctttcagaggggcgtctcttggggaagcgagtgtctgtcaagctgtggaagtgactccaaaggggaagaagccgttgaggaggtttgcagggagatggcagagcaaaacaaattggagccatcgaagcattggtggagattcgaggcaataaagctcttgatgatgcgactgagagagagcgaacaatgttcctaagggctccagcagatcccatttctctcttgtggtttacggtccgcggatcagttacagttacagcttggggcaagaatcagagtgaagaaatgagttggacggacgcgtggg

SEQ ID NO: 3258 - DNA, 1426 bp, Glycine max
  Clone ID: GLYMA-23APR03-CLUSTER1803_5
cccacgcgtccggatctaactcgtcacagacagatttccccacaatttcttcttaacgattgtaacctgattgcggggaaaaagattgccctttattgattttttttgtcaaataaaattgtgtataaaaccatctgtgatctgggttcttttgcgtattttagtttttaaagggaaattgaggattttggtactgattactgtggaacatggtggtttttcgatctgggttcttttaaaaatgggttcttttgcgcattttgttactttttgcaaggaaaattgagggttttggtactgattactttggaacatggtggtttttgttgatgggcagctttttgctggttttgaggcattgcattaaattggattttgattattcatggctgaacaagcattggaaggtagccaacctgtggatttaacaaagcacccttctggaattgtgcctacccttcaaaatattgtgtcaacggtcagtttggactgtaagttggagcttaaatcaattgcacttcaagctcgtaatgcagaatacaatcccaagcgttttgctgctgttattatgaggatcagggaaccaaaaactactgcactcatttttgcatctggcaagatggtctgtactggagctaagagcgagcaacagtctaaattggcggcaaggaagtatgctagaattatccaaaagcttggtttcccagctaaatttaaggattttaagattcagaatattgttggctcttgtgatgtaaagttccccattcgactggagggtcttgcctattcccatggtgctttctcaagttatgaaccagagttgtttcctggactaatctatcgcatgaagcaacccaagatagtcttgcttatatttgtctctggaaaaattgttctgacgggagccaaggttagagatgagacttacacagcctttgagaacatatatccagtgcttactgagttcaggaaaaaccaacaatgattactgtcaagagagcaggagcaaggtttcctggtagagaagattgcggaacaccggcttgaattgattgaactgtaaatatgaagacaagagatatctgtaatctggattgagttttaataagacatccctttttgttcttgtctttttctctctttaaaaaaaaaaaggatcctgctttagtaaagtggaaggaaaaaaaactgtgtattgaatttgacactgaaaaaaaaagagatttagaagaggcagaatagaaaagaaaaagtgagaaattctaagcttgtttaggtatggttaactcaagtaagcaagatctctcaccattagtgcgatgcaaatcattaatatctttcagtgtcactggaaaaattatgtgtggttcatttcaactttgagcaacttcgtttttattgctaatataaagttttaaagttc

SEQ ID NO: 3259 - DNA, 1251 bp, Glycine max
  unsure (1)..(1251): unsure at all n locations
  Clone ID: GLYMA-23APR03-CLUSTER1803_8
ttttttnctcagatggagtctctggtgaaataaaccattgtggtagctggttttgaaactattattcctgtttttggagtagagctcttaaatcatttgggtggatggttttaactctttacatgtgtttaatatccatcctcaaattattttctccagttagtgttgtgcagttcattctgaaaaatttacattattttttaaattttctattttccacctttcagtatgctcgtattatccaaaagcttggcttcccagccaaatttaaggatttcaaaattcagaacattgtcggctcttgtgatgtcaagttccccatacggctggagggtcttgcatattcccatggtgctttctcaagttatgaaccagagctgtttccagggctaatctaccgcatgaagcaacccaagatagtcttgcttatatttgtctctggaaaaattgttctgacaggagccaaggtgagagatgagacttacactgcctttgagaacatatatcccgtgcttactgagttcaggaaaaaccaacaatggtatggaggtggctctgcttcttttgctataggatatacatgttgtaatccctgggctaggaatataatgaatcaatatcattgtctctattatttttttttctttgttcagctatcagaatataattgtgtcagatgtagggctgaggttttcctaattgaaatgacgaaattctttacgcagtttcttttctgggtcatatatttgtataagttctgaaatctgaataatgtaaaatgcgatttaactacaaaagtaaactgaaactttagtttggaggcactcagtgtgactagtagtgtgtcatgaagtttatcttgttagttctgatgtctttggaatatttgctattaatggcacagattactactgtcaagagagcaggagcaaggcttgattgaactgtaaatatgaagaccagagatagaaatatctgtaatctggattgagttttaataagacacctgtgtttgttctgtctttttctctcttttaagaaaagggatcctgctttagtaaagtggaagaaaaaaaaaaaccgtgtattgaatttgactgtagaaaaagagatttataagaggcagaatgaaaagaaaaagtggaagcctgtgcaaatcatgaataactttcactgaagtggaaactatttgtggttcatttcaactatgagtaactttgttttttggctaatcaaacactacatttgata

SEQ ID NO: 3260 - DNA, 2128 bp, Glycine max
  Clone ID: GLYMA-23APR03-CLUSTER18074_2
ccgcccctttaggattgtttggtttcctggggtgctttttactttttttttttttttttttttattgtcgaaaagttgcaaaacgtgagacgatgataaaatttgtactaaattacatttttaaacttgcaaattgtactatatttatttagatatacccccttccccccaaaaaaactgagagaaaaaggtcttcttcactattttattaattaatacgagagggaaaaatcttaaatacagcgcatgagaattgatatttattgtcgaaaagttgcaaaacgtgagacgatgataaaatttgtactaaattacatttttaaacttgcaaattgtactatatttatttagatatacccccttccccccaaaaaaactgagagaaaaaggtcttcttcactattttattaattaatacgagagggaaaaatgcttccatatatgtagcttttagtaatgtacagcagcaatttcctctcacttccaactgcagtctttcaagtcttaagataggttggtataggtacaccagactgttctgtcaactttttataagcagcttgcaaccttctagtgactggtcctacttctccattgccaattatgcgaccatcaaccttcactacggggcttagttctcccattgttccagtcgtccatacctcatctgcagtatgcacttctgacaagctgattcggcgctcctctaagattaattgttctttcaccacaagatccattacagttgcacgagtaatgccaggaagacagtaatcagcatgaggggtcaaaacacggccctttttaacaacaaaaatgttagttgcattggtttctgataaataaccatcttggtcgagcatgattgcatcatctgcttttgcattattgccttcaatctttgcaagtatgttattgagaaggttattgtgatgaatcttcgaatccaaattatttggtgaattacggcgtgttgtagcagttacaagaactataccacgtgtattatcatatactgggggcttccattcagcaagcacaattaatgtacacccataaagattgaaagctggactcatcccagaagaaaccttttttcctcgtgttagagaaagccggatgtgtgaattgtcaaacatgccattcctaattagagttctgaaaattgcttccttaatctcatcttgagtaggaacattttcaaaagctaaagcttttgctgaatcaaataacctgtctagatgctcctcaagcttaaatatctttccattatatactcgaagtccttcccaaactgagtcacctccttggacaacagaatcaaacacagaaacctttgcactatcacgtgtcacaatctcatcaccaacccaagcaagcaatttctcgtttgcaggaacaggaagatcaggattaggtaaaggagggctcagaagagatgactttttcttcacatggcgtcgtagcatattatacaggggtagactttgctccaacaaatcataaagagaaaaaggaaatggctggggatactttcttggtttctcaaaaccagtagatttatgtacagacttataccaccagaggggcccacaagccatctattggctttggacctaatatatcaagaatttctatcagaatgaagtgctttcctttcttcatcagatcatctgtcaaaccttgtaaccgttgctttgatatatgcttacagaatctatatttcttctttcctggagcaaaaattatgtcattagtgaccttatctccatcagcttccattttggagagtagctcctccctgtagggtctatcaagaccagttactctaaggaaatttgcatagaggggctcatcaagcacttctatgtcatccctctgagaaaaagaatacatgagactagtactgagggatcttggagcagaccaagaatgaatcacctccacttcactctccgccatctctcactcactcactgagttcaccacgctaagctctgattcagtttgatttctagaatatggaatcgattgggattgccacttttcaaagtgagaatcccaataaaacagaatataaaaagaagggtcaaaatctcaaaacaggaaccaacaaatccctcgagcc

SEQ ID NO: 3261 - DNA, 817 bp, Glycine max
  unsure (1)..(817): unsure at all n locations
  Clone ID: GLYMA-23APR03-CLUSTER18120_1
cgggtttagaaatccgcgaacatatagctcgatcatctgtcacggctcttgcggacctaacaaaaattcggaaggactacgggtccgatgtaggggctggaatcctgcttattctccatatgtcctgcaccaccttacaagaggttagtttcattgtcttttttttttttttggtttttttttttttttactatatcgaaatttttttaattattttttaaaaatggaaaaacatatatataaatcatcaatcacaatatattattacataacaaaaattgaaaaagaatacgggtccaatgtaaaggataaaatccttcttattctccctaagtcctaaaacaaataacaataagtatattaaatactgtataatctctctccggtatacctataagtatagataccaaagctcataatcaccactctgtatataaaacgaatcaattttgtacaaacccaacgaaattaacgaattcaatgcttcaagatagccatcaatgacagcacaaccgaagctccgatcatggcgacggagctcgaaacggatcccgccgctccggcatcgggactcggagccggggagaggtcttgagcattggcggcggcgaagaagagagcgacgacggcgagaatgaaggcaaagaaggttcttgctggtgatgccatggcgatgaagctaaagaggaagagagagaaaaaattggaagagttcttagagaaagataataaattgtaagaattaaggagtatagattgatcgcggcggggcgcagcggtacggacgcgtgggcgggcgcggtatcacgagcnncac

SEQ ID NO: 3262 - DNA, 1195 bp, Glycine max
  Clone ID: GLYMA-23APR03-CLUSTER18158_1
tgttttctttgtctttttcgctatgtagtaactagtaagataaatttgatggttgactacaatactgatcaatctttacatgtcgtatcactgcaatttaactaaaagatgctcaaaatgttcacactgtttttaagaaatcaactgtttttggactggagatgggaggagggggtccaactcccaagagtgagtcttacaaacccaagattttgtcattactggaaaattatcatcgaacttaactacttaagtccttctttagtaaagaaaattctatttacaacatcaacaggtaaagcatacgctggatctaccggtttcagccctggatattcaagaagtgaaagtccagccaccccgaagaatgtatgaaagacatccacggcatcatctggcctgtctgaaattccaccgttttctgtgtcctggcagtctaagatgaactttataagcttctccttactgatccaatgaaccctatcaatcatgatcaggatcaggaagtttctcaggacgcccattcagacctccagatttaacctgacgctcgcataaccaccaaccaagtaggtctttgtcaacaagatctagtgaccctgttatggcaagggcccccacacaacagaaaactgacaacaggaaaagcaaatatattagaaggatgaatcaagtccactacccatttgaaattcagaaaatagaaaaatcaaacagacaaattcagtcttaacatgagtaaattttgaccgcaaaagaacaaaaggaaagtacaccatttctatcaggaaaactaccaagtaattggataatgtaagtaagtactaggttacatagctactgatagggtgaacttctatacttagctaattctactgctactgctataagaatatactgataaactttttccttgctttatttcattcattcatggtatttataagggctgatacacttgatagagggggtaacaagaatataacagaatggaaatatcattaacagaatttgtgaaattatcctattagctataacaaactcctgacaagataatagcaaggcaaagctggtctgattctgttgctgatatcagacgtagtcttgaaggtaagtgggtggcttctgcactcttctgggcctagggggggggggggcctacgtagctgaggtattgctatcagctacactgtgc

SEQ ID NO: 3263 - DNA, 868 bp, Glycine max
  unsure (1)..(868): unsure at all n locations
  Clone ID: GLYMA-23APR03-CLUSTER18190_2
ggatatcatgcaagaacccaaacatcactgtcctcaaaccatacaccaaggtgatctatgcaggcatacaggcaatttctaactaccaccatatgaaaagcattgctcggatgccanaaaacttgtcattcctcanacatagtaaatcttcatttgtgtgtaaaaagcaaatacaaaggctatgagctgtaacacaatcccttacaagcatatgaaagacaatctttatattatgtactaatcanaatagagaaatgtgaaaacggtcagatatcaatttatcggcccaaaaatgtgacacgatccttttgtactgcctgtgttaggttgatatcgaagagctcacaacgtataggcatctccatctcatanaacggattcttcaaaacgtagtccgtgtacaattcatagacaaatttcaataaactttccatgtgttgngctccaggctccgagaccgcaaaaaattttgtcccanncagtgattgaaagcaatgaagatcaaatgtatctgcttggagaagttcaattcctaaacaacctgaaacaggtgataactgctgagagatagcgtgcattgagtgccataaactcgccacccgcaagctatcattggtatccattcgtccagcagacccataatccttaatagatctatgaaatcgatgaccgtaagccactgtgagtttcttctttcagatgcaaagggaattaaacggagatcaaagggttgcggtattttcagggagatcggaggaaagggacgacacgtgcaagcgtgcgtgcgttagaaagaaggtgtcggtagctttcagatggcacctacaagatggccattgctattgccactaccaaaattggtattttt

SEQ ID NO: 3264 - DNA, 864 bp, Glycine max
  Clone ID: GLYMA-23APR03-CLUSTER18196_1
ttttttatttcttatgatttattttatactattttctaatgattgtgtgaaaatcacgaaacttcttcagataaatatatacaaaattacaagtcctcgtcactttcgttactgtacgaaacaaggccagttagggcaacaacttgggacttatcagcttcaccattcaatggctgtactgtttccaacgacttactcttatcattcacaggagtgtttcctgcctttgaaatttcctcagcatttccttgatccaccttggcttttttagcttgaggcttgacttttataatcatgcctaatgggccagaggctggattcttctttccagcagacttctgttcctggacgacaggtaatggagttttttcctttacttcatgcacgatgttggactgtgcttccaccgctgcttgaaagcttcggatttgttgggcttcctcatctgccacttgtcgttcatattcccttcttgttgtttcataagtatcaagaaactcagtctcatcttcgtctaaagctttaggaggtctgtgcttgaacctttcattaaattccgcatcttttttatccttattctcctttagaatctcgtagagaggtctatccctctgggcagtgccgtcttcaactcgttcacctcttgtttttttagcttctaccaattggtcttcggagacgaagttcataatcctgataggacgatccgaatcttcatccatggcttcaagttttgcgaactgcgactgaaacttcaattccgaaaagacagaaaagagaaagtagcaaactaagatggtgaagaagcctttgggccgttctgtgtcttttgattacgggtaccgaatccagctataaattgtt

SEQ ID NO: 3265 - DNA, 487 bp, Glycine max
  Clone ID: GLYMA-23APR03-CLUSTER182395_3
atgtaaagcggtgactgtgagaatggaaggaaggaggcgtggaggttatagtggtcgacgcatagttgcaagcagaagagggagtggcaaaggcaatgccaacatcaacatcaacaacaacaacaacaacaaaaacaaaaacaacatcaatgtcatcaagaagcttcagagccgcgaaatttggtcgaagcctcatcgagcttttgcttctgtcactgcttctcacagattccgctctatgtgcttgacgcaccaatacgacactcatgatccctccaagactccctcttccctttggcccttcttgatgaagagaactaaggttgtcgaaattgtggctgcaaaaaacgtggtctttgctctttaccattctggtttgtgtgcagcttttagtagaggtgaggttgctctcaagaactatgattcttgattatttttttttatgtgtgaattgtcatttcccattacctgtttattaatcgttggt

SEQ ID NO: 3266 - DNA, 1780 bp, Glycine max
  unsure (1)..(1780): unsure at all n locations
  Clone ID: GLYMA-23APR03-CLUSTER18243_1
aanactgtaccgagttgtatcctattcaagataaaaaggcaacaaacttaatacaaaactagattgggacagaataaaaaagattttttttaacgaaaagaaataaaacgatttattacatctcttaataataaagacaacagcataagttcgctttcgtcagaagcagaattgaacaaaatatcaaagctaactcctaaaactacagatttaactaacctatttgatctgggcctaaacagttcaaaggagaagaagaagaagcaatgcatttacaaactgcaagctacagaaactacggttggctcctctatcagggcgaagcatttatcaagcattccaatcacatcataccatggaagccagcagaatccgagagcaccgctttaatctgctcagggaggacatcctggccttctctgcattgctcagctttgaacacatctaaagcaaagccattaaaacagctaataacagcctgctgtacatccaatccgaggttatccaaagccctcatggtagaaagcaaaagacctggtcggcgggtgcagaacatatgaatgttgacagctctcccttcccttactctaacctcaacctttgcagcttggtttttagggcttggcaaggtgccaggatacagttcctccttgacccggcagggaagggttggcagggtgggtgttagtggctgaaagcttgtagaagaaggtgtcagcaacgagccaggtggagttgactctagctcgttatgaagatcattaatccgctgcagcaactccttcaagtagtcaattgcatccccaagtattgaagccctatccatcttgctaatcttggggacaacagacctgagcatgtacaacctatcattgagtttcttccggcggcgcctctccgccatgagattcttggcgggtaaccccttcctcttccccttgttatctccaccattattctcactcagcttcaaaccattgttcccattattctcattctgctcatcagactcatagttcaacccggaaccatccacgtcagcactgctcccttcctccccctcccctcctcttcctccttcctcccacttcctccccttcctcctcaccgtctccagccccggaatttccgccgccgtccccctccgcttccggtacagcgtcggctgctgctgctgctgctgcgccccatcgagaggaggtggccgcagcagcatggccgcagccacctttgccccgtccgcaaaaggggcattatttccattcccaggtccagtgagggcctcgagttccgagaactcaaagcccatctgggcctgggaaaaaagatggggagcaggaggaacagaagagtgaagcccagtagtgtccaggcccaagtcaaaacccgggtcaaatgccatgttgttgctgctgttgttgttgaagaaaggaagtgatgaaagtgaaggggagaaagggtcaagagaaggaaaagattccatgttaggaacaaagggtatggtagcagaactaattgaagagttaaagttgaagttgaagtaagagtcaggttgttgttgttggtgttgaagcatggatttaaaggaagggataagaggggcacccatggcaatggcaatgttttcttcttcttcttcttcctcgagaataatattaatgggtggtgcgggtagcgtgtagcgctccatattcatgaaaaaacggagaagagggaaaagaacaagaaaaaaaagtgaggagaagaaggtgagaaacagaacggttatgtaataatttgg

SEQ ID NO: 3267 - DNA, 1994 bp, Glycine max
  unsure (1)..(1994): unsure at all n locations
  Clone ID: GLYMA-23APR03-CLUSTER182_6
tgttgaactatctctagctagcttttccaaatttggttgcacttgcaactgaggcaggaaagaggggcacgagaggaggaagaggaaagagaagaaaaccaagaaagtggagaaagggataggtgttgtacagaaatagaaattaaaattgagtgaaaattaaagagaagaaggcgtgataaagcaatacgggtttgtttctttagtgctgcagatattgttttgtagaattcagaatataatctgattaaaaagaaaagaaaatgtcatccaaccaaatatctgcagcactaaagaaacaatacatgtttgttttctgatttaaatgccatttaattatgtattttttattatttctattatcttcaacatttagtggaactttcgcagtgatttatgatgtcaacttgcatttttctctaattttacctaagaaatcaaggttctgatatatataacacaatattattatagggctctactagtttttagagtctaagatagaccattaataactaatcactcctcaccaaactgtataaatttgatctaggtatccttataaccaaaaatcatgaaagtaactttcactaaagtaggttttgcatgataatttcgtttagtgttccaaaaaccatgcatctatgttttcagcagccttgtattgcaccttacttgtccctctatcatgcattaggagttaggaaactagttacactaatttgaaaccgtttaattgtttttatacagcttgaaacgtcgagggtaagtctgatatagatgcataataaaaatataaatatgcataaataaagtatactaattgctgatcttgattttgtgtcattaaagtaagaggagcaaattctaactttttgggcctccaataaaattggcaccccatttaaatctgatgggggccctcttcttccagcacctaacaattttagcctacatcctttataaatttcggattagttaatctgaaatgtaaaatcttcattccagattaacctttccgtaacgatcagggtgtaggctaagattgatgtatagtaagatatatggctcatttggtgtagtaattcttttggtatggtttatgatatccatacaccattatcaattttactagttcttcctttctctcctcgaatctgcagcatgctcaaaacacttgaaaggtaccaaaagtgcagctatggtgcagtggaagtcagcaaacctggcaaagagcttgagagcagctaccgtgagtacttgaagctgaaagcaagatttgaatctcttcaaaggncccaaaggaaccttcttggtgaagacttgggcccattaaataccaaagatcttgagcagcttgagcgccaactggattcatctcttaagcaagtgaggtcaacaaagactcagttcatgctggaccagttagctgatcttcagaataaggagcatatgttggtggaagcaaacagatctttgaccatgaagctggaagaaatcaattcaagaaaccagtataggcaaacatgggaagctggtgagcaaagtatgccatatggaacccaaaatgctcactctcaaggcttcttccagcctttggagtgcaaccccacattgcagataggttctgactacaggtacatccctgaagcctcagagcagcagctagctgccacaactcaagctcaacaagtcaatggatttattcctggatggatgctttgacctaagatctcagtattttagatggctacataaataaaattagcaaacacctaaggccaaagtcaaaatgcctcttgctgttggaaatgtgtaaatgctgcttgttcttctgttaatttgttttggcataaaaacagcagtgactgacttaaaactattaaaactttagccatagacataggatgtggcatgaaggttatagtatttaatttgaatattttggaaggacaagttttatctgactgaatgaccagttagtgtcatttttt

SEQ ID NO: 3268 - DNA, 2007 bp, Glycine max
  Clone ID: GLYMA-23APR03-CLUSTER182_9
cagcattgcaattattttttattcaaataatgtgtaaccggcctctaaaacatatgaatatgaatatctaacaccagctgttgtataagtaatgctatttatggatttatctcttttagttatgatgtggtttagttaagaagcgcagatatggggtcatgtacgaatttgtgtttaactgtattaactagaacaaatgtgtaaatgtcattcttcatgttgtatattctagtgctttctagtttagtctttcttatataattattttagcatgttgatcatcaaaaagagtaaattacacttttaaaatacatgagtggtatatttatttatcttgccatgcatcataacagtcctagagctgcttaacatgtggaaactatattatgttcaatcaataaccagtcaccaactccatctgatatagtaatatgttaatgcttttttgtttcttccaatatgtagtttgattttctagcttcccattgtattgcttcagaagatcatgctaatatactgcttatatttgatacttataggaaatatttggttcgatgccagacatagttcacttttttcttccttttaatcagattatattctcaattctacatataatatctgcagcactaaagaaacattacgtgtttattttccgctgctttaattatatatttctattatcttcaacatttagtggaacttttgccgtgatttgtggtgttaccttccatttttctccaaatttacccaagaaatcaaggtcctcatacatctaacacaacattatattagagtctattcagcgaccttggccccccccccactctgatatagatgattaataaaatataaatgcatagataaagtatattaattgctgatgttgattttgtgtcattaaagttttttgtttttgtttgttttgggtcggcaaaaaatagtgtcataagaggagcaaattctaacttttgggcctccaataaaattggcaccgcattttaaatgtaacgtaggcctattattcctgcacgtactttaacaatttcagcctacaccctttgaaaattccgaattagataatctggaatgtaaaatcttcgttccgaattatcctcttgtaaatttcggattagataacccagaatgtgaaacaccttttggtatggttatccatacaccatcaccaattttattagttcttcctttctctccttcttgaatctgcagcatgctcaaaacacttgaaaggtaccaaaagtgcagctatggtgcagttgaagtcagcaaacctggcaaagagcttgagcagagcagctaccgtgagtacttgaagctgaaagcaagatttgaatctcttcaaaggacccaaaggaaccttcttggtgaagacttgggcccactaaataccaaagatcttgagcagcttgagcggcaactggattcatctctcaagcaagtgaggtccacaaagactcagttcatgctggaccagttagctgatcttcagaataaggagcatatgctggtagaagcaaacagatctttgaccatgaagctggaagaaatcaattcaagaaaccagtataggcaaacatgggaagctggtgagcaaagtatgtcatatggtacacaaaatgctcactcccaaggctttttccagcctttggagtgcaaccccacattgcagataggttctgactacaggtacaaccctgaagcctcagagcagcagctagctgccacaactcaagctcaacaagtcaatggatttattcctggatggatgctttgacctaagctctcagtattttggatggctacataaataaaattagcaaacacctaagaccaaagtcaaaatgcctcttgctgttggaaatgtgtaaatgctgcttgttctttagttatttatttgttttggcataaaaacagcagtgactgacttaaaactattaaaactttagccatagtcataggatgtggcatgaaggttatagtattttg

SEQ ID NO: 3269 - DNA, 1647 bp, Glycine max
  Clone ID: GLYMA-23APR03-CLUSTER18365_1
ttttttttttttttttctttttttttagggaactaatcgaatcattccattgatattcatgtgaaaaaacacacacacacacacacaaaacataaaagttaactacaataacaacttacccgataatttattcaagttatacatcattttaatatttttgaaataaaataacccacgtaaaaaaatatttttaagatctagaaattacttccaccagagtgtcgaaatcctgtgcagcttgcccctcaggcctacctgcatcttccacagtcttcttcaccttaagagcattgtctctaatcttcttcccctcttgatgcaccaaaatcaaatccaagcttttcaccaatccattttttgtgaacaccttaccttccattatgacaccaatctcccaaacatcttctatcactcttgcagccacaacttgatccccaaagaatggcttgcagatcataggaacaccactggaaacactctcaataacagagttagctccacagtgagtcacaaagactcctacagaatcatgtgccaaaacttgtgtctgtggagcccaagacactattttcccatgctttttggttctctcaacaaatccatttggcaaaagaccaattagaccttccttcagtgaccaagaaatggaaatccactttcttcgagtgcctctgccactgccacaagctcgtgtggaggaggtgccaccacagtcccaaagcaaacataagccactgatttagaattcttcgtatccaaccatgacaagcatccacttgaatctgtgtcagatggtggcaataacgtggaaggaagtggaacaacataaagcaaagattgcaacttggatctcatgtcttgaacaaacaaaggtggctccaactcctcaaagaaattcataactactaccttagcttgaggtagcaccttacctagtgaatttagttcccttgaaaaaactgtttctttttctccaacatcaagcagatcctgtggcatgtcttcaacacgcaacttcgacagccctggaatgaaatccaaggttttgttcccagcacggcttgcacagtgctgacgaatcaagtcagtgtagaaatagagagagagtgagcatgaattgggaagccaaagtgcaatccaaggaacattgagggtctgagccactaggagagaagaggttactaaagcatctgcaatgatgcatgtgactctcttctttgtctctgcttccgctaattctatacctttgtgaaggttctcaggaccagtttggagaaaaagattcaatttttcagttgggtttttgcctaggacgtgaccctctgggattccatcacttatgctataggccttgatgttatttgggatgtggggttttgggaaaaggattgcattggatttgtgtgtgccaatgaaagagaatgaacagtttggaagggaatgagctagtttgaggacaaggtttaagagaggcataaggtggctgccaaaggggaaagcaaagactgctacgtgtttgttttgatgatccattttttgaggtttgatacaattcggaaggtgaaggtgaaggtgaagctgagagaaagatgaaggtaaattaatgtggaaattgtggtccccttctgtcgtcttctcgcagccgta

SEQ ID NO: 3270 - DNA, 879 bp, Glycine max
  unsure (1)..(879): unsure at all n locations
  Clone ID: GLYMA-23APR03-CLUSTER18379_1
ttnnnnnnnnnnnnnnnttttttttttttttttggtaataaactataacatcattttattagacatactaaaaagaagaagtacaagaaccatgatagctagcaagcatttaaaggaaggtaatcctaaacctagcttactatagcaacctagctaaaccatacaaacttatttttatttatcatagctgttttatttaaacacatatacttatgataacatgcttaaacacatacacaatcacacaacttttcgtgccgcacgagaagcacatagcatgcaaatggatatcacccccatgcatcacatggaaacatgtttagttaggtggagatgaaggtgttgtatgaaggtaaggagaagcaggcatgtctacaggaggatacggaaatgaagaaaccgcatcagggcttattggccatggaagccctggaacgaatggtgttggaagtggaaaacgtggaaatggaaaagcagcacgtggaaatggaaaagaaggacgtggaaatggaaaaccaaatgggaatggaagaatgggagggatgatttggtttttgtcaaatctttcttctttcttttccacgttatagttcttgcttgttggatcatctacttgtacttgatgatcatgtttttcatcatgtcctctatttgcagtgccaatattcatcatcacttctttctcgtctggtgaagtagtggtggtactcatgagttgtcttgcactagttggaacaacaacattgttgatcactgcaaccaaacagaacaaaagcataagattaaaggtcattgtgagagatctaaggaaaaccagttagagagaaaatctagagggggtggaaattaaagaggcttctgtaagtaagttctgttgtt

SEQ ID NO: 3271 - DNA, 1101 bp, Glycine max
  unsure (1)..(1101): unsure at all n locations
  Clone ID: GLYMA-23APR03-CLUSTER183862_1
gcctgtaccccccacccttcgagtccaaaagtcaggccttcttttccctcctttctttggttgttgaatttaagtttccaaagattcaaaagcaggtttaatttaagcaaatggaaaagctgaattttgttaaaaatggagtgagcaaattgcctcctggttttcgttttcagccaacagatgaagagcttgtttttcaatacttgaaatgtaaggtcttctcctaccccttgcctgcttctatcattcccgagatcaatgtctgcaagtatgatccttgggatttgccagggaattgtgatctacaagagaggcactttttcagcccgaaggaagcaaaatatcgaaatggtaatcgcatgaaccgaacaacaaagtgtggctattggaaggcaacaggatcagacaaaagaatatcatcttcaacgtgtaacaatggtattgttggggtacgaaaaacattgatattttatgaaggcaaatcaccaaaaggctccagaactcactgggtcttgcacgaatatcgtctcgtcagtgtagaaactggtgctgccaactcatcccataataactatgtgaacgagataggagattgggttctgtgtcgcttatcgatgaagaaaagaagtctagaaagtgatggcagcgccactcatcagaagcataggcaaaataatacagttcaaactagtcgtccaagattaatgtttgattttatgatggtagggaagaccaattcttctacatcctcatcatgttcaagttccagtaacatcatggaggtctcttcaaatgccttcggaccatgaagaaacaagtggctttgcccatttttaggaccactttattaattgaaaatttggccatggctttgctgtattttaattaaggaaattaagtggttcatatgccnngggnnacccnnanttntttttnnnnntnttttnggnaaagggntcnttttnaanggnnttccccctttnnnntnnnnnnnaannnngggnnncnntnnnaaanngnnatnnctntnncntnnntnnatnnannnnntnnnanggnnnnnnnnnnnnntntnnnnnnnnnncnnttnaanntntnnan

SEQ ID NO: 3272 - DNA, 1014 bp, Glycine max
  Clone ID: GLYMA-23APR03-CLUSTER18391_1
ttttttttttttttttttgataaacaacagactttcctaaagtttcataaattaatttcatcaattgtatatagcatacacgatgactgttgcattctaaagaaaacttcagcaccaagattcatctaaattgcagtgaagttctacaaagtgtcaatataatatatttaccagatgcaatcacttctgttacaaaaggctcgtcaaacttgcaagtcaagtcttagaaattgataggggcgatttgccagaaccttccaatactgctgcaggatcagaggacctggttgcagtttcatctgctccatccaaatttatttcactgaagcttcttttcttagatggagtatttgaatttgtgttttcattttccttctgctttcctttttcttttctgttgtcagtctccttatcaggttgtggttctccattcggaagtggaaataatggaggttcctggccactcaatcgacaaaacactcgctcaaccgtttcactaatctccttacccaggccattattgtctaaaattaaatcccaaactgattttgaggctttttcaagtacagaagcttcaagttcttgccgaagtgcgtcaaagagctctcttttggtctgtttctcagccccaggggtgttcagaaccttactctgctcagccatctttatagtagtactcttcaattcctcattggctttgagctggttgatgatcttcagtctgagggcatcaattgtgccgtcgttcatcagcgactccaacacatcttcgggagtgattatcgaggatgaagccatacgtaattgtccacgtagaaccgtaaccgaaccgaagacgccgaagaatttcgatcttctgctgaatcgttggatacggacaaatgtcagattttaaaacgcagtaataattggtggtcaaattctcagaatttgagggaacgagaagaaccctaatgcgaagaagatgacggggtggggacacctgtcactcccacctaatatataatactgttt

SEQ ID NO: 3273 - DNA, 1138 bp, Glycine max
  Clone ID: GLYMA-23APR03-CLUSTER18440_1
gccccccttttttttttttttttttgaagaagaaaaatccatcggatcaaaataataaaaaaaaaataatggtttacaaaacctttcccatggtgagaaacatgtttaactctcccatcttagcctccaccaagaatgagatgacaactagttgaaagaaatgaaaatctttacattagctcataaacaacataatacaaattaacaagattttacgtctaacaatctagtaaaacctaaacaagactccacaaaaggaaagagcaagcagtagagaatcatagtccacaagtgtatttcagcagcaaaaaaacttttctacaggactgcaaggatattgaggctgtcaatgcagtgagttcaacatacaatgtcataatctcgagtatataacctaaaattctgtgtcaaagcatgaaaccatgatctttgaaaccatggccctcgcaaaagggatgtagctcaagctataccaaacaagtgccccaaactccaaaataattgcaagaagtgtcagtaacttgttatgaacataaagagcacagaacaaggcgattatcatacttgcaatgtatatggctgttgcatatatacgggcaggatccagcatcattgtcacttgccttttaggacctataaggaatgctgtgcttccaagtgaaagcaaattaccaagagtgaatgctatcgcaaacttgattggtttgaagaaaacaagcatagacaatagcgtacaagttaatccagaagcaaagcatatggcaaaaccatatagtctctgtgtggtggacaaggtgcagttgcggttgaagtcgtccatgaaggcgaaggagttgctgttgtccaatgccgcagcttgttgctcttcgtcttcgacatccattcccaccataatcttcactttctcgaaggctttgttcatcttttccattgcttccccacactttctcgggaaaataaaaactgtggatctgtgttatggaattggacggtaactaagtagtgaagttgcttcgattttcagaaaccgattgtggaatttggatggagatatcgcaacgactccacttcactggaatcaagctcatgtcatggacggggggggggcctacgtagctgactccgtagctgatctcga

SEQ ID NO: 3274 - DNA, 559 bp, Glycine max
  unsure (1)..(559): unsure at all n locations
  Clone ID: GLYMA-23APR03-CLUSTER184545_1
cgatatgggtgaccgggnccccccctncgnntncagctacgtnggcccccccccctaatcgaaacattgaacgtgcattttctctctactttactttctgcacccccttaattcgctatggcaccaacattcaaggccttcgctcttttcctcctcctcgctctcttctccgccgcctccgctcaagaattatcccccgcctcgtctccggcaccgtcgcctgaagcaggagccgcagactccgtgccttgctccgccatcatgatcggtgcctcgctcgttttgtctctcatggcggtcttcaagttctaggatttcttattttgcatttcatgaatgaattaatattccaaaataacatatataataaacttgagactttccacgttaccacttcagagtttattttattatttgttgtaggtcttatggtgaaataacagggattttatcctctctacatttttattattaattatgtaatgctatatattatgtatgtttatatgctatatggatataacttagatccagttatttcaaaaaaaaaaaaaaaaaa

SEQ ID NO: 3275 - DNA, 1325 bp, Glycine max
  Clone ID: GLYMA-23APR03-CLUSTER18473_1
gctacttgtcagtggcaagtgcaacatcatagaaacaggaaatttagcaggacaagaaacagaggaaggttgtgattacgagaacatacatgttttgtacattatccaatgaaactaaaaatgatacaaacttatgcacccaaaagcaaaattgctacaaatttccctgaccctatcataatgtatggactccattgaccttcaataatatcttcaactagtaacctcagccatcttaaaagctctagaaatcccatgaaccacaaatttctccgaaatgatcatgtcaggcgccacaatcacaacaccattaacaaccatgcccggcacaaaatccagaaccccatcaatctcaagatgctcatcaggcatgagcgtctttaacaaactcctaaccggcagagaagagatttctttgtaaacaaacctttgaggcagaatatgaagcctcacagctctatcaagaatagtcaaagggtatccaagtaaagtcaaatcgcgaggagcgaagattgtgacataacccaaactcccagaaaagtctctctttatcccatcaagaacagaatgcaacgcaatcgagaacgaagcatacccttttgcacggagcaagtgaacgacgcggttccactcaaccccgttcttggaaacggagacgttgacgtcgttggagcggcaagtgggtgtgcgaatagcaaaaccaaaaccccgttgaagaaggtcttgcggctgaaggggagagaacggcgcaagaacgccatgcacggcaagttgctctccgaggaagatattagggtttgatatcaagacgtgattaatctccacggagtttggtgcatggtcaaggtcaagcttagtgagagaaacatttttatcacgaaggagggtggggaggcacgttccttggggaattttgacgaggtcgttgaaggaataggcgttggaggtggtggtgtggtagaggaggagggttttgaggaaccagagagggtgggaggtgtttttgatggcggagtctttgatggcgaagatggttgagttttgcggcggtttgaagaatgagggagagtggtggagaagatctgccattactatgaagcctgctttgcggagagcgttggaggcgttgagtgagatgtcgtggggtatgggtggatcttggggtgggttcttgttggaagtggaacgtatcgctgaggagatggcgatgattccgagggcaattgaggctgctaagtagagtgggaaccagcaccaacgggaataagccatggccaagaagaagaaaacaaagaatgtgattcttttggagggagaatgtctct

SEQ ID NO: 3276 - DNA, 1532 bp, Glycine max
  Clone ID: GLYMA-23APR03-CLUSTER18475_1
tgttttttttttttctgttttgagcaactttaaatactgacaaacaaatacgtaattcgatcggttttaaagagtcgggtatatttagctgaaactgttgctttcttatttatttttgtccccttaatttttccattgcatatcccattaatggataaaacacaaccataaaaaccagcatacatatcatacatgaaggctgagtattcaagtttcaaacaaatatgatttttgaagacaataattcccgacctgaacttatctgttggaacctgacagaacatcaaacagtccacagcaactcaaccaggaagtcttttgcaccacaggtggaactgatgctacaagtggctgattatcagagcattctggagtatcagaatctttaacatgttctgcatcaatagtagattcagggataggactctgagacactgatgctgatacttcactgtcaaattcccttggcttaggttcctccaaacttattgttcttacattttcatcagaggaggaatgttctttatcctcatttttctccaccgcaagataagttgcctctacttgagatcctgtagatttctccaataaagcattattattatcaatggtttgtacctcaggtacagcagccactactttcgcaataacaagagaagacacccagcacattttaagtaatcgaccaaccagcacattttgagtaatcgacgtcattttggcatgcaaagagtccatggttttaaccaactcatcttatgggactcattctttgagttctttaaggtactcatttcatgacttgtttaaggttccggtttcatcgcttgaacttgaactgctgtagttcctattcccgttcccatgatcagattccttggcagactcaacatgtccaacaatcacatctttgctctcagaaccctcagatttcatatcccactgtatcacaacaataccttcttttcgtccttcagtttcatcgatcttagcatcaccaggggcttcctccaagtccttggaagaagaagcagcatgagatggttgagcagctgaagggtccctctcctcctcctcttcattgaatgcaggatcatgttcaccatgtgctggtgaaccaccctcaccaccatcacttcctttctcgtcctgagactgtgacttcacctcatcattcccttgagggttggttgttgaagggttggtgttaatttcagtttccttttccttctttttcttggcagctttcctcttcttagcacctgatggcatgattgattgaggctagggactaaaatagagggcagccacaaatggtgggatgttgtcccccctctctctctctctctctacttttttagagtgagcaacacaacacaacacaaaggatatagaatctgtgttattgagcagaggccaagttgcacaaaaggagaagaagtaggtagaagagatgatggggaagatggagagagagatcttgtgtttgaaaattaattgttcggcctacgtagcttactcgcagccgtaga

SEQ ID NO: 3277 - DNA, 762 bp, Glycine max
  Clone ID: GLYMA-23APR03-CLUSTER187432_1
cacacaatccaaaaaaaataaaattgtcactgctattattttaagaaattaaaaacacccattttcttcttctttcgataataaaaaaatgctcttacgtggcgccatctccacccctctcccgccctccctccgcctccgcgcatcacccgccgcgcgcagaaccgtcgccgtcgcttcctcctcccccagcggcggcggcgattacccgctctcggtctccgacacggcgctggagtcgcgcggcttctcgctccggcgtggcgcggaggggctggacctggagttgctcaactccgtgttcgcggcggtggggttcccgcggcgggacccggagaagatccgcgtggcgctggagcacacggaggcggtgctgtgggtggagcaccgcaagacgcggcggccggtggcgttcgcgagggccaccggcgacggcgtcttcaacgccatcatatgggacgtcgtggtggacccctccttccaggggatcgggcttgggaaggccgttatcgagaggctgctcagggagcttcggggaaagggaatttccaatattgccctctattcggagcctcgcgttttgggcttttatcgtcctttgggatttgttgctgacccggatgggatcaggggaatggtgtactccaggaaacaaaagaaaaaataggataactcttcattttctttctctattttttttaatttatttattgattatatgaaagtagagtaccaagtttaatttccatgcattatgttaaa

SEQ ID NO: 3278 - DNA, 1741 bp, Glycine max
  Clone ID: GLYMA-23APR03-CLUSTER18775_1
gacccgtcccccccggtttgtggggggggggtggaggacttcttgcccccccggatcacctgtgcccccttttccgctgctcgatggtcccccccctgcaggcaccaggggggctctcccgggcggggcggggccctctgggcttactgctccccgggcccgcggttttttttttttttttttgtatagaagatgcgatcaaagaagatattaataattgtgtaaattacataaagataaaccttatcaacagtgcatacaaatgttgtgcacaatggtaaaacaaatgcagacaccaggatttcaaaaggagacaattcaggtttgactgggcttactacagagcaatgagtgggtttgactgggcttaaccaattttccatatatctactaatatctacatcgagaacccttatttaattgataaatattagtagatacgatagtaattaacagaacaaagtattcgagaaagcacaaattcctttatttatttcttccttcagggttcgggttccatattagcaataatgcagcattcaaataaccatataacacagatgacaagctaatgccacatacaagataatccagatccagatgtctcaattacaatagtcctgctcccatcactgagaattcagcctctgaaaatccaccaactggtaaagatcacctcgcctttgcttagttacaggcagatttgtccttctctgctccaatattgaataatcaatttctgctatgatgattgcctcctcatgttctgtagtagccagaacttctccaaatggtccaacaagagtggagtggccccaagccacataaccagatccagtatcccgggcaggtgaacaggtagccacatataactgattatctgtagcccttgccctctgcaataactcccaatgtaatggtccagttgtcatgttaaatgccccagggtagcagagtaagtgagcacctctagcagcatatatcattgctagttctggaaatcgaatgtcataacagatgcctatgccaatgcgtccaacctctgtgtccacaattgtcggagtctccccagcagtaagagtttttgattcaataaaagtaatcttcccagggatgtcaatatcaaaaagatgtatcttgcggtgcttggctagtaggtttccgtcggtgccaaagacgcagcaagtgttgtacaagagacctccagagcgttctggaatggaaccaccaactatggtgattttcaagagacgagagagttcagatagcatggcagtggaaggagaagcaccagcgtcaatatcctcagcgtagacaggaaaactatcgttggaataaggactgttccaaatttcgggcaaaagaacaagctgggcgccctttgatgcagcatcctgaatggcggtgcgagcgtgggcgatgttgctgtctttgtcggggctgacggagagttgacagaggccaattttgaagttggagagagggggagggggcaagggaatggcgggaggggcgcgtgctcgttcggagttgacggatgtggcagacatgattggatttcgagagtggtggattcggcggtggcgggggtgggatggacaaagaaagggggggaagaaggagttggaagtgggagaatggcggctgagagtgaaagatttcaagttaagcagtgcggatgctttcatttctcattccggaaatctaaaccctccgcttcagtcgtgggtgggcgggagta

SEQ ID NO: 3279 - DNA, 1084 bp, Glycine max
  Clone ID: GLYMA-23APR03-CLUSTER18879_2
gaacacacaaggcaaaatcagtgtttatttggacatagagaagtaacatgtacatgtattaattttgtacaagcataacccttccctaccaaaaacagcttgtcattacaaaaaaccaagtgtcatcatagaagcctcttctataaataaagtggaaggattaacttgtatttattcaaagtgctcccagttttgagtaatcactgtagatgttggaaatgaagttggtgacttcaagcttccaactccggattccaaggcctcccaaatcacagggactgcattgttaccagcattgctaaatgcagcaaaatttcttgccttcaggttgtcaattgtgtccacataactctgtacacgacgaacctcaactcttctctgccctttggcttctccctcagcagcaatggaatccagtttaagcaattgaaccattagcaattctgtcaagatagcaaattctttgtcttcaaccttagcaccaccacaaacagttgtctccaaagcaaccaccttttgatatagcttgtcaacttctgttctgactttggagatggcttcacatgcctttgagatatcttcactcttatgcatctcctcaagctttctctctttgctggctggatcctctagcaatataaccttagacatgtctttcactcccaccatatgcaagcattcctcatcctctttctctttccctctaaatagtaacctttgctctttaggctcaagaccagtctcggatgtaagcaccatttttagatgcccaaaagtggattgtgcaggaacagtgacctcatggtggtaagaaccatgagagaccttgattttgatcatggaactagaagaggaatcaaggggttgtctcttctgaacaagcatgccaccaggtcttagctcccaatctatgcttcctcccttaataactccatcattggctgctgcaccttttgaagctgatgatgattttttcattgccaacaacaacggtaaaacttaaaattggtaaaatatagcaataggataaagaaagaggaaggtggagctaactgagagaagcaagagagaaagtatcagaatt

SEQ ID NO: 3280 - DNA, 637 bp, Glycine max
  Clone ID: GLYMA-23APR03-CLUSTER18899_2
caaaaaggtcacaaatatcacaaggaaatgaatgaatacaataagaacaccggtttttcatgcaactcgaatcacattatagaaaaacctgaagcagagaagtacaacccagcaagcctaaattgtggccatgctcatctatgcataaatattactaatacaattcatctatgcttctaaaaattgaaaaggaaccctcctgtgtgaaaagaaaaccaattgacttctaaccctaaaactattaagccttgatatactacaacattccttactattctatgaaaggaaaaaactatttctttggcatatgagctctaagcaaaacttcaagaccatctcttcgtactcatcttcggggtttgacagagcaacaattgcccctccagctcctattgaagcttcaccctcatgtataatgactgttcttatgacaatatttagatcaaatctttgattatacgagaaaaaaccaatacagccggagtagatacctcgagaacaactttcaatagaatcaagaagttccattgatctcaacttaggtgcacctgtcatagaaccaccaggaaatgcagctttgacacagtttatagcactgacatctgaccgcttcttcccacgaattgtactcaccatt

SEQ ID NO: 3281 - DNA, 983 bp, Glycine max
  Clone ID: GLYMA-23APR03-CLUSTER18920_1
tttttttttttttttttagcattatggtggcagttttataatggttatttaacaattttgggtggaaccagttaagagtaacagttacccagataagtagtcatcaagtattagcttgttttgtccaaaagggatccaaactctattcccatatggcagaacgaacagggacaatctaaggcattctttgaactaaatagtgttacaaaatggggtcactactacattggggaacaaagaacttcaactagaatgaataaacacataatgcgaatgtcttgcatttggtctttctgacggaagagtcaaaattcaagctcaacttcatcaagccagatcaaccgctgatcaagattctgctgcatcaatttggtgaatttgaatcaagctgcatggtaactggtccatcattaaccaaatctaccttcatcattgctccgaatacaccgtccttgattgcatcagagttataggcattcctaaacctgtcaactaaagaggcatagaatggcttggctctctgaggtgccatcgcaacgtgaaaatccggtttgttacccttcaggaatccatacaacgtaaactgactcaccaacaaaacttgataatttttctgcattacactgtggtcccacgctttgcccgtattttcatttgggaacagcctcatattcaagacctttcgacatatgtaatcggcgtcggcgtcggaatcagagtcgtggattccgacgaggacgagaaggccggggccgatctcggagacgatgcggccttcgacctcgacggaggcagaggccacgcgctgaaccaccgctctcattgcagtagtcactgcgtttcttcttcttcttcttctcacagtaacagtggaggtcgaggtcgaggtctcaattctatgtatgtctcccacacgtggaaccctacacggcggcaccaattgcaattgcatctttaattcatctttatcgttgaatcgttgt

SEQ ID NO: 3282 - DNA, 945 bp, Glycine max
  unsure (1)..(945): unsure at all n locations
  Clone ID: GLYMA-23APR03-CLUSTER1902_3
ttcaatntcaaagctagctagtttgtagaattgtactggtatgataagggtccaatatcttaaaatttgaatttagtactccatttagtttatgggatgggaattatttntggcttatacacattattttgttgttggtacatatagtcaatcctaattacactaatatcctatatctctagtaaaattgtctatagaagattaaaaaaaccaagattatattccatattttttttctttgtttctggtagttgcctcagttgaaaacaaggtgctgcgttattgaacatgtcctctttgntaactcgtacttgtaggtgaattgagggaaaataggtacttttttagcaatagatcaaatggaaacatcaagagacctgctggttntgggtgctggaaatctgtaggcaaagaaaaacaaatcatccattcagagagcaatcaagtaattgggatgaaggaaacactgtttttttgcaaagggtcccatgagacaagaactcagtgggtcatgcacgaattgcgccttgtagcttcctacccatgtcagatgccagtggcagattttgctgtgtatcgcatatttcagaaaaacaagatgaagacaagaagatcacatgggaagaagccctctagtagcagcaaacttcagagacttgttgatgttaaagctagtggattttaatcatgacgcacaccttgttccgcatgtctaagtgaaggctgtagtgaaatctcctctagcaagttagattaggatttaggagtagaagtgtagaacagtgcatgctttgtttattttcctcaatttatgagatatgatcaagaagcctctaaagcacaagtactcttgtctttactacagtcctgatgttgagttttttttgccctgcagtgtgaaacgaaaaaattatgtcctcgtaattatttgaatattattttctg

SEQ ID NO: 3283 - DNA, 1299 bp, Glycine max
  Clone ID: GLYMA-23APR03-CLUSTER19109_1
ttttttttttttttttttctttaaataaaaaggattatcataccagtgcaacctacttttaagtttcaagtattcataacaacagctcttaagactcctttgaaaaaaataataagtaataaaaaaaaaagctcgagttttttaactccccaattacatcaacctaactctgaatattttttttatttgtaagagtcgaatataaatattaaaaatttaaaacatctcatattttgttcaatcaaccaaattaaattgcctttgatacctaactttgagtaagtgctactccgaatcactgtccaagttttccattcctttcaagcctctgctgcgcttttgcttcttcactgacttcttctccctaacctcatatctgctctttgtcagttctgatagccacatcccagggaaacagcactgtagaattctgtcaacattctttgctctcttctttggtctttgagggatttttgtccccttcatagcgagaaagtcatcttctttctcctttcttgagagagcaatgtagatctttggccactgaattaccccaacagtgaccttgtttccattggcagcaagggatgaggtagcaggagcagtggcaacaccaccttctttttcagactgcaccgaggcatgactactattgttcagtctctcagaggcttcttgtgttgttgaaaatccacttggcttttgacactttgctgatccagaagaaagcatccttctgctacttctttccatgccacaagaagacagttttggtgctgcagcagatctagacacaactgggttgctcccctggcttcttgaaggtgactcacttccacctaaggaggggtcttccaaattcctagggctattatgctttctacctctgccactggaggcagtagaagaaacgagtggcggcggcggcatggacaagtttggaggaacagtgtgggtgattcttctgttgttggtgtgaacagaagacgatgaatcttcaatggcagccctggaaagccttgatctctttctgtgtccccacttcaacaacgcatcaccaccacttggactggtgcttgtgctcatgctgaggctgctatctgctgttgtttggggagaatcaaaaggggacatgttggtgttgttgttatgctttatgatattggcctaatggcctctttaggtgataatatgaatctgaagacacctttgctttcaaaaccaccacaatagggagatgcagctgctgcaactgttgctaaccccgggggggggggggggcctacgtagctgactcga

SEQ ID NO: 3284 - DNA, 786 bp, Glycine max
  unsure (1)..(786): unsure at all n locations
  Clone ID: GLYMA-23APR03-CLUSTER19114_2
aaagccaatctaaatctanaccttaaacaaatttgatttaacatgatataaaatcattgcacttatgcacaccagtggacaggcactttgatagtgatgtaacttgcctcccttaattcttcattttaccaaanaaaagaaagtgtcatattctcttaaggcaataaattcagtattatacaaacaagcatgtcatttcatcaatcgtttgaaaatgttttctgagccactatggatttcatcataccaccattaattgtgagccagccattgttggagtatggctttaccaattggcaccatccgcatcccgagcttggtagaaatcatttggccggacaatgttgacctcctcaaactcattatcatcttttctcaaggtcagtgcaacgacagcatcattttcaaccttttgatctgccagagtcttagagtcttctaatacttctccagtaacaggtagaattaaccgttgattattagctggctgatcaacaagttcttgcaacttctgttttatgtcaagaattttatcagatggcttgcacctgatgaagtaggttgtcttactacgtttaacacgaatgtacatatccattttattgcgcttcgggcgcttctccttctccttggtaacgaaatctaagggtgctgcagtccacggaactgaagaaaaaattgaacaaaaaaagtttggttttcagtataatggggaactttgcgaagacaactattgatttgaagcgtttcgatttggtaaaagagggttcagagtacctgggaatt

SEQ ID NO: 3285 - DNA, 1285 bp, Glycine max
  Clone ID: GLYMA-23APR03-CLUSTER19132_1
agccgaccactctccttcgcgtgcatttggctgcaacaccccctcccccctccgtaacggcctgagcagcttccccaggttgaggttcctcttactactagtgggtcccctgtccatgtctttgctcgagtcctcaagcctgcttctttttgtcccttttaactaaatatcatgttgaagtattatgccggttacaagtacggtggtaacactagaattagtgtaatattcacttcaaattttcagtcagattgacaatggtgactttcaatgtaaggatttgaacataattaattatccataacttaggaatcaaatcaaagctcaagaaagaataaaaaaatcagaagaaccggattttttataccacagtttaagctgctgcatcaaaggaatgaagaacttgttctaaaatcattctcttatttgggtcaagaggaatctctagtttatcagagtgaacaatatttagaagatagagcttctttgaggctacaaaagctgcagaaaatatcctcttcatccctccccgggtactatcaaccttgtattcaaattcataaatctgtaaccctccctcccctgatctttctgctactgtaatcaactcgacctcctttgtactttccttacgtctttctgcttgtaaaagcttatcagcaacgaactgaggagtcccaaattcttcaagggtcttaagacgaactgggtttaccacaaccccaatattgttacttcccatatctgcctcttgaaacaacacagttgcccctgctttatcaaccttagtccaagaagagggtgtaagaagagtgaaaccttcatcggaatccgtgtatctctgaagctccaattcttgagccaacaacaatgcatcacgggcatttggcaacaacataccctgaccccacagaaacgttgtgagaagaatgctcctcttgctgaaagaaggtgctaagtgtatgtctttgtgggattcatgaatgcaagtgggtgaagttgatctggggaacaagattgagaccaaggttctggaagcttgagggtgttggtggaagaaagtgctgcgtaaaagggtagagcaacttctcaaagccattattatattttgcaaattttaaggatttggtttgaggtttgttgggttgaatttcaatgattcatcctcattcataggatgaatcgaagttagaaggtgttcctgaatcgttatccagattctcttcttttcatctcttccactttctaagattgggggggggggggccttccttgccggactcga

SEQ ID NO: 3286 - DNA, 1014 bp, Glycine max
  unsure (1)..(1014): unsure at all n locations
  Clone ID: GLYMA-23APR03-CLUSTER191_19
tttttttataacaaacaaaaaaaatttttcacaacttttcatcatttgttttcaaattcatcatttccctttccaagtggatgctcagatccagttcattctgcgttgaggcagttcataatagaaatcatgggagctctcagaactctcttatggagtatacagtgatctgtagcaagcttagagttctgggttgtggagatgatgagagcacccaagtccnccatatgttgtccaacacccatcaggaggtgaggtgaatcttgttataacagattactgtatgcntggcatgacagcgtatgacttgcttaagaaaatcaaggaatcttcatctttgagaaacataccggtggtgattatgtcatctgaaaatgtgccttcaaggattacangatgttggaggaaggagcagaagaatttttcttgaagcctgtgaggctgtcagatttaaacaagcttaaaccccatatgaagaaaaccaagttgaaagatcaaaaacaaggaacagtagaaaagcttgaagacttagaagttcaacagcaacagccacaacaacaaatcatcatccaaaatgagcagcaacaagcaccaaaatcccgagatcttcttcagccagagtcagagtcacatccacatgcacaaccaactattgaacaacagcaacaatcactacaacaagccaacaacaatagcaagaggaagaccatggaacagggcctttcacctgagactgacagaacaagaccaagatacagtggcatagccactgtggtatgatcataaatcattggcaaataattttcttgaatttcaaaaatgtaattctcataacttctttcttcttcttttaaaaaaaattaacttaagtgttggttaatataggctctataggagtgtagtagagttgtttcctgtacacattttcctggaaatatttccttccaattttgcttccccccaatataaatgaaaaagaaaaaagaaatattgaattgaaaaaaaaaaaaaaaa

SEQ ID NO: 3287 - DNA, 1226 bp, Glycine max
  unsure (1)..(1226): unsure at all n locations
  Clone ID: GLYMA-23APR03-CLUSTER191_8
cagatagtaaagaggtcgtaaattaaatatacaccgaccgtccaggggtcagaatcccccgggcaattttaggaccgtgcccatagtggccactggtcaacgaaagttcctgagatgatgagaatctacttttagtcggaatcttccaattttccctcccattgggggttaatcggtgantgcctattaggcctcccgattaatggaagtatgggggagcccagccaaggttgtgtngtcgttcagagccagctaaaattagcccaggcaagtagcttgatggtgggtcagcatcctggccgtcaaactcttgaccctctcancaaggctagagncacgtccatcaagtcctggtactttgggttcagcttcactattcctttactttgtgtttcttnccagccaaacttganccaaacccatctactctttcgcccgtctttttcattttcttctctgcaccatccaaatccaaccatctcaaataaggaagagcatcagacacattgaacgcccccgtcaggtcaaaaaattctctcagcgcctttcggatccgttcgttctcttcattctcaccaacaaaacgttttcctaccaccgttctgaacataacgtttaacgttatgtccccgaaccacctcttcatttcagttgttgccttttcggaaccctttaggttcttgtaagtctctttcactgccgccttaacctcggccaccatcacgtgcttgagcatgtctatgcagtgagtagagagaagctccagcgtgataattttgcgcacgtgacgccaataagaaccgtaagggatgaacccaatcatggaatagttgtatcccaacaattcaaaggacactgatttaggacggctagcaaacgctttgtcgttgacggtaaagcactgtttggccatttcccaattgctcacaaccaacgttttgtgagcacccagacgcaaggtgaagacgggaccatatttgtccgccatgtggcccaacgtgacatggggtggttttgagccacctaagaggtggatgtgaccaattaaaggccacgcgcctcttgcttctggtggtgcttttcttgttgcagcaccgcggtttctgaatatggatgaaagaacaaagagaaataacaacagcccaaagaatgtgaaggtaattgagtttgttgactgcaggatgtttaaacacaataaagttggaactggaggggggaaaggagtt

SEQ ID NO: 3288 - DNA, 1412 bp, Glycine max
  Clone ID: GLYMA-23APR03-CLUSTER19209_1
aaaaatataatatttcattttatgtaatcatacattaatcagctacttccaatgaattagcttataaacttttatcttacaacttacagactttaaatcagatacactttctgactcgtgaagtatgaaatgaatcaagaaaaacataacaaaccctgagaaagtcaaatgcatttttaataatctgtgacatagtaaatggcaattaacatactagtgacactgttcctttctgcaatgttgtttgaaaagaaggggactgatcactgatctgaacgttagtaaaaaaacatacacccacaatttgcataattctaacatcaacttctgcaaatgttaaatgacagtcaaatagctgctgcagactcagaatttgaaaggtcatcatgattacgcatccgacgcctacggtgagattttctacgagcccgattatgtattcctgatggtttatttggggaatttgaatgatggatatcttccaccggaggagcataaccaaaaagacaatcaagagggtcaccctccgacataatatcaggactcgcgtttttaaaagtacgcttggtctcaagatttgttcttttgctgtcggtgacattttcagacctgccttgggatttatcattagattcacgatcatgtgtcctatgaccatggactgcattatcgctaaagaaattccggtatctccatcttaatgtaggattattagaggttgaatcatcaaaaatcctctccgagtagaaatgcttagatataagcggcatcagcaaaggatcattctggtattttgtcaccattatattcgctaactccttttgtaatatactaccatccattgtaagaatctgatctgcataagaatacaaggatctactaaacatccacagtccacagaaagcaccagctcctgctgaaaggttgattcgaaatggttcactgagtttccaagttgcagcccatgcagctgtgcccgcagcaagtgcaccagcagtgaaatctatcaaagatttagatttgcatgatagaagaatatcttaacccccacagtccacagaatgcacctgctcctgccgaaagggtgattcgaaatggtttactgagtttccaagttgcagcccatgcagctgtgcccgcagcaagtcaccagcagtgaaatctctcaaagatttagatttgcatgatagaagaccgcctcctgaggtgtcaatatttccttcttggacatgagaacttgttcaaggtcaaacaatgcttcacccattacgctcccttcttagcttgccggctgctttcttcgcagaatccagatatactctctcttcttatgatcactctattctcaaaggctaggttgctttggtgggcttccattcctctcgcgggggggcctcacgtagctgactcga

SEQ ID NO: 3289 - DNA, 748 bp, Glycine max
  Clone ID: GLYMA-23APR03-CLUSTER192491_1
cccgtaaaactactgggtctctctcaagtttccaccttgttcctttctccgccgtcgcatcgttgctgtcatacaccgctgcccccgcccatgttgcacctccttcctccatttttcagtttttctccactgtgcatcagaatccacttttcatgtattctagagcgttcaatttgaagagttgcatttgagaaatggcatcggctttgatctcgcgttcttcgcgtaggtttctcaaaccttgttcttcttcggtatctctttaccctgccatcttcaatcctgtgatttcttctcaacaatcggcaagccaaaacccctctcaaaatcccccattcaagctaccccagctccaaagtttcaattttgagttccgtaaaactactgggtctctctcaagtttccaccttgttgcgcacgtgtccacgtggccttccaaggagaacaagaaccaccaaagtggtggtaatgtgagtagtagttgggttgaattgtacttgcctaggaaggttcagccctatgctcgccttgctcgccttgataagccaattgggacatggttgcttctatggccttgtatgtggtcaattaccctggctactaccccaggtcaccttcctgattttaaaatgttggctctgtttggatgtggggctttgcttttaagaggtgccggatgtactattaatgatctccttgatcgggatattgatacaatggtagaacggacaaagttgagacctgtggc

SEQ ID NO: 3290 - DNA, 1205 bp, Glycine max
  unsure (1)..(1205): unsure at all n locations
  Clone ID: GLYMA-23APR03-CLUSTER19254_2
cactccacaaaaattggnggcaaatatattacnacacttancaaaggtatacaaaagcatactctaanatgtaatatctgaaaaggaaagataaaggacaganacttgatttatctggctcattctcaggaaatttgccagtcaacttttctgagataagaaatacagaaaaatcatttatcaacctntnggttacctgggtaatatanaagtaaattctgaagcgganaaaaactacattcatccttaatgatcccatcttgcttcaatgacgtacatctcactaggttaagngacttanaatcaccatcaggttgctcttgtaactcctgaacagctttgcttaaaatttcaagacctgcatccttctcatgataaattactgggcttctaaaaattttaaacaatntgtagcacncacctttctctatcttaggagttttctgccgagacaacaaaatggggaatgttatattttctgtcatcagtaactggattaggtgcacttgatcagaagagtgaattgctttcaaacccataatattaatatgagggaaactcttttgaattgtcttcaatttttcaagcataatgccacagttaaaaatccttcaaactcatccagagatcaatttcagtcgcatgttcacgcaatttatcagcctttgttgagatcccgaataagactctgagcagaaggcatatgcattatagacaaagccactaagttcaaagctttgctagattgctgacagcagttacctggagagagagagggggagtaataaataatcacattagaattggttcagaaaattcatttattgaacataagagcaaatgaaaacaaaggagtgggttgggacttttgacagagtagagagagaggaaaaggcacttcgaaaaatataaaattttttagctcgatcgttgcagctaccaagcaatgcaggaggtagggcttgttccttctcaatcacatgatcttcctcttcgatggcctcgaacacactcgctctgagttcggcacggatcctggcaaggacgcctttcttctcgagagtgcgagtgaccagtgtcttcaggtccatcatttccctcgtgtagtcgtccatttctctctcgaacaattaacacaccaaactacttcttctctttttcttcttcttcttcttcttcttccctcttctgtgttgtgaatgtgc

SEQ ID NO: 3291 - DNA, 842 bp, Glycine max
  unsure (1)..(842): unsure at all n locations
  Clone ID: GLYMA-23APR03-CLUSTER1935_12
acaaattttcagctatccctcattgattgcaagaatggaactccgttgcttactgttctccatttctgttcttttcgctgtgtaataatcaacattagtcggtgggcaagtgtttatatatatatataacaacaacaaccacgccttatcccactaggtgggtcgactacatggatcaacttccgccataatgttctatcaagtgttgaaattgataatctccccatgcaaattgatgatacgcagtacccaaaaaccttcttctatgaacaagaccttcatcctggcaaaacaatgaatgtacaattcagcaaaagtccctttacacaaccttttacaatattgacatggttaaagggcttgaaaattaaagacattgataaagaaggatatacttttgatgagctatgcatcaagacaaaacctaatggagcagagcacaagttttgtgcaaaatccttggaaacattaatcggttttgcaatttcaaagctgggaaagaacattcaagtactttcaagttcctttgtgaataagcaagagctatacaaagtggaaggagtgcaaaatcttggagacaaagcagtgatgtgtcataggctcaatttcagaacggtggcattttattgccatgaagttcgtggaacaacagctttcatggttccattggttgctggcgatggaaccaaaactcangcacttgctgtttgtcactcagatacttctggcatgaatcgtcacattcttcatcaaactatgggagttgatcctggaactaacactgtttgtcatttccttggaagcaagccattttatgggtaccaaatttactatggacactg

SEQ ID NO: 3292 - DNA, 1052 bp, Glycine max
  Clone ID: GLYMA-23APR03-CLUSTER1935_13
ggagtcacaaattttccactcttcctcaccgacttgctagaatggaatttcgatgctcagtcatctcttttaccattctcttctctcttgctcttgcaggagagagccatgtccatgcatcgctacctgaggaagattattgggaagctgtttggccaaacactcccattcccactgcactgcgagagcttctaaagcctctccctgcaggtgttgaaatcgatgaactccctaagcaaattgatgatacacagtacccaaaaacattcttctataaagaagaccttcatccaggcaaaacaatgaaagtacaattcaccaagcgtccctatacacaaccttatggtgtatatacatggttaacggatattaaagacacctctaaagaaggatatagttttgaagagatatgcatcaagaaagaagcgtttgagggagaagagaagttttgtgcaaaatccttgggaacagtaattggttttgccatttcaaagctgggaaagaacattcaagtactttcaagttcctttgtcaataagcaagagcaatacactgtggaaggagtgcagaatcttggagacaaagcagtgatgtgtcatgggttaaatttcagaackgcagtattttwytgccawaaagkccgtgaaacaacagctttcatggttccattggtggstggtgatggaaccaaaahtcaggcmcttgctgtttgccactcaratacttytggaatgaatcatcacatgbttcatgaactcatgggagttgatyctggaactaaccctgtttgccatttccttggaagcaaggccmttttatgggtaccccatttatctatggrcactgcctatyaractaacgttgttgtttaattagtccatgsatctgcatyttgggcmccataagattgtatatamaataaattatggtgtgttgtgtatgttgtgcaaracctggaacttymcctttttacgtacgtgtgctgttaggawscagtgtgctttgatgatgctttgatkmaaaaaaaaawaaagaaaaaaaaaaaaaaaaaa

SEQ ID NO: 3293 - DNA, 637 bp, Glycine max
  Clone ID: GLYMA-23APR03-CLUSTER19387_2
gactgcaagctagtaggcaccaactctattaaataaataatttttaaatttcattaaaagtcaatagtgcctaatacatggtactttgacattatttctcatctagcagcttttgattaaataacttgaagttgaacaatgaataattcataccaacagcatgagtccaaatctctattgtaacattattccagccaacaaggtgaagatcaggatgatgaccttcattttccagcaagaacagctactatcctgaaaaattccaatcctttggtgaaagtctttactgcccatgaccgcctcagcttcatgacaccatcttcgtttaccaaattccactcagcaacctgtggcattagagtgtgtgctgcatcctcactcattggtcgcaattccttcagattgcatggcacacacttcttatctgtcagacgtgtgggcgagatccgagatttagcatccatgtttggagcaaatagatagatgatgagaggttggagagaagcacagggtaatactaaagggaagtgaacgaatctatagagaaattggataaaactttgcgcagcgcagagggtgccgcttatcattctagatcaactaaccgtatgtgatcgtttctcccggaagccgaatt

SEQ ID NO: 3294 - DNA, 1634 bp, Glycine max
  Clone ID: GLYMA-23APR03-CLUSTER194194_1
tcagctacgtaggccccccccccatcttcatctttatcgtttttcctccaacgacgtcgtttccatcgcaacgctccatcatcctcatcgaagattttatgattcatccaacacactctcacggcataaataaacgacgtcgttatcgcaataattcttcgtcatcggcgatttattaaaatcaaacgcctactgaaacgacatcgtcaccattgcgattctcatcggtgattctgattcatctaattcacgcgtggaacgtaactttttcgaaacgacgtcgttgtcgtagcaatgccgttcgcgcgatgcaacagccagattccggcgccgctgccgtcgccgattccgaccgggagaggcacgcggtccgccgcgaacgagatcttcagccagtttctcgagaagacgctgcagatcccggagctgacgctgccgggaccgcacctcccgcccgcgccggcggagatcgacttccggtcgctgactcttgtctccaccgatctgatgctgcgctctgccagggagttcggcgcgttccgaatccggtgccacgggatctccggcagcgaactcggaaccatggcggacgaagccgaacgcgtcttccagaaatcgcgaaacgtcgtcgtcgtggagcgcaacggaactggcggagagatgattccctgtgttcgctccagcaaaggtgcactggaattcgccgctcagacgattaccggcgaccaaacgcatcggaacttttgggttcacatggggaacgttgcaagtagattggatactatagttgagcaagtgactatggttctacaacacaaaacatctaaagagtttaaggagcggattcaagatacagagtcttggatttgcttgtgcaggtatccgcatgataatgttcccaaacaaaacgaagacacctcggttaagaaaaaagacaaattatgtgatcatgctttgcgcttctaccttcctatggagcaatgtatattttacgtccaaactgaaagaggtcccctgtcatttgacgcaggtccagagaacatagttgtcaccgttggcaaacaactagaggagtggagccacggtgtattcaaatgtgttcctggggaaatgatcttcatgccgagtttccagagtagccctgcctctttctccatagagcttgtgtgcttggcctcttcaaatgatctaagtcacagtttagacaattctgacaactgtgacaagataatatccttggctgatcaaatccttattgtattttgtctggtatttttatacaattttttatacttcgttttttcctgattctcaggacatgattgcaccgttttcatttatttggatgcctgttgcgtggtcatgatgtagctctcacccagttacacgattttttttccctgtattttatttataaaagccattctggtgtacagtttgagtgtaaagattatgggtaaaacaccagttacgacatgttgacatgatgttgtgggttgaaagtagtgaaaatgctgtcttcttacatattgaatagtgtaaaaacacaggaagcaaagatttgtagattgacaatttaattaattttatcaatcatggtttgtattattattattaaaaaaaaaaaaaaaaaa

SEQ ID NO: 3295 - DNA, 1510 bp, Glycine max
  unsure (1)..(1510): unsure at all n locations
  Clone ID: GLYMA-23APR03-CLUSTER19426_2
caacgagtttcaaatttccaagaataaaatttatcatatagcaactcattagtaattattacaaattccaaaacaaatagcctctatgtagataccgatatctgtctgcattattttcaaattctcaagcgcctccattttgattttatccttggttaccaccagtgctcttgctccacaggacctcaccatcaattccagtaagatgttgatcatcaaggcgtttccatgttttaattgacttgacatctccccaacttcctttccccgttttctccaagctagctaccaccacccttgctctcctaggccaccctgcctttccatacgcatggtatccaaatcccccaccataacaaagttgtatattcattagattgccgcagaagtcattgatgtgatcatggccagtgaaaactgccttcacatctcctgctgcaagcaaggttgtgaagaagccggagttcacagaaggagagctaatgccattgccatccggttcctgtttcacaccagtcatgtttgatgagtcaaaactagcatattctggcagagggatgtggaaatatgcaagaccaggagcagcatctttctgaggcactggtttacttatgtatgctttcttaagctttgcagatgttcgttggaaccaaagctgttgggagggcttgatccaatcataaccaaaaatagtagaaacttgggaataatctccactatcgagaaagtacaggttgagcactgatttattttcaaaatcagtgccttgtactcctccaacatccaagttatagttcccaaaaccatcaattatatgaacttctggaggattgaatttagataaggtgtttttcatcccaacaatatggttcatcacccctgccctagagagggttccttcctggtcatggttccccaaaacagccacccaaggaatgtttgatgcaattgcaggagcaaatgcagcatccaatgatttagctgaatccgaggaatcaaacccaaatatattatctccagtgaagacaataagattaggcttctcagctttgatcattctgttaagaaagatagtggtgttgaggtcagagcaagaaaaattctgggaaggaagcacattcaagcaatgcgtggtcttgccatttgcatagtgcatatctgccacctgcaatatcttgaattctccattttggtcaaaccttaggttctggttcggttgtggtgttggtgggtatgcttgttttgtagctgagacgcatatagtagtcagacaaaaccatgacaatgttaacaccaaaatcatgaaatctatacccatttttcccttggtgccaaaaacatttcttttacttaagatcatcactgttttgggaatttgggagcccaacaacaatcaaaatctcaacttgcacctgtgcctctcgtggggttaaagtggcaagtagatatataagtttgagtttgagcacatcaactttggaaagtaaagtccttatcttttatnttttag

SEQ ID NO: 3296 - DNA, 2073 bp, Glycine max
  Clone ID: GLYMA-23APR03-CLUSTER1943_51
gggtcatcgggaactagttcaatatcctagtataccttaataaataatttaagatatactagatgagagcgcggttcccattactgttgctgggagttgttttcctggcatcagtttctgtctcatttggcattgcttactgggaaaaacagaaccccaaacacaacaagtgtctccagagttgcaatagcgagagagactcgtacaggaaccaagcatgccacgctcgttgcaacctccttaaggtggagaaagaagaagaatgtgaagaaggtgaaattccacgaccacgaccacgaccacaacacccggagagggaacctcagcaacccggtgagaaggaggaagacgaagatgagcaaccacgtccaatcccattcccacgcccacgccaacctcgtcaagaagaagagcacgagcagagagaggaacaggaatggcctcgcaaggaggaaaaacgcggagaaaagggaagtgaagaggaacaagatggacgtgagcacccacgcccacaccaacctcatgatgaggatgaggaacaagatgaacgtcaattcccattcccacgcccacctcatcagaaggaaagtgaagagcgaaagcaagaggaagatgaggatgaggagcaacagcgagagagcgaagaaagtgaaagttctgagtctcaaagagaattacgaagacataagaacaagaacccttttcacttcggctctaacaggttcgaaactctcttcaaaaaccaatatggtcgcattcgcgtcctccagaggttcaaccaacgctccccacaacttcagaatctccgagactaccgcattttggagttcaactccaaacccaacaccctccttctccccaaccatgctgacgctgattacctcatcgctatccttaacgggactgccattctttccttggtgaacaacgacgacagagactcctacagacttcaatctggtgatgccctgagagtcccctcaggaaccacatactatgtggtcaaccctgacaacaacgaaaatctcagattaataacactcgccatacccgttaacaagcctggtagatttgagagtttcttcctatctagcactgaagctcaacaatcctacttgcaaggattcagcaggaacattttagaggcctcctacgataccaaattcgaggagataaacaaggttctgtttagtagagaggaagggcagcagcaaggggagcagaggctgcaagagagcgtgattgtggaaatctcgaaggaacagattcgggcactgagcaaacgtgccaaatctagttcaaggaaaaccatttcttctgaagataaaccttttaacttgagaagccgcgaccccatctactccaacaagcttggcaagttctttgagatcaccccagagaaaaacccccagcttcgggacttggatatcttcctcagtattgtggatatgaacgagggagctcttcttctaccacacttcaattcaaaggcgatagtgatactggtaattaatgaaggagatgcaaacattgaacttgttggcctaaaagaacaacaacaggagcagcaacaggaagagcaacctttggaagtgcggaaatatagagccgaattgtctgaacaagatatatttgtaatcccagcaggttatccagttgtggtcaacgctacctcaaatctgaatttctttgctattggtattaatgccgagaacaaccagaggaacttcctcgcaggttcgcaagacaatgtgataagccagatacctagtcaagtgcaggagcttgcattccctgggtctgcacaagctgttgagaagctattaaagaaccaaagagaatcctactttgtggatgctcagcctaagaagaaagaggaggggaataagggaagaaagggtcctttgtcttcaattttgagggctttttactgaataagtatgtagtactaaaatgtatgctgtaatagctcatagtgagcgaggaaagtatcgggctatgtaactatgactagagcttcaactatgaataaataaatcagacagcatatgatgcttttgttttgtgttcttc

SEQ ID NO: 3297 - DNA, 858 bp, Glycine max
  Clone ID: GLYMA-23APR03-CLUSTER1944_5
atgagttaatttcattttcgactacaagatatcttcttcccaacaaaaaaaagttgtaagggtggctggaattttcagcttttcattttgcccccaccttttcctttcatttcactatcattacttgagttgagcacgttcccgagacatctcaaatttcctctgctgagaatttcacgagtttatgagccacaaatgcaagtgggaacgaagaatggggtttggagttagtttggacaagtggtgtggtgtggtgtcctatgtaatgagtgcacatatgtgaagtgaaaattcctcatccttttcctcttttttcacgccttaatttctctctctctggaatttggagcaacagccagcactctatggattctctgcttggtaattggccatcctttgatcctcacaacttcagtcagcttcgaccttccgatccttctagttcttctagaatgacgctacccacttaccatcctacgcacagcaggacccttccagcacctgatcaagtgataagtacagaagccaaaaatatcctcgtgagacacatttatcaacatgctgaggagaagttgaaaccaaaaagagctgcatctgataaccttttgcctgatcatggatgcaagcaacctagggtttctagttgacagtggccatcaaccaactgttgtatgtgattgtgagtaagtttccaaaaatatatccttagaagagtttggtgcttgtttagaatttgaacgattttggccagttatatagacttgggagtgtgtaaacataaacctaataatcagtcaaaatttaaactgaatgaaacaatgacgatttcattgtgtatgtttatgccatattgttaac

SEQ ID NO: 3298 - DNA, 924 bp, Glycine max
  Clone ID: GLYMA-23APR03-CLUSTER1961_10
gatagggtttttgtcgttgcgactaagagttgctgcttcttccgccactcagcacttcgctccctctgtgcttcaccaaccatggccgaaatcgaagctaccgttccagatccctctcaaatcgacgtcaaacttttcaaccgctggagcttcgacgacgttgaggttactgatatgtctctggctgattacattggagtgtccccgtcaaagcatgctacatatgttcctcacactgctggtaggtactcagtgaagcggttcaggaaggcgcagtgccccattgttgagaggctcaccaactctctcatgatgcacggtagaaacaatggcaagaaactcttggctgttaggatcatcaagcatgctatggagattattcatttgttgactgaccagaaccccattcaggttattgttgatgctgtcatcaacagtggtcctcgtgaagatgcaacaagaattggttctgctggagttgtaaggaggcaggctgtggatatttcaccccttcggcgtgtgaatcaggctatatatcttctaacaactggtgcacgcgaagctgctttcagaaatattaagacaattgctgaatgcttggctgatgaacttattaatgcagcaaaagggtcgtccaacagctatgctatcaagaaaaaggatgaaattgagagagttgccaaggcaaaccgttgagcagcttgtggaagcaatatttgcgattgtgaagattttgttttggtctatgttattcatttaatgatattttaatcttttgcttgcattagttactttttagttttttgcctgctggcttctcaagttacgaatgaatgattttgttgcttggacgaaaatctaaggtgagttttagtagtagtctgtttcataaagtaatccaaaatcaaacgtgtcaaaaaaaaa

SEQ ID NO: 3299 - DNA, 2143 bp, Glycine max
  Clone ID: GLYMA-23APR03-CLUSTER1966_23
ggcacgagcttcaacttcacccattcatacgtggtgttgttactgctgctcttttctcttttcttttctctttagttctctcttcccctttctttttctttttcttcttcttctgagcttgtttaagctttccttccattaacatattatcacaatgtgtggtattcttgctgttcttggttgttctgatgactctcgagccaaaagggtccgcgtgcttgagctctctcgcagattgaagcaccgtggccctgactggagtgggctccatcaacatggtgactgctttttggcacatcaacggttagccatagttgatcctgcttctggggatcaacctctctttaacgaggacaaatccgtcattgttacggtaaatggagagatttacaaccatgaagagctcaggaaacagctgcctaatcacaacttccgaactggaagtgattgtgatgttattgcacacctgtacgaggaacatggagaagactttgtggacatgctggatggtatcttctcatttgttctactggacacccgtgacaacagttttatagtggctcgggatgctattggggtcacttccttgtacattggatgggggttagatggctctgtttggatttcatcagaaatgaaaggcctgaatgatgattgtgaacactttgagtgttttccacctggtcacttgtactctagcaaagaaagagggttccgcagatggtacaatcctccttggttctctgaggctattccatctgccccttatgatcctcttgttttaagacacgcctttgagcaggcagtcataaaaaggttgatgactgatgtgccttttggtgttctactctctggaggtttggactcttctttggttgcatccatcacttctcgttacttggccaacacaaaggctgctgagcagtggggatcaaagttacattcattctgtgtaggccttgagggctcaccagatttgaaggctgcaaaagaggttgctgactatctaggcactgtccaccatgagtttaccttcactgttcaggatggaatagattccattgaagatgttatctaccatattgaaacatatgatgtgactacaattagagcaagcacacctatgtttctcatgtctcggaagattaaatcacttggtgtcaaatgggttatctcaggagaaggatctgatgagatctttggagggtatttgtacttccacaaggcacccaacaaggaggagttccacagagaaacatgccgcaagatcaaagcacttcaccaatatgattgcttgcgagccaataaatcaacatttgcttggggtctagaagcccgtgtaccatttttggacaaggcgtttatcaatgctgcaatgagtattgaccctgagtggaagatgataaaaagagatgaaggacgaattgagaagtggattctgaggagagcctttgatgatgaagagcatccttatctgccaaagcacattttatacaggcagaaagaacaattcagtgatggagttggctatagttggattgatgcccttaaggcccatcctccaaaacatgtgactgaaaaaatgatgcttaatgctggtaacatttacccccacaacaccccaaaaaccaaggaagcatattactacagaatgatctttgagaggttcttccctcagaactcagctaggctcactgttcctggaggagcaagtgctgcatgtagcacagccaaagctgttgagtgggatgctgcttggtctaacaaccttgatccctctggtagagcagcacttggagtgcacatttcagcctatgaaaaccagaacaacaagggtgtagaaattgagaagataatacctatggatgctgctccccttggtgttgccatccagggctaatacaaagatgtgacaaagaatttgggcgacaatgaagataactaagctaaaggtgaatgaaaaatttgcctgcagtgtaatttcatctgggcaaagcttttatagtttatagttataaggctttctcaaaaagtgttgcgtattgtattatcttgaatgctgtgatttgaagtcttaataaaagtgtttcctttatcagttcccaaaaaaaaaaaaaaaaaaaaaaaaaaaaaaaaaaaaaaa

SEQ ID NO: 3300 - DNA, 1406 bp, Glycine max
  Clone ID: GLYMA-23APR03-CLUSTER19783_1
ctccatttgaacttcaaatttgtctagttttttttttttttttttagttattagtttctcattaattgtatatatgacataagacacagagatacacgtcaggttccaaatgtacatgtctaaaaactagtatgataataagagtatgtttttttgtattgacataagatgtgaaaagtttcatcagcatcacttggtaacccagttactcagattttggtgattgtagttatatcaccaatatctgctgttgttgatgccaaagcaaattagcatgatgttatcaggcccaagttataagcttccacttgggtttattgtatcacgcaacatccattatactttttgtcttccacagaaacttgcattgaatctcagtaacaattaaacttcagttattttcctcttctgtgtcggtctttcttttttctccagtttctaatgacattctgttcgtagatgaactgagaaactaaagccacaagagtagctccaagaactgctatttttttccaatcagttgatgatgaggcaatagaatcaactattgcaaaggtcagtaggccaataaagaggaggtaaaagcctttccttgttctgctaccagctttttctctggctacatctttgattttctctgcctcctccttggcttttgatttgtcaacaggtgtcctccttctgaggttcttaaagaacagcccttcatttcttccatcctccatttgaacttcaaattcacctagttctttttcatgctcctgaatctcttgtctgttaagttctgcagattcctcaaactccaccatctggctctctatgtttgctgttatctgccaaacacaaatgaacacaataagcggtcattactaaaatacctttcacatatcgattttcctccatgccgtgcttgatgattgattggctagtgtgtatggcacaagagacagacttttaccaaaccatggtttgagactttccaaatgcaaaaaccaaaaatacactacattgttaactcaaaagttgaagcatacaatggcactagcttcatctaatccttggagggcatcttttccaatcttgtcaaactcggccttggcttcttcaccaaactgggttaagtattcagatctctcatcaaaataatctgtgagacaaactttctgagtttgaagcatggcaatttgggctagcagttcttgtttacgaatatctcctggttggggagcttgagattcagattcattggacttgcagaggcacaaaacagaaccttttgtgttgaggcatctgcttcggttgataccatatttgatattggtaggagtgaagaaaggatgaagggaggggggtgcaatcatctttacataacaatgcaagcatgtatttgcttgggttagaaaaac

SEQ ID NO: 3301 - DNA, 1362 bp, Glycine max
  Clone ID: GLYMA-23APR03-CLUSTER19902_4
agaagccaccctctcaacagaggcaaagggcaaaaaccatcgatgatgtttctctgagtctgaggattcacgcgttactgttacttgaaaaaagaagaagaagaaaaagtggttttggagaaatggttgagcaatcggtgctggtgctcgaaaagcaagggccaaatccagtgttatcagaaggaatccacgattgggtgtttgagtgccatgggcttttgcacaatgcggttttgatcatcgcttcttttcttttcgtcttgtacttagcactgcaagctaaaaagagcttcctcagactctcccatggccgctcttatatcattatatcctattacgcttccctctggcttgtcagcatccttaatcttctttggtgcttttcccaggcgtgggagtgctctcctgggaaagagtttgcgtggaacttgttatccctctttactacttctggaatgttgtttctagaagtgagcttgctggcttttttgcttcaaggaaatagtaccactggcttagaggcgttgacacgaacttttggtatatcagggattattgttggttttgatatcttgttgaaggtaattctgtcgttttctctgtgagcttgctgcttgtcgttattataattaaagtgtatgaattgttgcaattgcaccttttccttgttaggcaatatatctgtttgcatttgggattccaattttcatcaacagtggttaccctactcctcacgtgaagtggaacttgtgggttacccacaagctgctgcttacccttgtttatggtttcatactgttcatgtatcattctaggtggagagaaaggttacctgcaaggcctgcttactataagtatgttaccattatgttcatcttgaatgcaattgcgctgtttgcttgtggcattactggaaacggcgctgcttttggtttctggttatatcatttcacggttgtatgttaccatgctgcctatcttcccctgctgtatataaccttcctggctgacttttttcaggaggaagatttgcatttggagaatgtgtactactctgaaatgaaagatgctggtttctttgaagcagattggaactgatgtggtatcgactgctagattaagattaataaggcctcaaaggtactaatggaagggcattcgttcacgaaatttgtaaataaagtaaatattttagtagatcgccttagtagataaatttttaaaaagaaaagctggtagcctcatgttagtgttatattagaatgttctatgcgtgattatattgaatttaagttgtctgttagtgcaatgaatcaatttcttaagaaagatgagtactagaacaatcaattacctttaagc

SEQ ID NO: 3302 - DNA, 1801 bp, Glycine max
  unsure (1)..(1801): unsure at all n locations
  Clone ID: GLYMA-23APR03-CLUSTER1993_20
atttctcttcactccttcgttcactcttcttctcttgcggctagggttttagcgcagcttcttctagatttaaggaagatgggtaaggaaaaggttcacatcagtattgtggttattggccatgttgactctgggaagtccactaccactggccacctgatctacaagcttggaggcattgacaagcgtgttattgagagatttgagaaggaagctgctgagatgaacaagaggtctttcaagtatgcctgggtgcttgataagcttaaggctgagcgtgaaagangaatcacaattgatattgccttgtggaagtttgaaaccaccaagtactattgcacagtcattgatgcccctggacacagggatttcatcaagaacatgatcactgggacatcccaagctgactgtgctgttcttatcattgattccactactggtggttttgaagctggaatttcaaaggatggacagactcgtgaacatgctctgctttcattcacccttggtgtgaaacagatgatttgttgctgtaacaagatggatgctactacaccaaagtactccaaggccaggtatgatgaaattgtgaaggaagtttcttcctatttgaagaaagtaggatacaaccctgacaagattccttttgttcctatatctggttttgaggganacaacatgattgagaggtccacaaaccttgactggtacaagggtcctactctgctanatgcacttgaccagatctctgagcccaagaggncttntgacaagcccctcaggctaccccttcaggatgtgtacaagattggagtgtattggaactgtgccagtgggacgtgttgagaccggtgtcttgaagcctggaatggtggtgacttttgcaccaactggactgacaactgaagtcaagtctgtggagatgcaccatgaatctcttacagaggcacatcctggtgacaatgtgggattcaatgttaanaatgttgctgttaaggatttgaagcgtggttatgttgcctcaaactcaaaggatgaccctgcaaaggaggctgctaacttcacagcccaagtcatcatcatgaaccaccctggtcagattggaaatggctatgcccctgtcctcgactgccacacttctcacattgctgtcaagtttgctgaactcatgaccaagattgacaggcgatccggcaaagagcttgagaaggaacccaagtttttgaagaatggtgatgctggttttgttaagatgattccgaccaaacccatggtggttgaaactttctctgagtaccccccacttggtcgctttgctgtcagggatatgcgtcaaactgttgctgtgggagtcatcaagaacgtggagaagaaggatcctactggagccaaggtcaccaaggctgcccagaagaagaagtgaatcgtgcggtttggttcatcaggggatgtcgtttcttatggttacaataaatgttggtttcttgcccttgtgtcttcgtttctaggtagcttgtttttcggacatagtttgaagtctccaccatcatctcgcaacttttgttcccagaattgggttcttgatcgacggtggcaagactccttttatcattctgttttaatgtgttgtgtttgtgagaacccctgattacatttttgttaagcgcagcgagttttagggctttgccgttgcgttgttggtttgctttttaaatgtcaactttatatttgtgttcaatttttgcttggtttgcttttaaaaaatcaaatttatgtgtcaaattttggctttggatatttt

SEQ ID NO: 3303 - DNA, 990 bp, Glycine max
  Clone ID: GLYMA-23APR03-CLUSTER1993_21
actaaaaaatattgtttgttacgcagaaattctaaattacgctggtgtgccctcacgctcagttggccttatccgtatctctttgtttgggtgataggatacaacaccttcttcttagcttagcaatggcatcgtcttcgctcacttcagttcctctctcatcttcttcactcaacattccacattcttcctccaaagcttccgctagctttgtatcttctccaattggcgcattctctcgcacccccaaaaccctgtttgccgaatcaaggttccactttcacccgaagagaaacgattatgggttttccatcaaagcccagaccctagacttctcggattcattcttcgaagggggtttcggctctgaagacgacccttcttctcccggcggacccggcttcacggccgtggaggaaaaggaggaaccccaatgcccaccgggtctcagacagtacgagactatgatggttttgaggcccgacatgtccgaggatgaacgacttgcgtcaaactgttgctgtgggagtcatcaagaacgttgagaagaaggatcctaccggagccaaggtcaccaaggctgcccagaagaagaagtgaatcgtgcgggctggttcatcaggggatgttggttacaataaatgttggtttcttttctgtactcttgtgtcttcttttctaggtagcttgtttttcggacaaagtttgaagtctccaccatcatctcgcaactgttgttcccagaactgggttcttgatcgacggtggcaaaattgcttttatttatctgtgttttaatgtgttgtgtttgtcggaacccctgattacatttttgttaagcgcagcgagtttcaggactttgctgcgttgtgttgctttggtttattaaatgtcaactttctatttgtagtgttcaaaaaaaaaatcagcatgggaaagccaaggatcatgttcaacaacaatgatatccaacctgaagatgcaattgag

SEQ ID NO: 3304 - DNA, 951 bp, Glycine max
  Clone ID: GLYMA-23APR03-CLUSTER1993_22
agaaattctaaattacgctggtgtgccctcacgctcagttggccttatccgtatctctttgtttgggtgataggatacaacaccttcttcttagcttagcaatggcatcgtcttcgctcacttcagttcctctctcatcttcttcactcaacattccacattcttcctccaaagcttccgctagctttgtatcttctccaattggcgcattctctcgcacccccaaaaccctgtttgccgaatcaaggttccactttcacccgaagagaaacgattatgggttttccatcagagcccagaccctagacttctcggattcattcttcgaagggggtttcggctctgaagacgtcccttcttctcccggcggacccggcttcacggccgtggaggaaaaggaggaaccccaatgcccaccgggtctcagacagtacgagactatgatggttttgaggcccgacatgtccgaggatgaacgacttgcactcacccagaagtacgaagaggtgcttgttgctggaggtggcatgtatgtggaggtttttaacagaggagttattccactagcatatagcatcaagaaaaaaaacaaagcaggggaaaccaacacttatttggatggcatctacctcctgttcacctacttcaccaagcctgaatcaataacccctcttgaggagacaatgctaacggatgataatgttatccgatcaatgagttccaaaattaggaagaggaaaaattagtttttttttttaagtttcgagtaactccttgaaggagatgcttatagagtatcatttgttattatgtattttttccccgtttcatttggattcaaggatttttgtagcatggttgaatttaattaaaagagagatgtaggtgctatcacttgcagtctgcagagttgccatgccctgtgcagtggtggcaatcaagttgtaaatt

SEQ ID NO: 3305 - DNA, 1169 bp, Glycine max
  Clone ID: GLYMA-23APR03-CLUSTER1998_21
tcagctacgtaggcccccccccccccaattaaattttatcccactggtcttttttattcccatatcatgtgatgcattcaactattgcatgttgttatcttaattggccttgctagttgctactacttcactttctataatctgtgttggaagacatcatggttcagcacttcaattttcttttctagggggagcatgaactgagttgcaagctttttggtttgattatatcaactcaattaagaattgtgccatgtaacttttgaagtccattaggaaccatggaggggagaatgggactcttgtttcttgttgtattgggtgctgcatgggcttgtgatgctagagaactggctaaacctgatctattaagcaaactaagcagaaaaccagatgcgtgtgcactttgtgaagaatattctactaaggtacttgattatctgaatgaaaacaagacccagcaagagatcattgacatcctgcacaacatttgccaccaaacttcctcttttaagcagaagtgcattactttggtggactattatgctcctcttttcttcttagaaatagttacaatccagcctggagaattctgccacaaggtcaatctctgtcagctcattacatatatttccttgctagttcaagaagataccagtgggttttgcaaagatactgtttcaactctatcggctaagttgaaagacagtgacactaagctagagataattgagacatcactgaaggtgtgcaattcagtggagaagtatgcaaataagtgcaagagaatggttttggagtatggacccttggtttttgacaatgcagagaaattcctggagagcacagatatttgcactgccatatatgccatgcaaatcttcaacagtggctggccagcaaacctttctttcagattcttatggaaacaacgttctaacagatttgtgatgtacttgctgcagaagattgccatatatataacaacacaatgagggagagggagagcacaaattctatacattatcagtgtcaagtttttaatactataattatgtgtctataggtcattagaaaagtcaagtcttcctatgtagtgattgtgatactcaagtttgtttaataatttgtcaatacatatttgaatgttcaaaaaaaaaaaaaaaaaa

SEQ ID NO: 3306 - DNA, 1078 bp, Glycine max
  unsure (1)..(1078): unsure at all n locations
  Clone ID: GLYMA-23APR03-CLUSTER1999_8
gccactaccatttccaacaacatagccatgccctccatgaagacctcatcgtccaaaacctccgagtcctcgactcagttcgactcgccccactcgcctctccgatccttcccgctcttcgacaacgccgaccccttccactcgccgcaaaatgacaactcccgcgccatcgtcatcgtcgagacaacttcgactcaattcgcccaggccgcgccccccgcgccggagtccgagcaccggaacccgcctccggaggccgtggtcacccgccccgtttggccggagacgaagtcgtcggccaccgttggtcggacgcgaccgaggccggtggcgccgcccagttcggtggtgccgaagagagaaatgatggcgaaaaaagttgcattagggtttcggttaagcgaagtagtgctgtgtctgatttcgttttcggttatggccgcggacaaaactcgtggttggagcggtgattcttgtgatcgctgttgaaattgcaggtattgtttgtctgtgaatgtaatcgcatttgtatacgctgcgtttcaagcgtgtgatctggcgtatcaggtagtaacgggaagacgcataatcaatcaccacctgcgttaccactttgatttcttcatggatcaggttttggcgtatcttttggtatcggctgcatcatctgctgctacacgcgttgatgactggcaatcgaattggggaaaagatgatttcacagagatggcgagtgcttcaattgcgttgacctttcttgcttttgttgcctttgctattagctcgttaatctctggctacaacctctgcactctgttctcatagcaacattttaacctcgtataagctgtctttccattgtacacacaactacacactttttttttcttctttctattcctctattcttactgctgtggaggaatgcattcatgagtgttggtgccagtgatttttttttactgtacagatagacttgtatacgtacaattgagggaatactgttcgtcttaaatccgaaggatggagaanggaatntttgtgttcaccttaaatacaattaaatgattgtatttta

SEQ ID NO: 3307 - DNA, 960 bp, Glycine max
  Clone ID: GLYMA-23APR03-CLUSTER200036_1
gatcacacctcacaactacacattcattcgtgagcacataattacacagcacaacagatctctgagtattagagactttaccaatacacaaatacactattacatgttttttttttttttttgattaaaactccccattcataatagtattccgtaatcatacataactcaaacttacacgtgcatcaacacagaaaattacacaacacaacagatcttagagaattagagaccaatccaaattcacaaatagacaattacatgaaacacattacaatacactaagcacacggaagggagtcataagttgttttggtggttggagctataagaaggccaaggttagaatctcccactaataaaacattaattattaaatctgtcaatataaaaataaaactaagcacatgcgcaagaattattatcaacaacaagcgcatcatcctccccctcattcctgaagaaaaaataaccaatggtgagacccaccacaattgctaaaaacacccctccattgaaggacatgatcgccaacatcaacaagtacccgatcgcagagttcaccccgaacagaaccgcttccgcgaacttgacgcccaacctggcattgtcgccgccggcgacgccccaccggagaagaggggtgcggatctccggcgccggcaagggcctccggtcgccggcgaggagcttcaggcgaatccggcgattctcgaggtactgatagaacgcggcaacgacgaggcaggcgagtagactcaggacgtaactcgtccaggaatcggtcttccatgaatcgatcaagatcgtcaccttcttgccccagtaaagggtcaagtgcatcattttcgctcttgaaaaattatcagagagacacacaacaacgtgaagaaaaaaacgctgttttgaaattttccttgaaattttcgagggtgttgttcacagagtacaaggaataag

SEQ ID NO: 3308 - DNA, 3294 bp, Glycine max
  Clone ID: GLYMA-23APR03-CLUSTER2003_1
acaatgattgtgatgaggataatgaagagtactgttggcgtctgtttcttgtttttccttttattggaagcctttcgctgtgaaggctgttggaaggaagagagagatgctcttttgggccttcattcccgctttgtgaatccttactacacctcggacggtccagattgttgtcaatggggtggagtcaagtgcaactcctccactgggagagtggcccaactctatatttctttgcccgaatatagaactctaaattactcggattttgttgtcttcaaagatttgaaatgcatcctcatctcttaagtctctgtatttaagagataatagcttcaatgcatcctcatttcacggtgaggctacctatatttgtcttttttattttaaagaaatgacaatataaaataatatttctgattattatgatcttaaaagaactaaaaaaaaaattcctgatggcttggagacgattcttatcgttccataatcgatttaccgcttgtcttcaatgcaacttttataacgctatcaaaatttcattttcttcattaaggaatcttgaggtccttaacttgtccagtcacaatttcaataatagtgatatttcttctgctctttcttgacttaaattttattaagactccggtctttgtggcccagcaaaccttgaagattcgacgccgatcggtttctccccacttaatttggtgggtcatagatcaaatttcgcgtttcctcccgcggcatttggccttgtgagcctcaatcgtctttgtggaggccccaatcggttggcacaagcgctgaattttttcgccttgtaagaccttagctccccagaggtgccccaccacagtagtcagctacgttggccccccccccataaaaggtcaaattttctccttttaaaaggtaatcactttatgggggatataccaaagcagatatgccagttgatagatttaaacatgctagacctttctcataacaatttttctggtgttatccccaaatgcttaggtaaaatgccttttgagaataagtacctgaagagcttgttagcaagattttctacctttgatccagatcccaataaccttgcccaatctccggcccttgcccaatctccgacctcggtatctgtgccagctctagatttgccacagaaaacaatgaagggtaatatcccatttacgctcgcatacttgacgaaagttcgtgcatttaactttgcaaacgattattctcccaataaaatgccaggtaaaatctcattgttgcctcaatccttgactttagttcgagcatttaacttatccaacagtcattttactccgcaaattccagttacatcatcactggtggcacatactgtggctcaggatctctcatttagcacgacacctggttaaattggtcctcaacccacattcaaaaaagaccgatatgctgttaataagttgctctgtcactggtcacttccaactacttatgcttctccaccctatcatataccaaatgaatgaatctatgagggtaatactttcctttgtgggcctcaacagcttaagtgtaataactctccacttacatttatataaactgtctagaaaaatgatccaaggatcaatccctatcctgataggccaaatgaatgtattatattcattggatcttactggaaaccaattgtcagaagaaataccgaagcacatatttggagttggtcaccgactccatttcttgaaactatcgaacaataggcttgagggacctactttgaaaatccctaatggtttgaagaccttgttatatgaacaataatgctttagcggtagactcccaaacagaatttttcacgcatccatcatttcattggatgtaagcaataatcatttggtgggaaagattccaagccttataaaaaacttgtcaggattgtacgaactttgtttgtctaataaccattttgaaggatccattccattagaacttggagaacttgaatatctaacttctttagatctctcccaaaataattttattggtcttgttccatcatttacaaattcttccgtggcatttatccatttgaacaacaatcgtttaagtggattgtctaaaagaatgttccatggaaactcttctttagtgatgttagaccttagctacaatgaaatatctaacaaccttaaagatctgatacataaccttagttataaaaggttaaatattctccttttaaaaggtaatcactttatgggggatataccaaagcaactatgccagttgatagatttaaacatgctagacctttctcataacaatttctctggtgttatccccaaatgcttaggtaaaatgccttttgagaataagaacccgaagaacttgttagcaagattttctacctttgatccagatcccaataaccttgcccaatctccggaccttgcccaatctccaacaccggtatcgggaccaactctaaatttgcaagagaaagcaaatttcactacaaaggaaagaactgacacttacatcgggagagtccttttttatatgtctggaattgacttatctcacaataaactgaagggaaatatcccatttgagcttggatacttgacaaaaattcgagcattgaacttatcccacaatgatttaactgggaaaattccagttacattctccttgttggcacaaacagagagtttggatctttcttttaacatgttaaacagtcaaattcctcctcaactgagcatgttaacatcacttgaagtatttagtgtggcacacaataacttatcaggtccaacaccagattttaaaggacaattttccacatttgatgaaagcagctatgagggtaatccgttcctttgtggacttccactgccaaagagttgcaatcctccacctactattataccaaatgactcaaacactgatggagacaatgatagtttgttggatatgtatgttttctgtgtgagctttgccgtgtcatgcacatcagcattgttggtaactgcagcagctttatacatcaatccttattggaggcaggcatggttttactacatggaattggtgagcatgaattgctactactttatcaaggataatctgagcaaggttttcaaaattggaaatatgtaatatatcaagttgtatgtctagaatgatttccatgtgtttttgctaagtttgatagaataaaggttatgtataagttgtatgaaaataatatgcttcgtatatgccattcatactatgttaattatt

SEQ ID NO: 3309 - DNA, 1416 bp, Glycine max
  Clone ID: GLYMA-23APR03-CLUSTER20220_1
ttatcctatttgggtggatggtgtgtcacatgcacctgcgtgtgcttagaacctgtgtcctttgaatagcatgtttggaagggaaaagaataaatacaatatcttcccattcctctgtgtgtgatctttggaaggagatgggtcgtcttgctacattatcagaagaacccatcaacgaccaagacaacaagagaagcacctcttcaagctcaaaaaaattggcgaaactggaactggatcaagacccacttcttccacaagaagcccgacctcaagatcctcctcagcgttctcgcctgccctctcttccctgtccctccaaacaccccatcggacccacccctcaaccagctctcttcttcagctcagtatatcatccagcacttcaccgccgccaccggctgccggaagctggaagggacggtcaagaacgtctttgccaccggaaaggtggaaatgtgggccgtggatgaggtcggaaacaccggagtctccgagagaggctgctttgtcatatggcagatgctccccgacaagtggcagattgagcttgctgtcgctggtcacaaggttgtcgccggtagtgatggcaccgtcgcctggcgccacactccttggctcggggcccatgccgcaaaaggcggcatccgccctcttcgacgggctgttcagggactggaccctttggcagtgtctgctgtattctctgcagcacaatacatgggagagaaacaaatctcaggcatcgattgtttcgttctaaagctgtcacctgatcagaaggacctcgttgaccgaagtgacaacactgctgagatgatcaagcacgttgcatttggctacttcagccagagaaacgggcttttggtgcacctagaggactcttaccttactagaatccaatcccctgggacacaccccacgtactgggagaccacaatgtcaacgaaaattgaggattacaaaatggtggatggtgtgatgattgcacatgctggccattcaaccgtgatcatcacaaggtttggggacaatcttaaaacaggacctgccatcacacggttggaagaatcatggaccattgatgatgttgcattcaacgttcaaggcctttccatggactgcttcataccccctaaggaactccacaaggactacccacaagaagatctagattggagatcacccttgcatagatgatgatgatcatgaattcgtgatcccaaacaaaccttggttggaggagtttttgtattttttttctaaataactgttgttattgatattgctaactgttactactattacttaacatatatatgtagattgctttgtaatagtgtattactgattttgggcatatatataacagatctcatctattaattgttgtgtcaaaaaaaaaaaaaagaaaag

SEQ ID NO: 3310 - DNA, 1254 bp, Glycine max
  Clone ID: GLYMA-23APR03-CLUSTER2027_17
gagtggaaaatggaaataaagtgcaatgacagcgtgaaaccgatgggagagcttctgccttttgtccatgggaaaaacgaagagtgacaattgaggtcttccccgtttgatttatatgaatgaagccatagggaataagaattccacctttactacttatttttgtttatttagtttgtgttcacgaacaatgggataagggaggaaagtagggtgtatgcctagtggtgagccaaaccttcaactttgtcacaatcttaaaggctggtgttggtgccaattgagctacaagcttgttggcatactgctttattgttattgtagaatgtgtttttcgctttaaaaataatatagtttaacaatatgttcatttgtggttgttcttcataccgtgtcattgttgatgttcattccataaaaaatatgaacaatcaacaatctgttatggttggtaactgctccaattatctttccttctttgttacctttataactagcaactagtgaccagtaactgtaagcatagtagcatactccagtactctcatcaaccaattggttcaggttcaatcttctgatcagtttcatgaaacagaaaaaatagttggaattgataattggagaatattccccctttaatttttgtttatgtccacagccttattgtgctgaggtgggttgcattattgataaatatttaaatcaacaatggtttgtttgttatattaagtgatcatcacagcaaatacatctgtgtaagaaacacatggtgttagatctgatagtaaataagctgagttaccgtacgtctttttggcaggggcaattcccttaggaatccagcttccaaagcttacgaacaggtgtttgcacctcaccatggttgggcaatcaggaaggctgtttccgtgggaatgtatgtccttcctacaaaggaacagcttctgaagaaacttaatgaggatgaggcgtccgcaaaaggccacatgcaaagttatgtcactgcttccgcgcctctaatccaatacattgacaaactctttgtttctagggacttgggaatagattggtgaaccttggattgtggagtatttcagattgtacaatataatttgctattattaaattatatgacataattaatgtatttatgattactaagtattcatttgtttatattgcaatagatgtcagtgctaatttacaggctattgagatgctaaaaaaaaaaaaaagaaaaaaaaaaaaaaaaaa

SEQ ID NO: 3311 - DNA, 1382 bp, Glycine max
  Clone ID: GLYMA-23APR03-CLUSTER20285_2
ccagttcaatgatattttaacaagtaggtttgtactgtttcgtattatatccgaatcaaatggtaatggtacaatactacaattttatattgtacggataatttgatgaaaattgaattatattgggtatcataatatttacatacaactcttgatttctgtcaaatctctttttatttaaatttatccaacaaaatacttattttctatattcttgctaattagcagtcccgtattgcagtttagagtttaaaaatcatacaagataatagttgattagttgacattggaattgtaaaaaactctttacactcaattataacaggttttggcagacaatagtatgtatggttgttgaattcaaaaggagatgattcaagatttttgttgttgagtaactacattctgatatttgttcagtttatcaaccaaatgggcaagcaccgatatcttctacggacaagctactcgcaccacaaggtcgaggtgatggcattgatgaagtacattacacaccaccaaggcggctaaggacagatgaaattcctcatattgtcaatgacttcagacttgctgctaggaatgctatccaagctggtaatttcccttcccttttgctcctacaaatgttctttcaaattgttttacaaactagactagcatacccgtggttgtgcaaattataggttttgatggagttgagatccatggggctcatggttaccttattgatcaattcctgaaagataaggtgaatgaccgaacagaccaatatggtggatcccttgagaaccgttgtcgatttgctttggaagttgttgaagctcttgtagatgagataggggcggaaagagttggaattagactatcgccattcgcagaatattcagagtctggagactctaatccaaaagaattggggctttacatgatgaatgccctcaataagtatggtattctttactgtcacatggtggaaccaagaatgaagactgttggagaaaaaactgaatgccctcatagcctggtgcctatgagaaaggccttcaatggcacttttatagccgcaggaggttatgaccgccaagatgggatcaacgctgtagctgaaaacagggctgatcttgttgcttatggccgttggttcttggctaatccagatttgccaaaaagatttgctctcaatgcccctctcaacaagtatcaccgggagacattctacactcctgatccagttgttggttatactgactacccctttcttcatgctgaagaatccaatgttgtagcatcttagggtagacgagaatgtactatgctatgctaactacaataaaaggtaattcataatttttcttttggggggggggcctacgtagctg

SEQ ID NO: 3312 - DNA, 481 bp, Glycine max
  Clone ID: GLYMA-23APR03-CLUSTER20386_2
aagcttatataacaaacccaaataggttcccaataagaaagaagagtcatcacaaggaaaaaggggaaagaaaagatgccttgcctttacatctccaccaacataaacttagatggagttaacatcgatccaatcttttctcaagccaccactgcagtttccacaatcatcggcaagccagagaagtttgtgatggtcatattgaaggggtcagtgccaatatcttttgagggtaacaaagaaccagctgcatatgctgagatagtttcaatgggtggtataaatccagaagtgaagaggaagctaattaataccattggcaccatattgcagtccaacctatctataccaagaacaagattttttctcaaagtctttgacacaacactattccgtactaaatccaaaatgtaataatatgcttgatctgattatgacatgccacaatattgttccctaatcatttatcgatgagttttaa

SEQ ID NO: 3313 - DNA, 1721 bp, Glycine max
  Clone ID: GLYMA-23APR03-CLUSTER2038_1
ataaagattttttattttttctttgatctaactaacaggatggtcaagtcatgttgcgttatgtgcttgtgtttgatcttacttcacattttcctgcgctttgtgccaatacagtcagcacctgaaagtgccattgtgacacagattcctggcttcagtggcactctaccttccaagcactatgctgggtatgtgacggtggataagagtcatgggaggaacttgtactactattttgttgaatcagagggtaaaccttccgaggaccctgtggttctgtggcttaatgggggacctggctgctctagcttcgatggattcatatatgagcatggtccttttaattttgaggcagcaaagacaagggggggtcttcccacactgcacctcaatccatacagctggtcaaaggtttccagtgttatatatttggattctcctgctggtgtggggttttcatactcagagaataaaactgattacataactggagacataaagactgccactgattctcatgcctttctccttaagtggtttgaactataccccgagttcctttccaacccgttcttcattgctggagagtcatatgcaggagtttatgtgcctactctcgcttctgaagtagtgaaaggaattgatgccggggtggagcccaaactgaatttcaagggttacatggttggaaatggtgtcacagatgaacaaattgatggcaatgctcttgttccatttgtacatgggatgggacttatcccagatgaactgtttgaggaggttaaccgtgagtgcaatgggaatttttatgatccaacaagtgctaattgttctagcaagctttcaaaagttgatgagttggttgatgagataaacatatataacattctagaaccatgctatcacggcacagaagcagagaagattacagaatcctatattaggatgccatctaccttccggaagttgggtgagaccgaaagaccttttcctgtgaggaaaagaatgttcggtcgtgcttggcccctaagagctcctgtgagagatggaattgtaccaacttggccacaactgatgaatagtaaatctgctccaccatgcacggacgatgaggttgcaaattcatggttaaacaatgaagcagtcaggacagcaattcatactgcacagaaaagtgtggtcagtagttgggatttatgcactgacagaatttacttcgatcatgatgctgggagcatgatcaagtaccacaagaacttaacttccaaaggttatcgtgcacttatattcagcggcgatcatgacatgtgtgttccatacacggggagtcaagtgtggacgagatcagttggatacaagattgttgatgaatggaggccttggtcatccaatggtcaagttgctgggtatacacaaggatacgacaaaaatcttacttttctgaccgtaaagggatctgggcatactgttccggaatataaaccacgagaggcattggacttttacaaacgctttctcgctggattgccaatatgatatagaggaaaagagaagatggagtaacgctgcttcttattttgtttgtactttgttaataataatgatttaaggatgtatgaagacacattttatatttgtgttctatgtttaccttattaatttattaccatattaatattaaactagatgtcaacctagtttgcacaaaaaaaaaaaaaaaa

SEQ ID NO: 3314 - DNA, 1538 bp, Glycine max
  unsure (1)..(1538): unsure at all n locations
  Clone ID: GLYMA-23APR03-CLUSTER203945_2
tctctctctctctgctttgttcgcaggcagtaacttccagtgagcggcggatgtatttgtttattgtaattggtagatgcatttgaggtgcatcttgtgaggtcatctgaaagatggatcttgagggcaaaaaatttgggaagggcaatagagaatttggaagtactcgtgatctcataaatcagaatagactttggccctactataaattcttctgcaagaagtcactcccagtgtcaatttcagagacacattatcttcgcaatgtggtgggtgacacaaaaatcaggaagggagaaggaatggaactggatcagctctgtaaaaacatggacacgagtgagaaaaaaacttgcatgtgtccttttgacttggatgtactaagtgaagctttccatatgagggatatgaatccagtccacctttcttctgtaagatttttctggttgcgcatttgatcctatttttaaagaaaactgaatagttccaattcacgtttgattttaaaaagacgtgttgtgctgatgtgttatacaaaggccagaaggggctaccaaatgcagtgcccaaattagagaaccagtttagagatcatgagaggaagaacaaaaaggtcaaagataaaggtgagaagtataggaagcagaagcatagattacatcgaataaataatggaagttgtatagagaacatcagaattagaccccatgatcctcatcccttgcagttgaagaaccaacaagacaaggtttgctctcagtcctttatcccacttttttgtgtggtgtgtcttacgttaaattaaatgtaaaattaattatttacataaaatttgctgccttgtaaaataccaaatactatagaagtggggtattctataatttcattgaccttgtttacataccatagctatagtatatttcatattctgtttgaaagaggaaaaaaaaaaagttattagcattaaccatattaagctaatacatgattttggtttgacaaaaacattaatgagccgtgttattcatacaacagttcatacgacaacaatttttgtatccatctctctccattgcatcatttattacatctcgcatttctctctttttctctcaattgtatacttggttgtacaaataacatttctctattaacatattgaggttaccattttttattgttactacacatgngtcaatgttttgttcctttattttttgaagtagaaaatgatatttatttgcagcttaaattgcacttaaacataattttatctttatttaactctttcagaaaaggagggcagagacaagcaataatgatccttctgtttgcaagcgataagatactagaatgagagcagaatttgaatttttttttttctggaaatatgtgattaattcagaagctgacagtgaactctgtttttgtcacatttaacattttttgttctctcctactctaaatctcttgtttctatttggctcacctaaatacttaatttccaaagtgcgggaacaaaagaatttcatgttntg

SEQ ID NO: 3315 - DNA, 1243 bp, Glycine max
  Clone ID: GLYMA-23APR03-CLUSTER2057_2
ccaaaacaaaaccatatccgtttccttattttggtcttctcttgtatacagttttggtctgtaattttattgcttttggtgagagtggatatggaggaacggtacgagactttaaaggagcttggttcagggaacttcggagtggcaaggttggccaaagacaaggagacaggagaacttgttgctatcaaatacatagaaaggggaaaaaagattgatgcaaatgttcaacgggagatagttaatcatcgatctttaaggcatccaaatattatcaggttcaaagaggtatttctgacccctactcatttagctatcgtcctagagtatgctgctggtggtgaactcttcgagaggatatgcaatgctggtcgattgagtgaagatgaggcaagatttttctttcaacaactaatatctggagttagctattgtcattccatgcaaatatgtcatagagatctgaaattggaaaacactctactagacggaaatccagctcctagacttaaaatttgtgactttggtttctccaagtctgctttgctgcactctcaacctaaatcaactgttggaacacctgcatacattgctccagaagttttgtcacgaaaggaatatgatggaaaggttgccgatgtttggtcgtgtggtgtgactctttatgtcatgttagttggagcatacccatttgaagatccagaagatcctaaaaatttcagaaagagtattgggagaattatgagtgttcaatacgccatacccgactacgtgcgtgtctctaaggagtgtaggcatcttatctcttgtatttttgttgccaatcctgccaagaggatcagcatctcggagataaaacagcacctttggtttaggaagaacctgccaagggagattattgagcctgaaagaaggggttacgtggaccacaaaaggacccaaccaagccaaagtgtggaagaaaccatgcggatcatacaagaagcaaggaccaaaatccacactggtgagcaagctggtacaggaacctcggatgctgtgcatggtgatgaggctaatgaggaagttgatattaatgaccactatgccaaatacctagcccttaattagtttgtggttgggtgtttaccaaagctagtgtgcattcttcgtgtgtaaggtatagagttgaatgagacataacacttcatcgaatttgagagttgtatcaattataatgagaatcaaactttgttgtttgggt

SEQ ID NO: 3316 - DNA, 1360 bp, Glycine max
  Clone ID: GLYMA-23APR03-CLUSTER2057_6
ttttttaatttcaagtaaaaacaaaagaattgaatgctatagttcctcataatgatttttgcctttcttattgaaatttggctgttctttgaatctggacaacattttgtacctaaagctgatgaatgatgaatctgcgatgttcataaaatatagaatgtatttttgttgttctctcttctctctatcaagcttaagtagcttatatcagcattctcaacaagaagcttattatcagaacttaaagggctagcacaggtgctcttttgaaattgttttgtccaaaatctttctgatctgtttttcttctttgtgagctatgtttgtggtatcagattgatgagaatgttcagagggagataattaaccaccgatctttaaggcatccaaatataatcaggttcaaagaggtgttactgacccctacacatttagctattgtcttggagtatgcttcaggtggtgaactttttgagaggatatgtactgctggtcgatttagcgaagatgaggcaagatatttcttccagcagctaatatctggggttagctactgtcattcaatggaaatttgtcatagagatctaaaattggaaaacactctcttggacggaaatccatctccccggcttaaaatttgtgactttggttactccaagtctgctttactgcactctcaacctaaatcaacagttggaactcctgcatacattgctccagaggttctgtcacgaaaggagtatgatggaaagatttcagatgtttggtcctgtggtgtgactctttatgtcatgttagttggtgcatacccatttgaagatccagaagatcctagaaatttcagaaagactattgggagaataataggtgttcagtactccatacccgactatgttcgagtttcttctgactgtaggaatcttctctctcgcatctttgttgctgatcctgccaagaggatcaccatcccggagataaaacagtatccttggtttctgaagaatatgcctaaagagatcattgaagccgaaagaaaaggattcgaggaaacaacgaaagatcaaccaagccagaaggtggaagaaatcatgaggatcatacaagaggcaaggataccaggacaaggatccaaagcaggagaagttggacaagttggcactggatcattagatattgaggatgatgaggaaattgatgttagtggtgactatgaacaagtgtgatcgagaacttgattagttgatatggctagattgtctataagacatagtcagcattgttagcattttatcagtgtacaacactggtgttctaaagatacttattataccaggcttgaaataggattttgtgtttattc

SEQ ID NO: 3317 - DNA, 1871 bp, Glycine max
  Clone ID: GLYMA-23APR03-CLUSTER2062_4
gtgaccttcttgaccaaccacacaagcaaagtgtcttctctttctcttcctttgctttgcatccatcgttaataggattgcattgcattgaattaaaaaatgcagagcagaggatcgagtcacagagtctccagtatgggcaataatcgatcccgcattcccgcgctcctcatctccatgttcgctgctttcgcttctatctacgttgctggaaggctgtggctggacgcagagaatcgcgtttatctcatcaaagagcttgataggatcaccggccagggacaatctgctatatctgtggatgatacattgaagatcatagcctgcagggaacaacataagaagcttgatgcccttgagacggaacttgctggagctaggcaagagggctttgtttcaaatcccttgatagagactaatggaacttactcgacgagaaggccgttggtcgtgataggtatactgacaaagtttggccgccagaagaatagagatgcaatccgcaaggcatggatggggagtggtgcatctttgaagaaaattgaagaaggaaagggcatcattgtgcgatttgttattggtagaagtgaaaatcgtggagacagtcaagataaagacattgatcatgagaataggctgactaatgacttcttaattctcgataatcatgtggaaacaaatgatgcattcccaaagaaggtcaaattgttctttgctcatgctgcagacaaatgggatgctgagttttatgcaaaagtcaatgatgatgtctatgtaaatattgatgccttgggagctacacttgctactcatttggacaaacctcgtgtttacatgggatgcatgaaatcaggcgaagttttctctgagctgaaccataaatggtatgaaccagagtggtggaaatttggtgacaaaaaatcatactttcgtcatgcatcgggagaaatgtatgttatatcacgagctttggctaaatttatatcaataaacagatctattcttcgtacctatgcccacgatgatgtgagtgctggatcctggtttattgggcttgatgtgaagcatgttgatgaggccaagttttgttgctcatcttggtcgacaggagcaatctgtgccggtgtttgagttgattccagtgcattcttgtgagcagacgacaaacgtaattcttaggagtcatcaattgttagaaggtttgcatcctaagattttttaatatctactggaagcgaagtgattcatagagatgtctgttgaaaagttgcttctgattatagacttgatgtccatcgaacaatatagtttcattagcttatgagcacgggtggcaaggtgtgcggttgaaggtttactagcagctattactataggtatgcaacgtcgtacagcaaataaaaaaattcagcttgtcacctataaggatttttattttttttactagagctggccacctataagttggtttctatcatactctgtttctttccttcatttcatgagcgtaggggaagatgactcctgagtagaagaacttccaaaaatgtactagtgatatttataggaacgacaatctctcttgcagtaaagggaacttttgtttttgtatatgaaataggcagggaaatttgagtcgtaattatgttttattcatacaattcgcaatttgaatcatataattcatcatttgctgtaagtgggatatcttagaggatgcaatcttgtaatagagtatgctcatttaaatttttttccctttcctttgaaaaatcttgtacatccgtggttttagatatccctgaaataaatttgcttaactgttgtacagaaaaagcataggtggttctgcttttactcttatttggggg

SEQ ID NO: 3318 - DNA, 1827 bp, Glycine max
  Clone ID: GLYMA-23APR03-CLUSTER20636_1
tcagctacgtaggccccccccccccaaagtgtaaaccctgcttctccctcatctcattgagagtagaagacagcaagggctagttagtgatttggtcttccctctgaaccagatggagttgttatgcactgccaacgcgattctcccctcacgcagcctctctattcccacaccctattcgctacccctcaaaacctcccttccgttcccgcgcttcaacttccccaaaatcgagagattacgagggttgcagccctgtgtgagtgtgagtgaaggcagttccgctgaggctgaggtgttggaggagagccgaattcgtcgagtttgcgacaagctgattggggtgttcatggtggacaagcccaccccaacccattggagaaggttgttggctttcagcagagaatggagcaacctcagaccgcacttttttgcccgatgtctcgaaagagccgatgccgctgaagaggatcccgccatgaaggagaagctgcttcgccttgcgaggaagctcaaacagattgatgaggatgtgcaaagacacaatgatcttcttgaggtggtaagacgggatccttcaggaattagtgagattgtctccaagcgtcgtaaagattttacagaagaattctttgttcactttcatacagtggctgaatcctactatgagaacaaagaagagcaaaatgaattggcaaagcttgggaatgcatgcttggcagctgtacaagcctatgatgctgcaactgaaagcgttgaaaagctgcaagctgcagagttgaaatttcaagatattatcaattctccttcgcttgatgctgcctgcaggaagatagacaatttggctgaaaaaaaagaacttgattcaacattggtattgatgatcaccaaagcttggtcagcttccaaggagtcgaacatgatgaaagatgaggtaaaagatatcctctatcatttatacaagactgcagtgggaaatcttcagagactcgtgccaaaagagattagaatagtcaagtatcttatacgaattgaggatcctgaggagcaactatctgccctcaaagatgcatttactcctggagaagaacttgaaggaacggatgtggataacttgtacacgactccagagaagcttcacacatggataaagagtgtgttggatgcttatcatttgagtggagaaggtaccctcattagggaagcaagagatctgttgaatccagaggtcatccaaaaattggaggtgctcaagaaggttgtggaaaaaaactttatgtgaataggagcttaagaaacatgctaaggtggttttcccactctgagatgccagaagaatacttcatgagattcttgatgtccatcaactacaggcccggatttacagtatcattgctgcaaggaaatatctaaattctggctagtgtttaaggacgtagaattctctttagcaatagaagaagcattttttggggtaaataatagaatgagcaatttttgttggtgagtagggaaatgtgttctatgcacgtaggagatggaactattacatggtagaccgctagataaatacaagatttgaggaactgaaccctcgcagagggtgacagttctaccaaaagtctaggcccttggttaagtcacttgaagatacaatgtatgcccgtgtttaattcctatacttgtattaactttttgttttaaaaaaaaaaaaaaaatgggatccgttaattgtttacgtgaccgttaaccaaaaacggtaaacgacatgtggtgtcacatgtactcattgctcgagtcgagattatactaagaaattttctttac

SEQ ID NO: 3319 - DNA, 1037 bp, Glycine max
  Clone ID: GLYMA-23APR03-CLUSTER20717_2
aacaccgattttcgttttcctaacgagaataaagaaaaggcgattactatagcaacaaactctttataaaagcacatcaaaggaaccataaacaacaacaacaacaacgtaggagaaagaaaagaaaagaaaaccatcgaggacgaaattacaacctagcacacagagatatatagcggaagcaaccaacagaagaaccttcaacagttcctccacacgtacaacaacgttgttataaaatcaccacttgcatgcttacaataatgtcgagcagaaagaaccacttcagttcacgaagccatcgttttctccctgtggcctcagacatagacgactctgcatccctaaccatggattcggaatccgcgttcgagttcgacgagtcagagctttacaactcggtccaagccaactcgttcgagttccagagatcgcttcacagccgaggctctaataattcctcggccaagaaaaaaccctcttcctcctccggcgcgccggctttaatgccggtcaacatccccgactggtcgaagatcctcggggatgagtaccggaggaggaacagctttgacgacgacgacaacgacgacaacaacgagggttacgacgatgagaggagtggaagggtgccaccgcacgagtttcttgcgaggaatagggtagcttcgttctccgtgcacgagggtgttgggagaaccctaaagggaagggatctcagcacgctccgaaacgccatttgggccaaaaccggttttcaagactaaaaaaaaaaccccacaaccctcactcacccaaccgaatcgaatcgaatctttattattttttttttcttaaccctttttggttctacttctgttactgttgtgattggtatgtatttttagttgagttttccttttgttaatttttggtggtggttacgttgacgtatatgaggtaattataagaggtttcggttattaattccgaaacctgaggctcgtgattttgtatctacgtacgtagtaccctcaaggaatatatatctttttttc

SEQ ID NO: 3320 - DNA, 676 bp, Glycine max
  Clone ID: GLYMA-23APR03-CLUSTER20778_1
atcatctggcaatctgatttgctggggttacatatattttgggtgaaacaataaactgattggagcccaaaatatacacacaagtcaaacatcgagaaattagagatcaagttgattagggtttgtgtgatatcaagcatcatgaagaagagacaggtagtggtgaaaagtgtggccaacacttcatcttcagtgatgagaaacataagatatggtgagtgccagaagaatcatgcagcgaatattggagggtatgctgttgatggttgcagggaattcatggctagtacaggggaaggtgctggtggggcacttacatgtgcggcttgtggctgccacaggaacttccacagaagggaagtgaatactgaggtagtttgtgagtactctcctcctaattctggtcgctaaagaaaaaaaagggaagaaaaaaattgagtgagaagagtttgtgtattatcaaattagttaactgataattgaatttttctttccatatttaatttctttcatttgtgttcttgtaagcgtggatggattgatgattgattatcaacagagaattattcttgtaaaagaaaattttaattaagctccaggtgttttggaatgttatatgtatccagattccaggctttctatatattattcttttcccccaaaaaaaaaaaaaaaa

SEQ ID NO: 3321 - DNA, 1869 bp, Glycine max
  Clone ID: GLYMA-23APR03-CLUSTER207822_1
ccgtttccgtccgcctcaccaccgtagcagcatcgccggcgtcctctccgtctaacccgacaaaaaaaaaacaattttaaaaatttcccaaaccgaccatctccgcaaaaaaacacgtgacgatcgttgcgatgagcctgagcacgtgacattcccattgttccgcttaaatttcatgactttttgagttcaagttcgtgggtctgctgttcgttgatttcgtggcttgttagtgcaatttcaagcacgacttgcagcttttaattgaattgaagttctggacacgtcgctccttcagtttattcaattgaaagagcaaagaacgaaggaagaggcgagtatatgaattctatcaagtcccaatttagaacagtctaaaacaaatagttgagtgacagccaaggaagttaaaaaaattgacttgagagtcaatataggtgagcttggaagcctattttgtcagttcagttgcaggtggaacataaagaagaacaaagaatgagcagaaggccaccacctgatcctgtggcagtgttacgtggccatcgagcttcggtcacagacatttcttttcatccctctaagccaatattattctccggttctgctgatggtgaagtgcggatttgggatacacttcagcatcggacagtgtcatcagcatggttacatagtgccgcacatggtattgttgctgttgctggtagttcttcccttggaaacaataaatttgtcagcccagggtagggatggaactgtaaaagtttgggaacttggtgatgctggtttgtccaggattccagtacttacaatcaagacaaatacttaccacttttgcaagttttccatggtgaagaagcattctgtttggtcaaaagaagggaaagcatcagaagattcctatagatcagagctaggaggagtgcctgatagagaaattctggaggatagaagagaagaggcttataccaatcaaagttgttctgaaagctttggagaaaatatgtataatgaagggctacaatatgtggctttgtcaggggaaaagtcctctgaggttgaaatttgggatctcaagtcagctgaaaaagttgtacaactcccttcaagcaatcctagtaactcttcaagtccttgcaacaaagggatgtgcatggcacttcaattatttttaccgtctgaatcacaaggatttttaaatgtcttggctgggaggccgaggttataaggtattgactaccatctcatatcctatattccaatgtagatatgaggatggttccatgctttggtgggatgtacggaatcccggagttccagtaacttctgtaaaattccattctgagccagttctgagcgtctgtaatgatgggtcttgcaaagggggtatctcaggagctgcagatgacaaaattgtaatgtacagcttggatcattcttcgggtacatgtgtggtcaagaaagaaatcagtttggatcgaccgggcatctcaggcacctcaattcggcctgatggaaaaattgctgcaactgctggctgggaccacaggttgaggatatataattaccgcaaaggaaatgctttagctattttaaagtatcaccatggcacatgcaatgctgtaacttattcgtctgattgtaagcttatggcctctgcatcggaggacacaaccgtggggctatgggaattgtatcctcctcgaatatgataatgaatttgatgaaattattcaatgtccacagttgtagattacacattttcctttcacatttatcagtttcctaaaacacctatattttgtgagacgtcattatcgtttcattgataaggtttggaacatttgtgtcaaaaaaaaaaaaaaaaaa

SEQ ID NO: 3322 - DNA, 1633 bp, Glycine max
  Clone ID: GLYMA-23APR03-CLUSTER2083_1
ctaaaacagagtttgaggccgcttacaaaaaccgcctggtgataagagttacgttagaatgttctgggttgtggttgatgttggtaatatatattatctttattccaaacccaaaaccataaattttgcattaaatttcgaagaaattaacatgatatccatctcaatacatattaatgaacatatcatgtaagagccttaaatgacacaaactaacagaaatcttaaatataaaatggtcttatactcaataaattggcacaccatactaattaactaattaagagtactactacttaatctatattgttcatcatggtctaggcttcattcttccttcattggccatcttgaagagctgggcttgtgcttctgctgccttgttggagttgagtgatggcccacaaacctgtccctgacttggttggtagtgtaagggaacttgttgttcaccatggagttgaggaaggaagctgtgccttctctgtagagtgctcctagcccatcagttcttgtgttggaaagtgcttgtgggcaagctcaggccaggacgtgaaccctggtaacagtagtacctgtcacaccaaatgcacttcctagggttccccaccagccaaggattccccagatgattgcaggatgattcctccaatagttgcatgtgccagtgaagggagatggggaaggaatgagtggtggtgaggggatactaggggttccagggtcaactggagtagttggtgggctcacagtgacaggtgttggggggctacctccatagtatccacctgagggagggtttgatggtgttgatggagttgagggtgttgttggatcatgatgttgtgggggtgatgatccacagtttccacctgagggtgttgatggagtacttggactactgtgatgatgtgagggtggagagctcccatggccatgagatggaggactactattgtgtgagcctggagctgtggggggacttccagcatgtggatctggggtgtagtagttcttctgatctgcaacagtggtggatattacaggaatgacaaggctctgagagagcaatccaacaagcattgcaaacatggtgaaagaagcatggcttcttttcctctccattgcttctagcagctcagaacacaaaagagagagagagaatagagaaaataagggttactagaggattttgaagtgtcgcttcctgcccccgggggagttgatggggttggattgtgacttccaccacctccatgtgatgtagatccatgatgagagggtgttccatgttgagagtggtgtggtgagcttccgtgcccaccactcccagagccatgatctggagagcagtatgaacatagagaatttgataaatctgttcctgcatgtgggtctggagagttgaagttctggtccacaatgatggcagtggtagatattacagggatgacaaggttctgagcaagcactccaagtagcaatgtgaacatagtgaaagaaataggactgtgtcttttcctctccattgtttctgactgcttagaacactaatgagaaagaagagaaggggggggggggggggccggcgctgatgaagaatagataaaataagggttaccagaggattttg

SEQ ID NO: 3323 - DNA, 1489 bp, Glycine max
  unsure (1)..(1489): unsure at all n locations
  Clone ID: GLYMA-23APR03-CLUSTER209313_1
actgtgaagcttctaattctacatctgatttttctttttaatttgtcaacatttgcatctactgtataccatataaaccaaatttattttatgttcattgtcaagaatagacttctcccttgttcacttcactgtggcagtctgctgtccttggaaacatgctttcacattccatgatttataatcgtattttctatcccaatagatataacatgcaattgaagtgtccaaangtggcatatgaaaagtatagtacaatgatgccgagtttttcaagaacattgcgtccggaatttgaaaaggagccttttgtggcacagtaaacaaaaattcactgaaggttccgcaagcccctttttccagaacttgaggatggcacaaaacgcatcatttcagcagcagaaattcataatacctaacaagtatggctataaattagtggggatattacatgaatctggaaccaaagagattgttctcctatgccatgggggtcgagcttccaaggaaaactttatcatgaccaatcttgctgctgctctagagaatgcaggaatcagttctttccgctttgacttcactggaaatggggaaagtgaaggttcatttgaaattggtggcttctggagggaagctgatgatatacatgctgtagctcaacactttcaagaagcaaaccgcacagttattgcaattgttgggcacagtaaaggagctaatgcagcacttctttatgcttcaaaatatcatgatattaaaaccattgtcaacctatctggctgccatgatttgaaggtgggtcttgaaaatcgctttggaaaagattttctggaaagactcaggaaggaaggttttattgagtttaaggcagagtcaggtattaattatcgtgtaactgaggaaagtttgacggatcggttaaacataattatgcttgaagaatgcctgcatattgacaaaaaatgcaggttctttacagttcatggtagtgcagacatccaaatcccggttgtagctgcgcatgagttagccaagatcctacctaatcacaagttgcacatcatagagggagctgatcatgtatatactgatcatcaagctgagttagcgtcagttgtgctgaattttataaaggaaacattgaaactggacaagcttaatgctagttaggtccttgatggaatctgcttcatgatgcaatattgcaacttggtaccttagagaactttgctcgtgctggagagagtcgtctttgattttattagagagaaccatttgtgctttgtggctgcaatatctatatcatatgataaataaggttggggacttggtgcctcctagttgtgtcctacgtttttaaagaatgaaaacattagcgtttgtttagtggatggactttgtagaatgatcctactcctacggtcgtaattagtcatgatatttttctttattatattaaaaaattgctttactaaaaaaaaaaaaaaaa

SEQ ID NO: 3324 - DNA, 1965 bp, Glycine max
  Clone ID: GLYMA-23APR03-CLUSTER2093_1
cttttccttcaaaactttttcatgattgttttatgttctgccttatcttttcgtttttttaccattttttttatttcttatgataacttaaagtattaaataagtactttactacatagtcccaccccccaagaaatctaaactaacccattacgtactgttcttaatcccattcatgatcgacccatttttcttatcccaaaattaactagctagaagtttcttcacgcaaggactagttttaccttgagtttctttgctagtgtaaccttttcatacacatatagctcccaaatggcttatgaaccaccattcctcgagacctacaagacccttgtgcaacaacacttaggggattcaaggaatgagttcatagtagagagatgtgatatacctttgatcgaccttggccggttaagtcttgagagagaagaatgcatgagggaaattgcagaagctgcaagagaatggggtttctttcaagttgttaatcatggaatttcacatgagcttctgaagagcctgcaaattgagcaaaagaaagtgttctatcaaccctttctgaacaagtcatcaacacaaggcaaagcttacaggtgggggaatccatttgctaccaatctgagacagctgtcatggtcagaagcctttcatttctatctgacagacatctcaaggatggaccagcatgaaactctgagatcaagccttgaagtttttgcaataacaatgttttcccttgcccaaagcttggcggaaatactagtttgcaaattgaatacgaaatccaactatttccgagagcattgcttgccaaaaagttctttcattcgactgaatagataccctcaatgccccatatcatcaaaggtgcatggcttgttgcctcacagtgacactagttttcttaccattgtacatcaagaccaggttgggggattgcaattgctgaaagatggaaaatgggttggtgtcaagcctaatccacatgccctggtggttaatattggtgacttatttcaggcattgagtaatggtgtttataaaagcataaaacacagagtggttgctgctgagaaagtagagaggttttctatggcatttttctattccccctctgaggaggcaattatacaaagccaaatcaagccacctatctacagaaaattcactttgagggagtatagacaacaaacagagaaagatgtcaagcaaaccggggataaagtggggctctctagatttcttctgtagaagtatatacgtacttttatgtagagtttatgtttataagttgttaacgtctgtttaatcaagtgttgatgaatatttccttaaataaaagtttttagtttgagcttatgaataagatgtaatatgagatagttatttcatttaatgtcaacaacaatcaatttaaataaaaaaaaaaaaaaaaaatctcacttgtttccaaggagagcatggatcgagttgaataatggtgggatcttctgagtgacaacctcaagtttcctcgttttatctctgatttgaggttgttaattgacctgagtctgcaactctttctacatctttgaagaccctcttaagcatgaactgaacgccagagtttccatggccatgctttaattttcaacataagccacgagctttgagttcatcttcatccttccctaaacttattctttcctatatatatggcactcatatatacgtaacttgttgcactagacttgaagcatcttgtttcgaagaagagctttggcaggaactgtgcgccagtttccatggccatgctttttagcataagccacaagcttggagttcttcttcatcccttccctaaacttaccctttcctatggcatcagagctacagcatccattcaatataagtggcaaaagaaaatggtaaattactttgacccaattcacattagtatggttgatccttaattatgga

SEQ ID NO: 3325 - DNA, 842 bp, Glycine max
  Clone ID: GLYMA-23APR03-CLUSTER209527_2
gaagaaaaattaaggatattcaaaaggataaagaaaacggtaggtgacattttcgaacgagtttgatgtgaaactgggcaagtttggtgttcacaaatatctcccaactttgatttgatactcttgtaaagtttctttgaaacttcatgattcgaatcccaccgtagacttgttctttgacttaaaaaattgcacgcaacttgtgtttaccatatactcttggtgcttgcttttattttttcaagtcgctgtgttatattctctattataataataattaagatcaaaccggttaaattagtagaccgctgtgtgatgaatttcatgtgcatgacgtcaattctttgtagttaataaggtgtatattcttttacttatacatggaataaaataattaataatactaagttggtttatacgtgaattacgtgcaggccaaatcgattttaatgcttgcaaatagaaaattggaggaaagagtgaggacaccaactgggtcagagccatcttcaccaacagtgatgcaatctaataatcaattgtatagtcctggcactggcccttccatgagaaaatcgttgcaaaggttccttcagaagagaaggaatcgggtccaagaagcatcgccataccgtcactagttgatcatcaaaattgttttcttgtatgagaggagagactctatttagaattaattacttctttctttctttaatatccttaattattaggtttactacttcacgcctttttttaaatattgatttttgtactatcgtgtacttcttttacaggctgtaaatacttcttttacaaagcttatttttaagctagctagatcc

SEQ ID NO: 3326 - DNA, 663 bp, Glycine max
  unsure (1)..(663): unsure at all n locations
  Clone ID: GLYMA-23APR03-CLUSTER21016_4
gatggcttctttctgtgctttacccggtggccagtgtcatagctgtttctctaagataaagaacatgtgatgctgttgaaattgaagtgaaccaaattgattgatctcccaaatcctaatttgcagttctcatcaagatgaacatcttgcgctcttttgggaacagtcccactgacctcaaaacaactcatnttngggatcctgncttcaactggagccttccttttgcgtgatgtgtgtttattcggcactgtgcgtgaggggtttgcttgggtggtgcgaccgcgtaacctacatcttcttgcatgccatgtcaccaatgagactatgcaactatatcaactctcaaggtggttcagagctcaaaggacccttgaacagaacaaaaaggaaacagatgcagagtgaaacgtgatttgtttgaactttgaaattcaaagaaaaaatttgtcctatagctttagaaacaattccttgacagtaaaaaataaaataaaaaacaaaaaaaaaaacaacgcctttatgacttgtcatttacagttgactgttttaatatgctttgcaatttggccacattagaactttttataattatattgtattaaaataattgtttatttcatatatttcttccgtttttaagatcttaaannnnnnnnnnng

SEQ ID NO: 3327 - DNA, 620 bp, Glycine max
  Clone ID: GLYMA-23APR03-CLUSTER21016_7
gcctcacttcatgggttctttcttgtgcttttcctagtggccagaaccatagctgcttctctaagataaagaacatctgatgctattgaattgatctcccaaatcctaatttgcaggccacaaaatacagaaaatagttcacatcaagatgaacatcctacgctctttttggaacagtcccactggcctcaaaacaactcatttttggggtcctgccttcaactggagccttccttttgcggcagcaatggacacaaagaaaccaccggaaacaatatctgtcaatatgaccggaggtgaattgctattaacttgtttgagaagcctaaatttgcaattgaattcattgttttttatttctaatttataatttatataattaaggatcttagttaatttaattttgtaaattaataaatcttatatagtgcagtgatgtgtgtttattcggcactgtgcatgaggtttgcttggatggtacgtccaaaaaacccacatcttcttgtatgccatgtctccaatgagacagtgcaattgtatgactcgtcattcactattgattgttttaatttgcttggctatttcagcccattatagctttttataataatgctgtattg

SEQ ID NO: 3328 - DNA, 923 bp, Glycine max
  Clone ID: GLYMA-23APR03-CLUSTER21044_1
aaatttctcattctcccatttcctctcagaaccctcgatcactcccacgcgctcctatatcctctccttcaccgtcgctctctccaacgatcacaacaacatcgtcatcccatggcaaacgccgcatctggtatggcagtccatgatgactgcaagttaaggtttttggagctgaagacaaagaggacacaccgtttcatagtttttaagattgaggagcagcagaagcaggtcattgtggagaagcttggtgagccagcccaaggctatgaagatttcactgccagccttcctgctgctcctcaatcttaaaaactatgaatttagtgctaatgaagaaaaaagaatcaaaagaaagaaatggcaatctcatcctcatcagagataggttggagttggagggttttgtgtcagagagttaacccagcaataccaaacacgcccttgttcctccaaatcccaaagtcaactcgcttcactgggtcttcttctgttgttgctcgcgcttgggaccctaaaacggcctcttcgcaagaggaggatctagtgtacgtgggaaaactagtggcgggttcttttgcgggtggggctgcaatcaagtacggcagtgctctattccctgagataacgactccgaaccttgtgctggctctgctcctcattctaactcctgtgcttgttgctgtttttcttttgatcaaggaaagtcgtacaaacccataataccaaccttttttttatttacaatccagatcatcaaattcgttctactatgtctccattatttctcagaatcggacatcttttcacacaaatgaactatgatttcatgatttttcagcagactcgtacaacaatactaaaataaaaatggttttaataactatcctgatcctcaaattcgtccaaaaaaaaaaaaaaaa

SEQ ID NO: 3329 - DNA, 569 bp, Glycine max
  Clone ID: GLYMA-23APR03-CLUSTER21044_2
aacgaaaagaaatatagatatggcaatctcatcagagataggttgaagttggagggttttgtgtcacagagttaacccagcaataccaaacacgcccatgttcctccaaatcaaccgaacatcaaaactacacctcttcttctcaagtaaaatcaatcaatcgacccaatttctttttttatttattacattaatttccttccaaagctatcatataaattaatactcttttttgaatggtgcaaaataggaggatttagtgtacgtgggaaaactagtggcgggttcttttgcgggtggggctgcaatcaaatatggcagtgctctattccctgagataactactcccaaccttgtggtggctctacttctcattctaactcctgtgcttgtcgctgtttttcttttgatcaaggaaagtcgtacaaacccatagcagcaactttatttatcatttatcaatatcaaatttgtgtgatgcacttgcttgtactgtgtctgcatgatttctcagaatccaactgtaataatactaaaataaaaatggttttaataattaatttattcct

SEQ ID NO: 3330 - DNA, 1699 bp, Glycine max
  unsure (1)..(1699): unsure at all n locations
  Clone ID: GLYMA-23APR03-CLUSTER2105_1
agttcgcttccccctgccagttcatcagtgggggcctccgacttcctcatgccctgaagtgggggtcactgggccggtccgttggtgtggagccacctggctgggcaattgtgtgcttggtgcggggggttctcgccgtggctcccggcgccctagctccggtgtcctgcatcctgcggcggacccccctctccccttgcgtgtctctggggccccatcggggccaacccgtcccccgcccgtgcggctatggccccgagtccctcggcatcctcccgcactccgcaccgggccgccaaaccgtttgcatgtgcataaagatcgccgtgagtgcggcccattttggcacggccgctgggggccgcgcggctgcccgtcctgagcagtgcggggttggcattccgttccgggtctgcccctccgccgcctgtaccggggtgcggggaggtgattgatgtggggtgcggtgcgcgagttcaggggggtgccagtctattgctggtgagtggaggagcggtggcgtgcgttgccacacactacacgctgaattgggtaccgggcccccccctcccgagtcagctacgtaggccccccccccccaaaactcaacccacagttagtacaaaaaagggttacttcagcttccacatatcttgaagaattgatcaatgggcaagtctgtagttgagaagctactttggatggcaattgtgtgcttggtgctgggtgtaatttccattactcccaaggcccaagcagcagtgacatgcaaccaggtggtgagcaacctcaccccatgcatttcttatgtgctcaatggtggcaaaaccgtgcctggcccttgctgcaatgggatcaagaccctctttaacctcgctcactccacaccagaccgccaaaccgtttgcaagtgcataaagaacgctgttagtgcgttccattatggcaagtccaatgtggaccgtgctgctgctcttcctaagcagtgtggggttaacattccttaccagatcagcccttccaccgactgtaccagagtgcagtgaggttaatgatatatggagcggtaactcgagaagagaaggatatacaatatatagctagtgtgtgaataagtggctggctatacgtaggccacacattacattaatgactggtggctgcttattattacatccatcaactagtcttgttattgagttattgtattttttttatttgtaagaatcaaaaataatattaaagatttataataatttatgtattttattcaaccaattccattaaacacccttttaagtcatgtatccatacatgttgcctgttggtgtttcttttgtcagcttgttatgaattggaagggaaggattaaaatgctaaataagcggttatacaagaatttgtccctcgtggactgttccccccccccgagcccccgctgagaagaaacccaaacacaaatgcgatgcaccggcggccccgcggggggggcccccccctttttgtgggggggccccccccccccttttcccgggaaagaattccgcccccccccttatttaaaaacaccccccccccccggaagaggaggggtttttttttaggggtttccccccccccccccccaaaaaaaaaaacccnggggggttnggggggggggggggggttttttcctcttccccccgggggggaatttatt

SEQ ID NO: 3331 - DNA, 922 bp, Glycine max
  unsure (1)..(922): unsure at all n locations
  Clone ID: GLYMA-23APR03-CLUSTER2111_13
tcgagtcagctacgtaggcccccccccctctcatttgtgccatcgagaattacgccttggtccctgttgacccttccactctccctctccaagtgagtgcaatgaaggcgttgaaagagtcgctgcgtgttcctgatagaatgggttggaatggtgatccctgtgctcctactaattgggatgcttgggagggggttacttgccgcatgactaatgataaaactgctcatgtcataagtcagatagatcttggcagtcaaggcttgaaagggttcataagtgaccagattagtcttttgtccgacttggtaagcctgaatttgagttctaattccttgggaggggaaataccaccgggactaggtcaaaaatccctgatacaagtggatttatccaacaatcagttaatgggattcatacctgatagtttggcatcttcgaatttgaagcttgtgctattgaatggtaatttattggaaggacgagttccagagcaactttattcggttggtgtgcatggtggagctattgatctctctggcaacaagggattgtgcggcgtaccatctcttccatcatgtcctatgttttgggagcatggtagattatccactcggggtaaaattgcaatagccttgncatgtctctttgttttctgtgtgatactgctgctggtctatatttacattaggagaagaaggaatgactatgactttgctctacctcatgaattaacatcattagccaccaagagaaaccggtatcaaaggcagaaatccttaatggttcttgagatggagagtcaacacgccaagggactaccttcacattttactacacaataaccatttttcttaatggaaatggaatactgattttcatagtttttggccaaacatacagcgacacagcttattgaaaa

SEQ ID NO: 3332 - DNA, 1380 bp, Glycine max
  Clone ID: GLYMA-23APR03-CLUSTER2111_23
attttcaaaacgaagtggtccttgtttatatgaatttcgagaggaactaggttgctatgaaacaaacatggtttggtcttgatgacgaaattgagtgacctcttattagttttgagatttctaggctttcatctcagacagtgaaaaaatgatagatataagtacacttaatgctgcacagattactgtgctgggatctgccttttgtgctatgctttccatgcatttcacgtcgcagttactgtctcagcatctcttttattggaagaatccgaaagagcaaaaggctattatcattatcatcctcatggctccaatctatgcagctgtctcctttgtgggtctcttggatatcagaggaagcaaggagtttttcacctttttggagtcagttaaagaatgttatgaagctttggtcattgccaagttttggctttgatgtatagttaccttaacatatccattagtagaaacattgtgccagatgaaatcaaaggcagggaaattcaccactcttttccaatgacactttttcagcctcgtactgttcggctgaaccaccataatttgaagcttctaaaatattggacatggcagtttgttgttgtccgtccagtatgttctgttctgatgattgcattacagctagtcgggctgtatccaacttggttgagctgggcattcaccatcgttctcaacatatctgtgtcgttagccttgtattctctggtggtcttttaccatgtgtttgctaaagaactggcaccacacaaacctctagctaaattcttgtgcatcaaaggaattgttttcttctgcttttggcagggaatgttgctggagcttttagcggcaactggtgtcattcaatctcgccatttgcggttagatgtggagcacattgaggaagcaatgcagaatattttggtatgtctagagatggttatcttttctgttcttcaacagtatgcttatcatcctgcaccatatagtggagaagttgagaaaatgcttaaacaaaacaagaaaaatgaatgatatgataaggtcaaaagaaaaattcagggtacagtcgtacagagatgtatttaagagctgtttattgtggcgctagtagatacttgaaagcattgatgcaaagtggatgtgttcttttaataatgttattgtgctgtacaagattccccatccaccacctctgtatcgtttcctttttggttgctgtaatttccaagcctactaaaagagattagtctttattatattattatttgctatctagtatatctactatctagcgtatggtcatttgcttaggatgatagttgtttctggttactgtctcagatacttttatggtttggattgctcaatatacat

SEQ ID NO: 3333 - DNA, 2157 bp, Glycine max
  Clone ID: GLYMA-23APR03-CLUSTER2122_32
gaaggtagtacttgatgcactactatttgccagtacaagctctcacaggcttgacatgtttgctctttgtttatttctgcatgtattaaacaactcttgttgactttggtatcagtatttggtatcagtattttaaaaatagaacacagtcctatcatataactaattaacatggtctaaacagtctcaatatatttaacatgctttccatctcacaattgtgtagttatttaacgagttgttgttgatgcaattttactctgtgtgaccatggtttcaaaggacccagatatgaactgtatcagtgtattcattgatatgattgtcactgagttccttcccaatgtttgaattagtttctcaacgattttaataaaaaaaagttgctttatgacattaaatcttttggatatatacttttagtcaaaatcaatatagtttctccctccattcctataaatatatattttatgaacatgcttgaatcatagacaatagaaattgccattgcactcaccaagtatgcagttggcttcatatttgaattttcagtctgtgcattttctaattttgccccatttactagtttcagaccatgtttacaaagcttcacgagaacatggtattataattttattttcaatcacatgagttacaaatgtatctgcgtgcaaaaaagattgaatgttccttgaagatactaaataatacaattttatcaagcagaaccaagttatatttttaagtgtatcgttacctatcattgcattctattacaaatattctatcattgcattctattacatgggattataagtgttctgatttgtctttagttatatttttaattacttaatgttctaattaattgaaaaaaccattttttaaataaagttgctttctgattagtatttgttagagatgcaatataaagtcattcatgtatcgttacctagcagcttgagctttttggatagtttgttaatgacatggtatgaaattctctgactatgtggtctagagttcaatcctttatactcttattcttctaataaaacgttaaatttcaaccaaggtagatcatatgtggacttgtgcattatccacacttaatgtccaaaaggctcttgcatgagaggcatgttaaagatgtaaaataaaatcattcatgtatcttcacctatgaacttaagctttttggataatttgttcttgatagtaataattagtaaaatcaaatctgttatttaaatgtatcaaaatttacatgtgaaaatttaaattggtctaagttcattatagtttgtctttgactattatagtcctttatacctttctttaaatgggtatgtactaagttgtggggatgttatcgcatcatcactttccttttttatgaaatttcattaacattaagtttaaaaacttccagccactaggtcacttgatttttcctgctcaatttataggttactcaaatgaagcaggagcatgacaagaggcaagcaagcctcatagctgaacacaacgaacagctaaagcgtacccaactgcaagctgaaaatgaattgagagagaaaacaatgtttatgaggaatgatcatgaagctcagatcaaagcattgaggtgtgaacttgaagatgagtgtcggaagctggaagaggagttgcatcttcaaaaaatccaaagaagacaggcaaagggctttgttgcagttgcagtggaaagtgatgagtgacaagcctaaagaggaccaagaagtgaattcaaaacaggttgacttgtgtttgaatctatttgtctgtgtctgtcttcaaatggatgccatatttgctcattttcatgttgggttacctttggtagtttggtttgacatattacatttatcatttggtaggcacagttggggaaatgagaagacatttgttgtatacctaaatgtgcttctttaatattctttcaacacaagcctgagaattgtgaacttaaatacatagaagggtgatgcaaataaaggcccactggttcacatatgcatagtcttcatgctaaaattgtcacttatgaaacaggcataatcttgttactgaaggcataactatttactagcatgatattagataaatttgattggkactaaaaaaaaaaaaaaaaaa

SEQ ID NO: 3334 - DNA, 1134 bp, Glycine max
  Clone ID: GLYMA-23APR03-CLUSTER2128_1
ctaatcatttccgacctacatctgaataagtgtgaattccccctttcatgcatctcgtcattttcattacacctttttctttttggttcagttcagctagctgcagcctgcagaatttataacaacttctgactatgaccatgtcgggtcctgaagaacacggaagcatgagcttaatgggttcgttacgtgtgatagagctgcagctagtggcattcgcgttggttttctcagcaagtggtcttgtccctctactcgatttagcttattcggcccttatctccatctacctaatgctacttgggcgttttgcgtttccgtcgcatgggtgtgcgccgggcccgatgttccacgaaagtgggcttttccaagtgtacgtggttgtgggcacgacggtgggcctgttcttgccgctggcctacgtgcttggtgggtttgggagaggggacaagcaggcggtgcggtcggcgagcccacacttgttcttgctggcgttccaaatactgacggagaatgtgataagtagcttctcgctgttctcgccaccagtgagggccatggtgcccttgatgtacactgtgcggaggatctttgtggatattggttggatacatgatgtgtgcctcaacaagactttgcccccatatgcaaacctcaaggataaggcgtggttttggtttggcagggttttggcagtggctaacctggtatatttctccatcaatctctttgggttcttgataccaaggttcctgccaagggcttttatgagatatttccaagagaggggagagatttatgccaagctagttgaagagaagcgatatgtgaatgtggtcaacaataaatcccatccaccggacaagaagtaacattaactaaggatttttgtcaatatctgttactattttaaacgtgtgaatcgtaattcgagtctctctccccaaaaaggaaatcatctgaaaagtcaatgttctcatgaagtagttctggtacctttcagcttggataaagttcatcaagttattaacagatgtcttgtttctcccgaaaagatttgctttctgtttaacaatgactcaacatgtataataaataattttccacgataagggacaagccaagttgaagatt

SEQ ID NO: 3335 - DNA, 1839 bp, Glycine max
  unsure (1)..(1839): unsure at all n locations
  Clone ID: GLYMA-23APR03-CLUSTER2132_2
aagacatgcagtacgatcactattgcctgtacaatggaattagcatccccaaactccaaccatcaccatgaaaacaacaacgacaacaaggttattcagaggctccattgccatgccgcgattccctcgttacaaagctatttgccatgaataattctgggtcgtcacaatcagagcttgacgatgaggaggaggatcagccatatgcggagttttggatgggcagccacgtgtctggaccctctttcattgttttggatggttcagaacaaagagtgacccttaaatcttggcttttggagaatcctaacgtgcttggaccaaaggttgtggagaagtggggtggtgatcttcccttcttgtttaaggtgctgtccgtggacaaggccttgtctatacaggctcaccctgataagaatctggccagaacattgcttaagttgcaccctgatgtttacaaggatgggaatcacaaaccagaaatggctctggcagggacagagtttaaggttctatgtggattggtcactcttaaggagcttaaggccgtgcttactgtccctgaggttgtggagctggttggtgttgaaaatgttaacttggtgttacaaatcactgatgaggatggtgaagagaaggttaaggctattttgcagtctcttttcactgacgtcatgtcagaaagtaaagagagtgtaactggtgcagtagacaaactgagaaatcgtctgcataaggaaagtcagttgacagataaggagcaactggtactgtggttggaaaagcaatatccatctgatgttggtgtcatagcagccttctttcttaaccatgtgaaactcgctccggacgaagccttattccttggagcaaatgaacctcatgcatatatctatggtgagtgcattgcatgcaaggcaacttctgacaatgttgtaagagctggcctcactcccaaacacagagatgtccagactctttgttccatgctcacatacaaacaggactatactgtttgctatggttacacttccatacacacataagattctgatatataagatgtgtcaaattttctacggcgacttgttaaaccatgaatttcatccttgtacacccctggtcacttggctgaggcatatgcagtttacatttttcattagataactaaaacatctatggaactttttttttaattgtaaaatgcatagcttcatggagatttctttctgacagataagaaggtataaaatagagtaggtacaaaaatttatttcttgttagttttgtaatagagcaaactacttgagtataatggttaaagtttgaaatagaggtggaaaattagaaatgttttttccaattctatgatatggaagttttttatgatatgcccatcttattggtcacagttggtgaaggaacaatgaacacaggatcacccaaaggtcatgtggtcaccgaaggtgatgttctttttgcagctgctatcactgagattagggttactagtgcatccgagttgcatctgtacagaacaggggtagatagcaagttttttcaagcttcctaagtttcaacaggggatcacccaattttattttttttgtcatatgcttttgggagtcgaataatgcaactatgtgttgcgtgtaatagaagcagtttagtgtacatgcaagagtaaaaaatctaaaatcacgtagtatattgagtcatagagaaaaaagttcattctagcnaggtgggttgtcaattgtcattcgtttgttgttcataataatgttcgttaaaagccttttcggatgacgttcctatttatctatttattatatcaat

SEQ ID NO: 3336 - DNA, 577 bp, Glycine max
  Clone ID: GLYMA-23APR03-CLUSTER21347_2
aagagaacatatgagatgacattgcatttgcagcacccaaacatcaacatggctgccaaactcactctatcttctcccctttccttcaaaacttcatttcttccaaaatcaccatcattttctccaggtttatgctcccccagaactaatgttactggtgtcaaagtccatgctaaattagggccggtccatgctaaattaggtggtggagatgaacaagccaagaacggaggcaagaagaaattcataacaagagaggaagaaccacaacagtattggcagacagcaggagaaagagaaggagagaatcccatgaagactcctcttccttacataatcatatttggtatgtcaactccttttgtaatcttggccattgcttttgcaaatggttggattaaggtgcctgttcgatgagacaacactttacttctcattctcaaacttcaccagagaaattctttactttttcacatatgttatggctcgttttatgaacaaagttcacttatgaatgtcggattgaagaaagcataaatgaggtttcttggttcaagaatagcacgttggtgatccg

SEQ ID NO: 3337 - DNA, 1351 bp, Glycine max
  Clone ID: GLYMA-23APR03-CLUSTER2136_5
cggataagttggaggcaggaacagtttcaagttatgacaggaaaagtgaaatcaaggcatttgatgattcaaagactggtgtccaaggactggtagaaaatggtgtaacaaaagttccacttatgttctatagtgaaaactctaatctcaatgatggcgtaaccggtgcatcatattcaaagatcagcatccccataattgacctcacaggcatccatgatgatcctattttgagagatcatgttgtgggaaaagttagatatgcatgtgagaagtggggcttctttcaggttataaatcatggaattccaactcatgttttggatgagatgatcaaaggaacttgcaggtttcaccaacaagatgcaaaggtgaggaaagagtactacactcgcgaagtaagccgaaaagttgcttatctttccaattatactctttttgaagacccttctgctgattggagggatacacttgcattttccttggcacctcatccacccgaagctgaagaatttcctgcagttttgtagagatattgtgaatgaatactcaaagaaaataatggctcttgcttatgctttgtttgagttactgtcagaggctcttggccttaatcgcttttaccttaaagaaatggattgtgctgaagggcaacttcttctctgtcactattacccagcatgtcctgagcctgaattaacaatgggaaataccaagcactcagatggtaacaccataacaatacttttgcaagaccagattggtggccttcaagttcttcatgacagtcaatggattgatgtacctcccatgcatggggctctagtagtgaacattggggatattatgcagctcatgactaatgacaagttcattagtgttcaacatagagttttagcaaaggatcaaggtcctagaatttcggttgcatcctttttcagaacaggtatatcaagagtctttggtccaatcaaagaattgttatctgaagaacatccaccagtatacagagacatttctttaaaagattacatggcgcatcgttatacaagtggcagtggaacttctgcactgttacacttcaagttgtgatcatgaaaattacaagcaatcttgatgttattttgaaattaagggaacttttgttatctgtagatattgaacacatgtatccggaaatttacaataactgtcacacactgctgagccaattaaggaatttggatctcattctagtgaactttagggtgtggcttctattacctgaaattaaaataaagtagatgcaatagcttgctgtagatggattcaatcactttcttttttcagaaatgagaaccgagtttttcag

SEQ ID NO: 3338 - DNA, 761 bp, Glycine max
  unsure (1)..(761): unsure at all n locations
  Clone ID: GLYMA-23APR03-CLUSTER2144_10
gaaccaaattctagctcctttcagctgcacaagagtctccaatcccaactctctctctctctccacttgccaaaggaaaaaggctaaagagaaacccacacacacacacacacacagaaatatgtcttccccaagcaagcgccgagagatggacttgatgaaactgatgatgagtgattacnaggtcgagatgattaatgatggaatgcnagaattttatgtgcaattccatggacccaatgacagtccttatcatggtggtgtgtggttttctttccttccaacgtacctctcattgacaaataaacgtgcaaacttatgtgtgcataattttcttatgtrtgcttaagttttgtaattggatgctatctagtttttcatatctaatagggtgttgtgtcagtttttatgtatagtattgtgctcctatcatgttcacccgtatcatgttcacccgtatgtaagtctgatattctgatctatgaatgtcaaatcaaatttctctatgtcaccaacttggatttgatacccgtatgtaagtcctatcatgttacatatcttgactttgaattgggtacccgaattgttccccttaaatttttctaatcccccaaaaaaaaaaagaataagcctaattttttcatgattatgttgtgaatagcttcttggtgattattagatgccaatctattagacaatgagtttattacctacagcaatgttttgaatatcgagttaatttcaaatactttttatgggcc

SEQ ID NO: 3339 - DNA, 2030 bp, Glycine max
  Clone ID: GLYMA-23APR03-CLUSTER2155_2
aaaccatcctctcttagcatttggcaagatctgatttccctcttcacaaggagagaaatagaaaggcatatgatcttcttcaagttgcaatctttttagagagagagggttagaagaacaacatacttgagatctgtcactttgtttgagttcagatcttcaaagtttccttccttgttcttttggtgcaaaggatcaaattaaggaatgccaaatggggaggaaggggaattggttttccagtgtgatgaaagctctcagtcctgactcaaaggagaagaaagaacagaaatcaagtaaatctaagaagaaatggtttgggaagcaaaaattggagacttcagtctcatactcagaagctcataaagcaccaccaccaccgcgacctattcctccaccagaagcgattaaattaactgatattgaaaatgaaatcagtcatgatcacgactatgttgttgaagttgcaactgccatggatgccgaggaacctgttcctgctgttcagatagaacctgttagggttgaagctgccccaattgctcattatgctggtaaaccaaaggatgaagtggcagctatcaaaattcaaacagcttttcgtggatacttggcaagaagagcattgcgggctttaagggggctggtcaggttgaaattattgatggaagggccagttgttaaacgccaagccacaagtaccctccactctatgcagacattatctcgcttgcagtctcagattcgttcaaggaggatcagaatgttagaggagaatcaggctctgcagagacagctcttacagaagcatgcaagagagcttgagagcttgcggatgggagaggaatgggatgacagcctacaatcaaaagaacaaatcgaagccaagttacttagcaagtatgaagctactacgagaagagaaagagcgctggcttatgcattcactcatcagcaaaattggaagaactcatctagatctgtaaatccaatgttcatggatccaaccaatccaagctggggttggagctggttggaacgatggatggcagcccgaccttgggagagccgtagccatatggataaagagttgaatgaccactcatccgtaagaagctcaagccgcagtattaccggtggagaaatcagcaagtcatttgctcgtttccagctcaatttggaaaagcactctccaacagcctgccagaatcctggctcacctagctttcagtccactccttccaagccagcttcaatatctgctaagaaaccaaagaaggtaagtccaagcccaaggggcagctgggttacagacgaggactccaaaagcttggtcagtgtacagtcagaccggttccggaggcactccattgccggttcattggtgagagatgatgagagccttgctagctctccagcagttccaagctacatggtgccaactcaatctgcaaaagccaagtccaggacacaaagtccattagccccagaaaatggaaaagcagagaaaggttcctttgggagtgcgaagaagcggctttctttcccagcttcacctgccaggccaaggcgccattcaggtccaccaaaggtagaaagcagcagcttaaatgcagagttagctgtggacaagggtgtggacagttgatcatacaagtaaaaggatggaaaaacattaaagtaggattgaaaatatatcactgaagaaataaagcaaaaagagtttatttaaattgagtgttccatttatttattttatttttatgtgtatcctaacgtttcttggaggcttttgatttggggtgaaaattgttttacttacttttttttatcaatttgtattttcgtttactttctcactagttgccccgaggggaagacatgcgattcatgaatcatgttggtcaaatgatagtacaaatgaactgtccgaatcctttctgtgcttccccaatcaaggacaagtatcattctggtcaaagttcctcattcttgatccttagttgtgatataaatgtaaatttgattaa

SEQ ID NO: 3340 - DNA, 1034 bp, Glycine max
  Clone ID: GLYMA-23APR03-CLUSTER21606_2
aagactttaaagatggattaataaagattaacgagtaaagaggcttaaagtgatgcgctacttgcttatgtagctatcaaagactccataagaaatatccatatcaaatttgcctttttgtgccagtggcatgggctttccctactttgtggtatttggtttgtggctgaagaaatggttcaaatgagtactcttttccgattccctttataaaatttctgtgaggaagattttatttagtttaatatcttgttttgcgtatactatccagttaagaaagaatataaagcttatagttggccaaagaaaatcacatcttcaaagaatggaagccaaagtttatacgggtagagatatgatgacattgtgcaagaaagatagttgtgattttagaaagttggacaaagagagctatgaagttaccagatgctgatcttgcagtacatcattcataactctcagtgtttggatccaagtgtcatatatttgtccagaaactatggaaagaaagggacggcaggggtagggatgattattattctcctgagcgatcaagatcttattctaggtctctctctcccagtggtgggaaggactacaggaagtcccctcgtcttagggagaatggtcggagtcctaatgacaagaaggatcagacacccagcagatccgagagtcctaggggcaatgatcgtagtccttcaaggtctcgttcacggtcatacagtccacgctgatttgtgagcaggcagagattggaatgtggaatgtggaatgtggttaattcggtctttcctgtgaccacatactgtagctaaaactcagacattttgaaagatacaaaaattgtagctaagcaaagtctgtgatgttaatattagtattccgtaggtgacagacacccccatcagaaggtagtttgacttggtgtgtcattttggatgactcagattagactttttcatcagtttacaaattttcggatacttgttcatggattatttctatatttatttatatggttggttcatcgt

SEQ ID NO: 3341 - DNA, 1572 bp, Glycine max
  unsure (1)..(1572): unsure at all n locations
  Clone ID: GLYMA-23APR03-CLUSTER2173_4
tcctctagagcggccgctttttttttttttttttttttttttttttgacgagcgaaacaaaaacatatccatgtttttagaacatcaaataaaacaacaaaaatattttaatagtctgaattgtttcttttccaacacaaaaaaggactaataatccccaaacaaaaaactgcgcggaccaacaacgagaatgaaactaataacctcccttgatcatattgaatccatcatagggaatactcctcagtgcaccttgatggcataacatgctccacacgcacgtgaatcctcttccttatgattctgttgccgacctgcttgttgacttcgaccccaacagcacgtttggtgacattccagacgcgaccggtgcggccatggtagaacttgtgaggcattcccttgtggacggcgccgttaaccttgacgtcgacataatcgccgacgtggtaggttctgaggtatgtggtgagggcgatggtacccttcttcctgaagggacgagagaaggaatctctggtgcgggatctcaaaccgtgaccagccggcatttttgctagggtttctctctctcgctgctcggctttagttagtgtagaaggatcactctccccttctgtcgtcttctcgcagccgaacggacgcgtggtgagacgcgaaacaaaaacatatccatgtatttagaacatcaaataaaacaacaaaaatattttaatagtctgaattgttactctttcaacacaaaaaaggactaataattcccaaacaaaggggaatgggtggggctttttttttatttcccacctgggaaaaaggggatttttcccaagggcttaaattgggttacccccagggttttcccatccaggcgttttaaaacggcggccagggaattttaattcgcccccccttgggggggaggggggccgggcccccccctcggggtcagctacgtggggcccccccccccccccaaccttttaggtccctaatgcaaggtttgctctggaccaaagggtggatcatagacaatgtaagtttctgggggatacctaagaataagnagatttaatggaatggatttggcagggaatgagttgaaaattgtgaatggcatggattcaatgaggacggcagttgtgaagtcagaatttgatagctctcctcaatttgttaatgtacaagtttcaaaattgtcacttcctattggagaggaattcaagctggagatagaaatcaaagtagaagggtactttaggatagcaaattcccacaaagaatttgtgctctctttatagttgcatcgttttggctcttcgttttatcactgctaaggttactatataaggatgtcatttcccaaaccacgacacaaacattcataaaatgtcatattttgtgtcaggaataaattttacagaatattgtcaacatggctatgaagttcaagcctaaacgtatgtctgcctatcaataacggggtgagtattacctagtactggtggtcgctcttaatttatgcaatcaatgtagcaattacctttagttgaggttcaaaaaaaaaaaaaaaaa

SEQ ID NO: 3342 - DNA, 2591 bp, Glycine max
  Clone ID: GLYMA-23APR03-CLUSTER2174_9
ataggacaaaaccggcgggtaactttaatccctaacgggacaacaacaccccccattaaatgtaagtattaagtgcaatgtaggtgaatatgtaaattcttaacaaacaagcaaaaaaattgtctaattaccatccttacacatgaacaacaaacaacaaaacaaaaggaatcattgcatttgaaaactgtagggccatgaacccccccaccccccaataatgcatgtgatgtcccagatagatgtctgtgtctgaacctccacacaccgggtcccctctgatccacctcatccattcctcacaatgtaatgcttcataatatttttcaattttcatgtcaccacatcccctcactccattggatttctccagacactgggatatgggtcctataaaatgtgccaatgtgagccatagcatctcacttcacaactcacactttcaaccccatccaatcctcacatgcatgctgtctctgccaaagtgccaagtcacataacatttccattggtaccattctttctttccaccgcaaccaccttattaagcggctcgccacccattcctgacgctcacgcactcgaacctcaattttctctcttccccctttgaggaagggcccaacgcgccacatgctgacgtgtcacatcaccacctcccactctcccgttttctggtcatcaacgtggctcacctccgaagggaagtggcgaatcaccataggatcatccagtttttctctggttggacgatcctaacggtcctatgtactacaagggatggtatcacttcttctaccaatacaacccgaacggtgcagtttggggtgacatagtttggggacacgcagtgtcaagggacatgatccactggcttcaccttccactagcaatggtggctgatcaatggtatgacatgcaaggtgtgtggacaggctcagccacgatcttaccaaacggtgaaatcatcatgttatacacgggttccaccaacgagtcagtgcaggttcaaaaccttgcataccctgcagacccctctgaccctctccttgtggattggatcaaataccctggaaaccccgttttggtgccaccaccaggcattggtactaaggactttcgcgacccgacaaccgcgtggctcacctccgaagggaagtggcgaatcaccataggatccaagctcaacaaaacaggcattgcattggtttatgacactgaggacttcaagagctatgagctcaaggagggtttgcttcgcgctgtcgatggcaccggcatgtgggagtgtgtggacttcttccctgtgtccaagaagaatgagaatggattggatacatctgttaatggggatgaggtgaagcatgtgatgaaggtgagcctggatgatgatagacatgattactatgcaattgggacttatgatgagaagagtgtcttgttcacaccagatgatgctaagaatgatgttggtgttggattaaggtatgactacgggatattctatgcatccaagacgttttatgatcagaataaggagaggagacttttgtggggttggattggagagtctgacagtgaatatgctgatgtagccaaaggttgggcttcagttcagagtattcctagaactgtggagcttgataggaagactggcagcaacttgcttcagtggcctgttgctgaggtggagagtttgagattgagaagtgatgaattcaaaaatttgaaggctaaaccagggtcagtcgtgtcaatagatattgaaacagccacacagttggacattgttgccgagtttgagatagacaaggaaacccttgagaaaacacctgaatccaacgaggagtacacgtgtggcaacagtggtggatctaaacaacgtggtgccttaggaccttttggtcttttggttttggcagatgagggcctttttgagtatactcctcagtatttttatgtcattaaagggagcaatggaaatcttaagacttccttttgcgctgatcaatcaaggtcttctcaggcaaatgatgttcgcaagcaaatcgttggcagcgctgttccagtacttaaagatgaaaagttttccttgcggatactggtggaccattctattgttgaaagctttgctcaaggtggaaggacggttgtgacatctcgggtttatccaacaaaggcaatctatggagctgctaggttgttcttgttcaacaatgctactgaggccactgtgacagcctcactcaatgtttggcaaatgaattctgcatttatacgcccattccaccctgatcagaagaattaaaaaattaaattggatataaaagacttgtagtcacaaaggatcggaaaacatcttggggtggcaatttgtactcatcaattgttgtcctccccataaacaccgacataaggttatggttcttgctcaaagcgcattccttcatttttgcccagttatgtttatcagaatttttgttgtaattttatcatatcatgtgaaatgatgcttacaagagaatctgttcaaagaaatatgatgttaatgttaaaaaaaaaaaaaacggacgcgtgggtctagatcgcga

SEQ ID NO: 3343 - DNA, 1477 bp, Glycine max
  Clone ID: GLYMA-23APR03-CLUSTER217_3
atgcatcccaacggctagcccattcaatttgaatcggggagacagaaagaatagggcaaattttcgattttgattttccaaccaaaaaatccagggtttaccctcacaccccactccctccaaagcgtttgcaattcatcgttctcttaaaaaagttttcaattgaaacactgattttgaattcgaggtttgatttagttctcagaaagaagtgctgcaatggatctccctcgagacgttgacgactacatcaaacaaaccctcgacgatacattaggtattcccgtatcgtcgaaaaccctagaatccaaacttcgagcttcccaagactcgcaatggcgcctccgcgaacgcctcctttcccttctcccccaattgaaacagaaagaccaactcatcgatcgcctcaagtctgaagcgggaatgaacgcgcgagctctgaagaagttcgttgaggagaatcagagactggcgacggagtgtgagagattgttggctcgctgccatcagttggagaatgagtgcgcgctgtatgataaggacagagaagcgttgatggagtttgggaacaatgccgatgaacgggcacgcgaggctcaaacccgagttcttgatttggaacgggatttgctcttcatggggaatgaattgaacaaatataagcatcagcatcaattggtcaattcttctgtgtgcacacctggggaaaagaatttacttgattctgttttggcaacgccaacacttactagtaaagatgatgattctacatatgcatttttgcaagtaaacagtgagaatgaggcctgtaaacagttgctgagtatgtggaactgcataaacccatcaactcggagtgttttgtcacttgttgccaaagtcaagtcacttgagaaggataaggagcatctaagaactaaccttcacaaagccgaggaggaggtcaaattactgtttgatgaaaacaatgtattggaaaaggagaacaaaaggttattgaggatatacaaggaaagaaaccatcccgattctggtggggagtataccaacagcccatcagccaagtcaaacaagagaaagtctagtcccagaacaagtagcccaatgcagaggaagattgattttgacgatcaagaggtagcaagacgaccattatcacccttacgacataactccccagactgtagaatgcataagaagtaacgtgacacactaacagtgtgtttggtcagacgtttgaaactgtcaaacatcccttcagctcaatgatacaaaagacccatggtttgggttcaatcgtgccttgtaatgtttaaacgctaaaacaaacacacattaagggaccatgagtttacatcatgcggaaagtttcaaacattgtttccgatttatagatggatgactaatcatagcattcgtatttgttgctcaaaaaaaaaaaaaaaaaaaaaaaaaaaaaagcggccgctctagagga

SEQ ID NO: 3344 - DNA, 2335 bp, Glycine max
  Clone ID: GLYMA-23APR03-CLUSTER2181_35
accccccaccccccttccctcccccctcactcatctacctccatataaattttaattgggataccggcacccccctcgagtcagctacctaggcccccccccctgctttctctgagggaatcacactagctgaaagaagtggtttgaaccctggtactcttcttgatgtgctggatcttggtgccataagtaacggcatgtttaaattgaaaggacctacaatgctccaaaacagttattccccagcttttccgctgaaacaccagcagaaggacatgagattagctcttgcccttggagatgaaaatgctgtatcaatgccagtagcagctgcagcaaacgaggctttcaagaaagccagaagcatggggttgggagaccttgatttttcagcagttcatgagactttgaaagctcctgatcattcatcttgaccagagatttctgaattgattaaaccactgttaggcaacagtgatgcgaaccatctatttatgaaacaacagtttgagcataggtcattattgtagaaacttatagaaatgaatgaaccttgtagaattttgccactttcgttgcaagattaagctataaaagacaagaacataggtttagttcaacttgttgcagacttgcggtggacggcttggccatctgttcacagacattaatgttttagtttatgagtggtttgaataggttgcatgactattttatgaacctttgtggcattaaatgtttgctttgattagactttctttttatgtatttatactaaggaaaatactaataagtatcctcaaggcattgattaaggaactaaaaaaaatagtgttattgggatacgcaaaattgtgtaatgcaaatgataattgattcttttaaaataatttggaatccaaatgataattatacctaaaagatatacatcccaacataaaaatttgatatcttgattcctatttataggtttttttcatttgtcttaaaaaatagtaaaatatgtggcgtctaatttgtgaaagtgtatgttcaattaaggaactggatttagccttaagattaagtaaatctggattaaatttaacctaacaaattaaagtggtacattctttcattgtcgaaaaaaaaaacaagcacagttcgttaaactaaacaacttcctgatagaaacaaagcgtatatcataaaataaggtaagacatcaattcatgttgacacgaaattgaccaaaaatacggcttactcaacttcaaaaagtatccaaaattttggacctagaaaataaacagcacatgtaaataaaatgattgactgaacgcaaaataagagagttttagttgtgcaacgatgacatggaatctgcaatgaactttcactcatcatcttcatcattatcagcagcagagttgatagccgccacacgagcaatcaacttagccttcctctcctcataagtgagtttcttcagattgtacctcttgtgttccttcgggggctgcttctcagatttcttgagagaaggatcagcacggatggcagcatgaaccttcttgtacagtgcctcaataccatcagcttctattccacgcttgatgtattcactgaagtgtgactgatatttctcaggttcatcttccgccaagatcttcatataggcagcaacatgtccaccaaaaacatatttgcgatgcacctcagcatcaagctccttcttctccttatcaaacccagcaaacctcttgtcactatgaggaatatccaaacccccatccagagctcccttaagggcaccaaagacacggttgccagttgtagtcctaataagaccaacatcaaggagagcacggaatggcctcctgctctcagcaggttccactgaatagtcctctccagtagcctcaacatttccttcgtactcctcatccatttcaagtgttttgaggactcttcgggccaacaggagaccagtacaataagctgcagcataatttgtaagccctacttcaagaccatatcgtggcagctcatgtgcatatgctgcagcaagaacaatatcgccagcaatgctagcagatattatttgtgcaacaatgtctttgttgctgaaacgaacaacaaagcgatatttcggggtgttatatttgttcttgtcctgattaatcaaccgaatcctggcacggtaatcggtttttccctctcttcttctcttgaacttgacttgatacctcttgaagtaggcttttgatttctgtgacttcacgtaaaccattgctgaaggactgaagggcagcagcgcccccacgcgtccgcccacgcgtccgcggacgcgtgg

SEQ ID NO: 3345 - DNA, 1390 bp, Glycine max
  Clone ID: GLYMA-23APR03-CLUSTER2189_2
ttttcttattcatagactcaatgaaactctgaagtatgttagcagctaaacaccccaaagggcagtagtattgtagttaaaaactttgtagtacatgggggatgagagatggaggataataataataataaccaccaccaagcagagaagcagcaagatgatagtagccaccaccacccatctctcctccttcctaaccctaatcatagcaccaccatcaacaacaacaccaaggaggatcatcatcataggttgaagagagatgagtggagtgaaggggctgtgacaacccttcttgaggcctatgaggccaaatgggtgctgagaaacagagcaaaacttaagggccatgattgggaagatgttgcaaaacatgtctcagcaagagcaaactccaccaagtcaccaaagactcagacacagtgcaagaacaagattgagtccatgaagaaaaggtacagatcagagtctgccaccactgctgatgcctcctcttcttggcctttgtattctcgcctcgacgttcttcttcgcgggaccgcaccgatatcttcttcactgtcaccaccacctatagcagcagcaagaccaataatagcagcaccatcgtctcaatcaccacataaccaggctttggtgttgttggagccacctccttctgttgctcctccaccaattgcaattgcacaaaactcatatggctccaatggtgttgaaagactactagcaaaggaagatgggataggagccaagtcatctgagcatgtatctaacaagaatccaatggactcggatagtagcacacctgccctttacagtgaaaaggacaaggtgagatgcaacaagaggaagatgaaaagtgagaacaacaagaggagaaggaataataataatgaagacatggaaatagtagagagcataaggtggcttgctgaaatggtggtgaggtcagaacaaacaagaatggacacaatgaaagagattgagaggatgagagttgaagctgaggcaaagagaggagaaatggagcttaagagaactgaaatcattgccaatacacaactagagattgctaagatctttgcaagtgtcaataaaggtgttgattcttcactaagaattggaagaagttaattaagggtatattatgggaggtgatcacatgtttggtatgtgtacaaattttatagtcaacataatatagattgaatgagagggaaaattgtaacaagtatgtaatatgtaattggcctaaccagtgaaagagagctccatatatacggtagggataataattatctctcctaactttaattatatacttctaattgtaaccttctctttcattaattataagaaatgaagggatactttttttattatgtctttc

SEQ ID NO: 3346 - DNA, 1311 bp, Glycine max
  unsure (1)..(1311): unsure at all n locations
  Clone ID: GLYMA-23APR03-CLUSTER2189_3
ggcgaccacgtttgcaatttataaccttcctatccactctcttcaatttgttctgccattnggtaacactgttttcaccctttttctaatgctagtggttttctctctccctctctgcctctagtagttacaatttgcaaatagagtcatcatcatcatgtcacacccaaagggataaaaaaaaaaaaaaccaaaacttgtaacacatgggagttgttgaacaagaaatggaagaggaagagaaagaaaaacatacaaacaaccaagaccaaaacaggcttaaccacccttcttctctccacccaattaaggaagagtgtgttagtgtgagaaaaccctttagtggtgatagagtgaagagagatgaatggagtgaaggggcagtgtcaaccctccttgaggcttatgaggccaaatgggtgctaagaaacagagccaaactcaagggccatgattgggaggatgtggcacggcacgtgtcggcacgtgccaactgcaccaaatcaccaaagacttcaacgcagtgtaagaacaaggttgagtccatgaagaagagatacagatcagaatcagcagcaacagcagatcatgcatcatcatcatggcctctttattcacggcttgatcttcttcttaggggaactggacccgtgttgtcgtcgccgccgccgccgccaccggcgatgatgccggcggcgatgccggttctgtctccggtggagccgtcgcaaccgccgcagctgtcgccgcctccggcggctccttcagggccacttgctaatgcacaaaactcgcatggatccaacggagttgatgagaagcttgctaaggtaaattcagtagtgcacaatttttcggttttgggcttatttttatttttaatttctacagattcatcaacgccagcactttatagcaagaaggacgggttaagatgcaacaagagatagaagaaatcaattgacgacacagggcgaagaaggaaagagtgtgtggagatagcagaaagcttaagatggcttacagaagctatgataaggtctgaacaagcaagaatggacgcaatgaaggagatagagaggatgagagttgaagctgaggccaaaagaggggaaatggaccttaagagaactgaaataattgccaatacacagttagagattgctaggatctttgcaagtgtcaacaataaaggtgttgattcatctctaagaattggaagaagttaagggtaggttatggaagataattaataaaaatgttattattgtatatgcacataaagttatcaaataatgctattaatataat

SEQ ID NO: 3347 - DNA, 729 bp, Glycine max
  Clone ID: GLYMA-23APR03-CLUSTER2192_1
aaaccgatcaatacccatcaatttgcatctagaatatttgataaacccgaaccatgactggtagcttcatttcatggctccaaaataaaaagtgaagggtgggaaagggggaggttgtggaacttagcagcgaagcgaggaagatgcaaagtcaacaaacagtgaaagaagaagatgatgaaggtccacctccgggatggcaacctctccccgctcagccaccgccaccgccacgtccatccggttgggctcaaatggtttgcggttcttgtcgtcgcctgctttcatatccacgaggtgccaaacatgtcaaatgttcatgctgtcagactgtcaacattgtattagaagctgatcaggttgggcaagttaagtgtggcagttgtgcggtattgctgatgtacccatatggtgcttcacaagttagatgttcatcatgccgatttgtgacagaaattggggcacacaacaagcggcctccatggtctgtacaacaaaggaagccatctcctccaaaaactggttgttagtggcctgtccgttggcctagtagatggatcatccttgtacatcaaacaaattaggtatgaggattcatgtaccaatctcaaaattgctttgttattgagatacgcatccttaaggaattatttattaatgtaaagttttggaatttcaccagaatttttaagatgaagtttcacttgaaagtcttctattcctgcttgc

SEQ ID NO: 3348 - DNA, 1427 bp, Glycine max
  Clone ID: GLYMA-23APR03-CLUSTER21940_2
ggcaaatatcagttagatgttcagagtgatggacattggcaggtttgaagatgacagcaggcttagaaagatcatgtcaatcactaatgggaggaactaggtattgtgtcttttccctgtgttttgatgtttattggaactcttatcttcttcagagccaatattcagactgtcttcatgccagcagtatgtaatattggattaaaaaatgtcgctgctggggaaattaaattccactggtgtatctaggggactccgtatgctcaagaacaggtcaatataggttccggtccacctgattccaaagttagatggttccgttcatctagcaatgaaccacggtttattaacacggttacatttgacagtaaggatgattctcctacgctggtgatggttcatggatatgcagcatcgcagggtttcttctttcgcaattttgatgcccttgcctcccgtttcagagtgattgctattgatcaacttggttggggtggatctagcaggcctgactttacatgcagaagcactgaagaaactgaggcatggttcattgattcttttgaggaatggagaaaggccaaaaacctgagcaattttatactacttggacattcttttggtggttatgttgcttccaagtacgcacttaagcaccctgagcatgtcaatcacttgattctggtgtgacctgctggattttcatcagaatcagaaagaattacaaagttcttatcaacatggaaaggatcaatcctgaaccaaatatgggaatctaattttacacctcagaaaatcatcagaggtttaggtccttggggtcctgatatggtcctcaagtataccagtgccaggtttgttacatatacaactggggaaacgctgacagaatctgaatcgagattactgacagattatgtttaccatactttagcagccaaagctagtggcgagctgtgcttaaaatatatattttcatttggaggactcccgaggtcacctcttcttcacagtgcttcagagtggaaggtgcctaccaccttcatatatggttttcaggactggatgaattatgaaggagcccaagaagcacgcaaacaaatgaaggttccatgtgaaatccttagggttccccaggccgggcactttgtgttcattgacaacccaagtggcttccattcagcagtgttttatgcttgtagaaggtttcttaggcctgatccagacagtgaatcccttcctgaagggctaacctctgcatagagtataatcttgtgtaatgctgtctatgattatatatttcttttacaaattaaactcctttatttattcaagccatgtcctattcatgcttaaatggaatttgcaattgtaacttgtaatggcaattcaaaaaataatgacgtctaatataaatttcattactg

SEQ ID NO: 3349 - DNA, 1281 bp, Glycine max
  Clone ID: GLYMA-23APR03-CLUSTER2194_2
attccctcttctctaaccctatcttctctcttgtcttgattccattcaatttaaacctcagggcgtggcaagtttcaacctttttcgagcacccattaacattaacatggccattccctacccccatttcatcgccaccgagaaagccgccatggacgccggcctcctccacccctcctccccctcctccgtcatcctcacccaagacgacctcaagaaaatcgccgcctacaaggccgtcgagtacgtcgagtccggcatggtcctcggcctcggcaccggctccactgccaagcacgccgtcgaccgcatcggcgagctcctccgccaaggaaaactcaaagacatcgtcggaatccccacctccaccaaaacccacgaccaggccctctccctcggcatccccctctccgatctcgactcccaccccaccgtcgatctcgccatcgacggcgccgacgaggtcgatcccttcctcaacctcgtcaagggccgcggcggctccctccttcgagaaaagatggtcgagggcgcctgcaagaagttcatcgtcatcgtcgacgagtccaagctcgttaactatttggggggtagcggcttggccatgcccgttgaggttattcagttctgttggaggttcaccgcggcgaggttgcagaagctttttcaggaggctgggtgcgttgccaagcttaggactttcgcggagaaggatgaaccttatgtcacggataatgggaactttattgtggatttgtatttcgagaggagtattggggatttgaaggctgccagtgatgcaattttgcagcttgctggagttgtggagcatggcatgtttcttgatatggctaccactgttattgttgcaggggagctagggctgacggtgaagaacaagtagttgttcttggtggttaggagaatgaaggtaggttaattggtcaaggttgacatggggcttctaagttctaacccatttgtatggtttagtagcaaaggttttaattcaggggggaaaaaggggtgggggggattttgatgaaatccttttgttattcaatacaaatgttggagaaagtttctaaattctccggtagttttgttttgttttagggacggggggatttagtttgagcaagcagaaagtaaaatggagaaatgagtattgatctaatgcaatggctgttgtgtggtactgaatcggttgtccgcacaatatgttgttgaattgactgtgttttaacatattgaatttatctatctaattcaatttttcgt

SEQ ID NO: 3350 - DNA, 1553 bp, Glycine max
  Clone ID: GLYMA-23APR03-CLUSTER221081_1
tcagctacgtaggccccccccccagaaatcgttagatcaacttctcagatcagaccttatatatagcccttcccacaccacaccagtgtcacactgagagatccatataaagtactaatataatcagcactgaagtcttgcaacaattaatatccatccaaaaccatggctagttgtttagtgtgttgtatcatagtgacaagcttgtttatgtctctaagttttgcttctgctcaacaagggagggctttcttcgtttttggcgattcactcgtggacagtggcaacaatgatttcttggctaccactgcacgagcagatgcccctccttatggcattgacttcccaacacacagacccactggacgcttctctaacggccttaacatccccgacataatcagtgagaaccttggcttggagcctactctgccgtatttgagtcctctgcttgtcggagagaggctcctagttggtgcaaattttgcatcagcagggattggaattctcaatgataccggatttcagtttctgaacatcattcacatctacaagcaactgaagctattcgcacattaccagcaaaggttgagtgcacacattggtaaggagggagcttggaggcatgtaaaccaagcactaatcctcatcacacttggaggcaacgattttgtgaacaattattacctggtcccgtattcagtaagatctcgccagttttctctcccagactacgtgacctatatcatatccgagtaccgactaattttgaggaggctgtatgatttgggaggtcgtagggttcttgtaacggggacgggaccaatggggtgtgtgccagcagagttagctttgagaagccgaaatggtgagtgtgacgtggaactccagagagctgcgtccttgtttaatccacaacttgttgaaatggtcaaaggactcaatcaagagattggcgctcacgtcttcattgctgtaaatgcatatgaaatgcacatggatttcgttaccaaccctcaagattttggatttgttacatcaaagatagcttgttgtgggcaaggccccgtttaatggggttggactctgcacacccctttccaacttgtgtccaaatagagacctatacgcgttttgggatccatttcacccatcggagaaagctaaccgaatcatagtccaacagatgatgactggctctgaccagtacatgcaccccatgaatcttagcaccatcatggccctagattccagggtttgattgatacattatgcaacaggataagtgtgaagccatattctaaatatgtgccctccctaagttttgttatctgttgatgaatcctctagctagtgtcatttgtggtttcgaaaatgtactattcttttgattacatcgttgtgagaatttttgtgtgtagtggagaatggtagtagtaattgtgatcatggctctcaacttcatgtgcttcctaaaaatatagaaaaaaaaaaaaaaaaaaaaataaaaaaaaaaaaaaaaaaaaaaaaaaaaaaaaaaaaaaaaaaaaaaa

SEQ ID NO: 3351 - DNA, 1699 bp, Glycine max
  Clone ID: GLYMA-23APR03-CLUSTER2211_1
gacaattccaaagtcttagcaacctgcagccgctacaactaaaaaagccctttgctttcttttccactcctcacattggctcttttatcactatcagatttagggtcccttctgccatactgcacacgttgaagatggcagcaacatcattttctggcatgcaatttgcaatgtcaagatcatgcattcctgcatcacaaaagattgcagatgctggtgccgtggttcttggcggcaagtccaagattggatcgtggaataaacttgaaagtgcatgacatcttgcatcagtgaaacatttcaagcggggcttcacttcctcgtccataaaatcaattaaatgtcacccaaaagacttttttgagttcagttcccaaagtacaaaatcagaccaaacaattgttggaaacatctagaaaaggatatcttgctgcaatatctgcatctagttactcctatgttccattactcaagcattttcttccaatcttgaacccaggtggatcttcaatctctctgacatacattgcttcagaaaggatcattcctggatatggtggtggtatgagttctgccaaagctgcactggagagtgatacacgagttcttgctttcgaagcaggaagaaagcgcaaaattagagtcaatactatatctgctggtccactgagaagtagggctgcaaaggctattggattcattgatatgatgatcgattactcatcagccaatgcacctctacagaaagaactatcagcagaggaggtgggcaacacagctgccttcttagcatcacctttggcatctgctatcactggtactgttctatacgttgacaatggtctgaatgctatgggtgttggagttgacagtccaatatttaaagatcttgacattcccaaggaccagcattaagtggaagctaccccacaaaagctagtgtcaccagaattagcatagcaatggcaatatttttgtttcactgtagctagccatcttcaagttctgcgactcctaccttcttcccaacaagatagtgcaggatccactttgagcatttactttgctttttgtaggctatttttcagagttttccctcagacttttgaacatttcttttttgcaatgttctcagaagtgcaggccacatgattatgaatgtaagaggatctttacattgatcaatgcttatttgagatgtttcgtaataactgttctatatgttgacaatggtctgaatgctatgggtgttggagttgacagtccaatatttaaagatcttaacattcccaaggaccagcattaagtggtagctaccccacaaaagctagtgtcaccggaattagcatagcaatggagatatttttgtttcactgtagccatcctcaaattctgcggctcctaccttcttcccaacaagacagtgcaggatccactttgagcatttactttgctttttgtaggctatttttcagtgtttccggcagacttttaaatatttctttttgcaatgtactcagaagtgcaggccatatgattatgaatgtaagagaatctttacattgatctatgcttatttgagatgtacactcgcaataaaactgtattcccgtgtgccctttatcctgtggtaagaaccttgtgagttgtgacatagaaattgatcttgtcaaaaaaaaagaaaaaaaaaaaaaaaaaa

SEQ ID NO: 3352 - DNA, 676 bp, Glycine max
  Clone ID: GLYMA-23APR03-CLUSTER22142_2
ctctttgaattggcattggaattcaactcttctctttctctgtcgaagaacaagtagtttcagaaagatgctagagaatcttcaggctcctccgtcaacaacggaatcggccccagtggtgaagcactatgctccacccaaccagaggaaccgttctgctaacaggcgcaaatcatctggttggacagctgcaatacaatcctacaataatcccaaagattcatctgaaaagccagttatgtattcgagtgggacttcagtatggactgcagctacaagtgcttcctcttctgtatctcaacgggacttcctgggagaacttcgtcgccaaatgcacagtgcaaatcccagtttcactacatgatggctgacttggattgtttaataaagattttggatcatcgtggatttgtcgaatgctttaagaacactgcgatgctcagctacctgttgtttgtgcctttgtgacttgttttgtcaaactcattactaatatatgtatcttcaaaatcggactcagaatatcaaaaaaaaaaaaaaaaaaaaaaaaaaaaaaaaaaaaaaaaaaaaaaaaaaacgggcgccgctcgcgatctacaaatatatcccaaacggccgcccttactggaagtaatgataagagattttcactttgcatgacatcacaatggttaca

SEQ ID NO: 3353 - DNA, 1883 bp, Glycine max
  Clone ID: GLYMA-23APR03-CLUSTER2220_2
gtgtttgagccttgaggccaccttaaaacattcaaactctcttgctggcacaacaaaacaacgacacacaacaagtaaaacctgagagagagagagggtaaaagggtattagatccttcaaccagatcaaattgaaaacaacaaacccatttcttggtctagatttgttagcattgcagaagaaccagatacccccaacaatggaggttgtagagaaggagaagaagaagtacatcacctcagaggagctgaagggtcacaacaaggagggagatttatggatctcaattcaaggtaaggtgtacaatgtctcagattgggtgaaggagcaccctggtggtgatgttccaatctcaaaccttgctggccaggatgtcactgatgcattcatagcataccatcctggcacagcatggtcacaccttgacaaattcttcactggctaccacctcagtgacttcaaggtctctgaggtgtccaaagactacagaaagcttgcatctgagttctcaaaattgggtctttttgacaccaaaggccatgtcacttcttgcacccttgcatctgttgctgttatgttcctcattgtgatgtatggtgtgttgaggtgcactagtgtgtgggctcatttgggctcaggcatgctattagggttgctttggatgcaaagtgcttatgtgggtcatgattctggccactatgtggttatgacaagcaatggtttcaacaaggttgcacagatcctctctgggaactgcttgactgggataagcattgcttggtggaagtggactcacaatgctcaccacattgcctgcaacagccttgatcatgaccctgatctgcagcacatgccggtcttcgccgtgtcctcgcggttcttcaattcgataacttctcatttctatgggaggaagttggagtttgatttcattgcaaggttcttgatctgctaccagcacttcactttttacccggttatgtgtgttgccagggtcaacttgtatctgcagaccattctgctattgttttcgaggcgtaaagtgcaggatagagccttgaacataatggggatccttgtgttttggacttggttccctcttttggtgtctttcctgccaaattggcctgagagggttatgtttgtgcttgctagctttgctgtttgttccatccagcacattcagttctgcttgaatcactttgctgcaaatgtgtatgttgggctaccgagtgggaatgactggtttgaaaagcagacaagtgggacattggatatctcttgctcctcttcgatggattggttcttcggtggcttgcagtttcagcttgagcatcatttgtttccaaggctacctcggtgccaattgaggaacatttcgcctttggtcagtgacctttgcaagaagcataatttgccttataggagcttgtcattttgggaggccaatcagtggacaattaggaccctcaggactgctgccctacaggctagggacttgacaaaccctgcccctaagaatttgttgtgggaagctgttaatacccatggctgaggtatttggagtttatagagtttaggattttgtcaaggtctttttttttttgttttctctttaaaaagaaaaaaaattctcattgtgattttgctagcccccacttttccagattgggctttgaatttaactttttgttaggtgtggtgtacaaatggatggtgatccagatgttactgcagttcatgtgctttgcatcaatacaaattcatatcatgtatgcctttctgccttttcacttctttttccttatcttggaataggtttcttaatgtctgaaagatattataccatggttgatcttaataaagatagaaagatttcatc

SEQ ID NO: 3354 - DNA, 777 bp, Glycine max
  Clone ID: GLYMA-23APR03-CLUSTER22258_1
aatcattctctctcttctcttctctcagatctctctcctcaatgcccactctccacaaattcaagttcctcgccacccaatgcgccgtcgccggcagccccacccgcagccccaccaccagccccgtcatccacctccgccgccgcaaaaccctccgcatgttcctcgcccgccgccgcttccatcccccgccgcaagatccgccgcccctcccagactccgaggcccgcgtccgccacaaactcaaggacctcttcatctcatctccaccgccaccacccctcaacgacgaaaaaacaatcttccacaatcatcaacaacaacaagaagatcagcacgaagaacttctccctaactccgccgtgagcgtccgattccgcaccggatctcccttccggcgcggcgcatccaccgccgctctccggccggtatcgtcggtcttccgctaccggttactgagaagagcgtggcgaccggtgcttgtcagcatccctgagtagtagtagcagatttttctctctactgttataactgtacggatgactccaattcctaatttttatttttttatttatttcattttttaaaataattctcggacatataataatggtaataaagcttctaacttgcgcggtgtgcgttttctcttccgctaaagccgtgaaagtgatcaatgtaactaacgctaaaaaaattccgcaacgaaacggttctgatgcgacgtcggattatcgaattctgttcttttggtcttcgggggttttgtttgttacc

SEQ ID NO: 3355 - DNA, 1528 bp, Glycine max
  Clone ID: GLYMA-23APR03-CLUSTER22375_1
ctcttgccccccttactccctccaaaccctgaactacctctcccttactcccataaaggtagcttagcttcagatgccaatcatcaaattacccaaaccccttcactcatagagatcatcatcacctaatggtgctttgttcagctcaaatttttggtggggttttgcaatcatcaccaaatggtgctttgttcagctcaaattttggtggggttttgcaaaaaaccttaattcccttttctctttttccttttatgttgaagataactactaagtagcatgctcccaacacctcaaagtaaccaaaccaaaatcatcaccaccatctagatcccatattcccatctattaccctttcaatttgcttggacttttgtaggtgttcattgttcaaggcctccaaatctagggttgtgataaatggatcctgtagcagcacaaggacgtcctctccctccaccttttctcactagagatcttcacttacaccctcaccaccaattccagccccaccacaaccaccaaaacaccgaggatgaagccggcaatggccgcggccagaagcgagatcgcgacgagaacgccggcggcggaggcggggccaccacgcccccccagggcggcggggaaggcaaggaatccgggtcaggagatggaggagggagtgacatggggagaagaccaagaggaagacccgcagggtccaaaaacaagcccaaaccacccattatcatcacaagagacagtgccaacgctctccgatcccatgtcatggaaatcgccaacggctgcgacatcatggagagcatcaccgcctttgcaaggcggcgacagcgcggtgtctgcgtgctcagcggcagcggcactgtcaccaacgtcacgctccggcagccggcctcgccgggagcagttgtgacccttcatggaagatttgagattttgtccctgtccggttcttttctgccgccgccggccccacctgcggcgtcaggactagccatatatctggctggcggacagggacaggtagtaggtggaagtgtggtgggaccccttgtggcctcaggtcccgttgtcatcatggctgcttcatttggtaatgctgcttatgagagactgcccttagaggaagaggaaactccggtggcagttcatggcaacggaggattagggtccccaggaatcccaggaacccagcaacaaccgcaacagcaacagcaacaacaacttgtgggagatcctaatagttcttctcttttccatggaatgcctcagaatcttctcaattcaattcaattaccggctgagggttattggggtggaagtgctcgccctcccttttaacaaagtgttttactttcatggtttttttcgttatctttgttttcttctttttcttattttatttttgtttatgtctctttttttttttttaatttcgactttctctttattatcatcactattcatactccttcttgcttaattataatttcgtttactcttaatttgaaggctttgatcagtc

SEQ ID NO: 3356 - DNA, 872 bp, Glycine max
  Clone ID: GLYMA-23APR03-CLUSTER223878_1
ttttttttttttttttatagtaagtgcagtatataaagccagaaaaaatataaaccatggattttacgtggatactagatacataccaacttaaattttttacaaacaatagaagacataatccgaacccaaggccacgaaaaaaagaaagacacacatagcagaaacaacacatacatagattaaaaaggagaagcgtaaagaggattatggtgactagttgtagaagatgattttctcttgaaaaacaaatcccccacgagagggatgataggtttctgtttctgtttctgttttttgccctttttccctccgaaaagatgatctttttctccaagactcagcatgtgagacaaactttgtgactcttttttcttctctactgttccatcctttctatcttcgctgatctcaaacctcaccgtctttgttgtcgccgccttccccgccgccgtggcctcggcctgagccaacttggacatgttcttgtgaagctctgcgttgagcgttgccaatgccacctccgtttcgctccctctttccttcaacagcttcagctccacctttgtttgctcaagctccgcctccagcttctttattatatcagcaagctggccattgttattgttgttattctcttcatcagttttcattggtcttgatgaaggtgatggtgatggtgatgacagcctccatgatgattctctctttattggagagtagatttctccgaggagaaggcgttcgccaaatatggcgacggcttctttgacggaggtgaaaggacgagaagtgtcgacggtggagctgaaatccattgttggaatggatgagaagaattttggagatggagggtgtaagtaatatttgag

SEQ ID NO: 3357 - DNA, 1392 bp, Glycine max
  unsure (1)..(1392): unsure at all n locations
  Clone ID: GLYMA-23APR03-CLUSTER2238_3
gaaagtatcaatatatgctcaacattcttgttcttggcatcctcaaaaacccatataaattgtcttacagcatcagctgtcccttggaaccacttcttcccagcctcacccggtgtttgagtagctgccaagacctattcaaatataaaactagaattcaattcttgataaaactatgtttgattcccttctcacttttagctttttggttttaaaaactgttttctaacacaattccaaactattcagcaatcaattattcatcaaaatctactaagtctcgaaaattatttttaaaaaaaagtacatgttttaaaagctagaaaatagaaaagtgggggatgtttcccattttcttcttctgttttcgtcttgttcaacttctcccacaatttcacactccactctgtgtcttgtaccatcttctcccagctccacaaacccatctccaaaagtcatgccatttccgaagctgtatgcacgggacaggtggcggttgagagagaaagaattgaactgcgtcaagatgaaaatttttctgatgccactattgatgcaattgctcatggggatatctatgagtctataacaccctccaattggaaccgctggcttggctcttctgccagtaagaggaaagagtcgagttcctgcacctccacncaatatgatggaagccacactttttgggtccacttcaggtttctcaaaagtgggtaccccttgaaatgccatggaatcttcgtcgatgtctgatgtgagaacagcgcgtgcaattccacttccaggcttggagtttctaagattcctattggttcgtgaagtcttgcatgattgaacactcaaaaacctttttgtgttcacacttcccctcgtactctcaccccagaagccacttgttctgtttcttccaattccctcactaactttggctagatggcggccattcagggttgcacaagctgaatccattgctaaatcaataacggaaatagaaacctttttggatttggtaactttctgctcaatggaatttgtatgagggaagagcaaaactactttaataaagtaccaaacttttcagacaatttgtaccataagttgaggaatcataactggggagattcaagtgaaaagagccccaaaaagatgagatttttcagagaaacgaaggtgggacctaggaggtagaaactacgtacagaaaaatttggtaatggagaaggagaagatagaaatgtagaatgagttgtattggcaaatagcaagggacactacactaacgttaacgactcacgagaaacctgcgaagtctttcgatctgtcactgagtcagcactccgcagtggctacaagtttctatgacttactggctaacactgacacttcctc

SEQ ID NO: 3358 - DNA, 2366 bp, Glycine max
  unsure (1)..(2366): unsure at all n locations
  Clone ID: GLYMA-23APR03-CLUSTER2252_2
agactggataaaaatttgctcgtaaccatgaaatcagaacaaaagttaaatgaagggtagaggaaagtgacttaatttgactgactgacacgtgcgatgggatgcctcacgtgacaaatgtgttgcgcctgcgatccatacatagtctgggttagtagaatagaagaaaaggagaatctgagatcggaagcataaccatgtggcggagactcttctcttcttcaaacctcaaagccctacacacaacactctctccttctcgtccccgactcgccgcccagactctcctcgcccgccacttcaccgcccaatcaggtgcttctgtccctcaaaaagagggttgaagatgtcgtgccaattgctaccggccacgagcgtgaggagattcaggccgatctcgagggaagggatattcttgaaataaaccatcccgtaggtccttttggcgtttcataaatagggtttggaccaatccatagccgaagagaaaaagagacaaggaccgtctagaattgatttcattgagtgtagcagcaaccaattccatttccagtttctgattcgtcaaacggacaaaggaagtgaaagggtttagggtgtgacctgagatcaacatgttgcggaggcttctctcttctcacctcaaaaccctagccgccaccgcttcttcttccactccccgatctgcttccgccgccgccagattcgccgctctctctcgctcctcccgctacttctcaacccagtccgaggatgctactgccatcaaaaagaaggttgaggatgtaatgccaatcgctactggtcacgagcgcgaggagcttcaggctgagctcgagggaaggaatattcttgaaatagaccatcccgaaggtcccattcggcacggaaggaagcacctgctgttgttcaaatcttactatgataaaaggatagtcggatgcccaggaggtgaaggtgaggatgagcatgatgttgtctggtttttggccttgagaaagacaaggtgctctcatattttgtgtgcgcacagaatttactcacttgttgatcctcatgtaataggacttgtctcttggctctgatttcatccttcattttctcttccaattaaaagttatatagtgtgacaataccttcttaaatattacaatgcattttttagatcaatgtcccccaacactatcatttttatgtctttcatatcaaaagaaactgatacaacctctgaaaggccagatgctgttttcatagctttttgcttgattctatcaccatgtaagtccaactgtaagactactttcttcattgtcgttgctgaagcttgcttgtgagagctaacaacaattgtttggtgacaaatgacaattgcaaaaaaggaagtctttttattttggaaatgaagcagagactataagtatttcattttcagcgttccttgggttgggtttggagccatccatcgcaagaaaagaaacaattccatttccagtttctgattcgtcacgtcagacaaaggaaggggttagggtgtgacctgagatcaaaatgttgcggaggcttctctcttctcacctcaaaaccctagcctcctccgccgccgccgccgccaccgccactccccgatctgcttccgcctccgccagattcgccgctctctctcgctcctgcctctacttctcaacccaatccgaggatgctactgcgatcaaaaagaaggttgaggacataatgccaatcgctactggccacgagcgcgaggagcttcaggctgagctcgagggaaggaatattcttgaaatagaccatcccgaaggtccattcggcacaaaggaagcacctgctgttgtcaaatcttactatgataaaaggatagtcggatgcccaggaggtgaaggtgaggatgagcatgatgttgtctggttttggctggagaaagacaagccccatgaatgtccagtgtgcgcacagtattttgttcttgaagtggtaggacctggtggaccacccgatggacatggcgatgatgatcaccattgattgcatccttcaattaaatctggaataaattctggaaagatggagagacattgtttagcatacactctggcctttcaaaatcctgtggcctaagtttgattttgatttgtctataccttattgtgtcaaaacttttgcatcccgcaatttccttcagaaataaaatttgcaaagagagacgtttccaccttccaaaattacgaggctttttttttttttttttatagaaaatttctgtgtttatttttttcgattcagctatcaaatccttttaggatttttgttttttgactctgccaaataattgatagcaacnctattntttt

SEQ ID NO: 3359 - DNA, 715 bp, Glycine max
  Clone ID: GLYMA-23APR03-CLUSTER2267_29
caccaccctcttctttttcttatcatagatagaggctttcattgcttcaaacaagaagagctatttccatcttccagtctaggatatacaagcaatgtctaatatgatagaggtgagagttccaaatcttgattgtgaaggatgtgcttcaaaattaaagaaagctctcttcaagctcaaaggagtagatgaggtggaagttgaaatggaagcacaaaaaataacagtgaggggctatggtttggaggaaaagaaggttcttaaggcaatcaaacgtgcagggaaagcagcagaaccatggccatttccagggcatctcatttttcctcattttacaagtaccctagttacattttaaccattactatgatgcatacaaaagtgaagctaccaatggagtccacactttcttccacacccctgcagtgtattcagttgctgtggcatctgatgaagcctttgcttctctctttagtgatgataacccacatgcttgcactataatgtaattgaactaaaccaggttcatgtatacttgttttcttcacttaaggttagtttctctttgaagagaaggtgaaggagcaaaattgagtgaggcatcttttccaagggaattttgtgctttgtttattggttaactttttttgccagttgtcttgagtgtgttatcatgtgcctccttttcatatccattgcgttgcttggctccttt

SEQ ID NO: 3360 - DNA, 1328 bp, Glycine max
  unsure (1)..(1328): unsure at all n locations
  Clone ID: GLYMA-23APR03-CLUSTER229527_1
tngagtcagctncgtaggccccccccccaaagtgagaagtattcgctatcccgaagttgtagaaaacatgaaaagtttatatataaatcggctacgtaggccccccccccacttcttaaaactggtatctgatttacaaaaggttacaaacttctcttgcataaagaatggcatcagcaacaataaggaatgcagttgtcacgggagcaaacaaagggataggatttggaatatgcaagcaattggtttctaatggcatcacagtggtgctaacagcaagggatgagaaaaggggtcttgaagctgttgaaaagctgaaagagtttggtgtgtctgatcaagtggtgtttcatcagcttgatgtgactgaccctaaaagcattgaatcccttgcaaatttcatcaaaacccagtttggaaaacttgatatcttggtgaataatgcaggaattcatggagcatatgttgaccgtgatgctttagctgctgctggggaaaaagttgccaatgttgattggagaaaaatctcaactgaaaattttgaagctgccgaagcaggcattagaacaaattactatggagtcaaattaatgtgtgaagcacttattccccttctagaattgtcaggcacaccaaggattgtcaatgtttcctcctccatggggaagttggagaaaataccaaatgcatgggctagaggagccctaagtgatgctgagagcctaacagaagaaaaggtggatgaggttttgaatcagtttctaaaagattttaaagagggttcattagaaaccaaagggtggccacatgctttttctgcatatatagtctcaaaagctgctttgactgcctacacaaggattcttgctaagaagtacccatctttctgcatcaatgctgtttgccctggctttgtgaaaacagatctcaactacaatactggctatcttagtgttgatgaaggtgctgaaagtgttgtaaggttggctctgctacctaatggaggtccttctggtctattcttttctcgaagtgaagtggcaccattctgatccaaagactgttgtgtacttgaagaggataaataataagcatggtttcatgataagacatgtatcaaatttgtacctagcacaacaagaaaataagccacatgtctgatcactgatggctgcccatcattgatgagaacaaccctatagtgaattctagatattacaatgacattactaatttgagaaatctaattttggatataaagatatctgtttgtcaaaaaaaaaaaaggataatgaaagacttgaatgatctttactagaagctataat

SEQ ID NO: 3361 - DNA, 1612 bp, Glycine max
  Clone ID: GLYMA-23APR03-CLUSTER229573_1
gctcagctacgtaggcccccccccccatatactaacctctcaagaatgtccaccatcacggcttcttacaatgtgactccgaatgagccaactccaaacgtttctttgtggctttccgagagtgaccaagttgcacgttggagtcacacctccaccatctacatttacaaagaaaaccaaacccaaaacgcccttgagagaatgagggattctctaagcaaaattcttgtgcactaccaccctttggccggtcgattgacttggttagagggtggtaaagtagcactgaattgcaatggaaagggagtgacattgattgaagccgaatcacaaaaaacaatggatgattatggcgattttgcgccgagcgaaaagctgaagaatgaactcattcctccggttgattactctcaacccattgaggagcttcccttgttgcttgttcaattaacaaggttcaaaaaaggaagcagcaacaataataataataaccaattaggccttgcaattggagtggctttttgccatgttttgtgtgatgggttagcagccataaggttcattaatgcatgggcaaagcttactagaggggaagtgttggactcaattgaaatgtttccgtttcttgatagaacaatcatgaattccacatacccaccaagggctccacgttttgatcaccctgagttgaagcctctgcctctcaaactaggcaccactgacaccatagaagaacagaaaaaggagaaaactgctgtgattttgagactcacttcacagcaagtggagaaattgaagaagaaaaccaatgatgaacgacctcaaaaagaagaaacgttacgaccatatagtagatacgaagttattgcatcacacatatggagatgtgcatcaaaggcacgtgagctagaagatcttcaaccaaccgtggtaagggtaagtgcggacattcgcaataggctaaaccctcccctcccaagaaactactttggcaacgcattggccgtggcattgacaccaaaatgtcacactaaggaactcataacaaacccattaagccacggtgcccaaaagattagggaagcaattgagttgctaaatgatgagtacataaggtcacaattggacttcattaggtgccatgagcaattggataggataagggcctcgtatttggaccaaggggagccaaaaaatgcacccttttatggaaaccctaatctcactattgtgagttggatgagcatgcccgtttatgaggctgattttgggtgggggaagccggggtattttggtcctggtgctgtgtaccctgatggaaaggcttacattattcgaagctcggatgaggatggctcactcgttgtgtcggctcacttgcaaacagcacacaaggagcttttcaaaaagttcttctatgaggacatatgaggattttgtgaacgactttttttttatttttttatatatcttatgcttgatgcatgctaattttcatttgtacaacttggtttcgtcgtgttttgtgttactttttcttttgtcattgttaatttaatgaaaattttgccttgtttggtataatgttgatgaaaaaaaaaaaaaaaaaatt

SEQ ID NO: 3362 - DNA, 1337 bp, Glycine max
  Clone ID: GLYMA-23APR03-CLUSTER2301_8
cctcacccttaaccttacatagcttgagctccttcagcgaccggctgaggcggtcaacgctgtcgctgatttcctcggcgcagtccttgagtgcagcgtgctctctgggtttcaggccaccgacaacgacatcaacgccgccgttttggtcgccgccgccgaatcggatcatggcgttgatgtcgttgtcggtggccggaaaaccagcgcaggccatgtaagtcttcagatcatggtggctgagcttgccgtcgccgtccttgtccatgaccctgaacacgtcctccatggccccacagtaccccacgggctttctctccgccgagaccacgcgctcgaactcctcgtactccacgaacccgtccttattggtgtcagccactgtcatcattgccccgatcacgtcatctcctccgccgccgactccggcgtagaaggcgcggaggtcgtcgcggctgattgtgcccttccggtcgcaccctcctcccttcctccgtctccgatttccgaccggcattcgacgtcctcgatgccgaccgcgacggcaaaatcagccgcgacgacctccgcgccttctacgccggagtcggcggcggaggagatgacgtgatcggggcaatgatgacagtggctgacaccaataaggacgggttcgtggagtacgaggagttcgagcgcgtggtctcggcggagagaaagcccgtggggtactgtggggccatggaggacgtgttcagggtcatggacaaggacggcgacggcaagctcagccaccatgatctgaagacttacatggcctgcgctggttttccggccaccgacaacgacatcaacgccatgatccgattcggcggcggcgaccaaaacggcggcgttacgttcgatggtttgcttcgtatattggcgcttgattgttcccccgctaattaattaaacctctcgggtattggctgcgcgcgtttcgttacattaattaaacaagtgttgggttttgtactttgtccaagtttgagaaattacagtgattaattgaatccaaaacaaaccaccggtgtaatcaaataccacccgttcttatattcttacgttcacaatttcttctatctcattatttctctgtctagattctttttatgcatacaccaaaaaatggtgagtaattctaaaaaaaaaacaagggttgtagtgagccatgccaaaatggtcgttcatattccaatgtttgtttgtccaaatatggagtaagggaccatttatttttgtttggcttggctcgtgagatttattggcaaattagtgcaagtatttttggggaactatcaaatattaattactaa

SEQ ID NO: 3363 - DNA, 1124 bp, Glycine max
  unsure (1)..(1124): unsure at all n locations
  Clone ID: GLYMA-23APR03-CLUSTER23024_1
attcagccaaaagggtcgaagcaaatcgtctatcttcctttccctcgcctcgcctcgcctcccttctcaagagtggagctctcgtcctgtgtatctcactggagctctgtggcccctctcacggtcttcgctatccaaatctctgaacgattcaacgacgccgtctttgagaatcgcgatttgacgctttattacgtgattctccctcctttctgccattaacttcattatcgggtttcttcaaagcgcaagttctttcagctaaacgattgaaggccgttagccattaaaaaagaccgaatcgttgcaaaagtggaagttttgtttggtatcaggtgatggcatctttggaaataaaatctggtgcattggtttctttacaagacctgcgcccatcttctcctttttttaagcaaggtgcttcactcagaataactggaaagttgcacgaatactctatagagacaggcctagcaacaattatcgatggtgatgacattctaaaagttagtaccaaacatctgagggaccttacttttcaagttggctctgtctaccaattcattggtgaactccttatccaacctgacaatgagggagttttgcaagcacgtgttggtagaaacgttgatgggattgatctcaatctttatcatcaatctctgctgcttttaagacagtttcaaaccaatcatttaaacaatccagcaacaatgtaaaaatgggaatatttgggacttgataagtggagtcttgcatttgatgccaagcatgggagatgtagagaaagtgtgttaggtgaaagggtgagtgtctcaagcaaaaaatcttgacatttttggatcaacttggatgagagaatgaggatagtagatgttggttgcttgcacattgggcctagcagtacttgtgaagtattgcaggattgcatgagttgagtagtnttcaagattcactcgaggttgcttctcttccgccatgagtggtgtctcctccaagataagagagcaaggagggagcgaaactggttgaggttgaanagaagaagactctccttgtntagcttgcctttnttggtgcttttgtttcttcctttttgaattgtattttttgcaagtctttcc

SEQ ID NO: 3364 - DNA, 1420 bp, Glycine max
  Clone ID: GLYMA-23APR03-CLUSTER2310_8
aaactttaaaattatttttggtatggtgagaaagcattaggcgccttgtgtagttgagttgagctgaaagaaaattgagagaaaattcaattcaatgacagagaatctgaagcatacggtggatttggaatgcagtgataataacattaataggccgtcaaagatatcaataatcgagtatcccattgacagtgacattgacgaagaagaagaaatgatccaaaaccctaggaatggcattcaacgctatttggttgctatcgagtatattgggactcgcttctccggttctcagaagcagctcaatgtccgcaccgtcgtcggggttcttgaggaagctttttctaaatttgttggccaaccagtctctgtgtcttgttcaagtcgaactgacgctggagtgcatgccttgtcaaatgtttgtcatgtcgatattcaacgcatcagcaaaaggaggcctggtgaagtgttaactcctcatgaacctgctgtcgttggaagagctgtaaaccatttcttacagaagcaagacagtgacttaatggttattgatgttcgatgtgttccatctgattttcatgcaagatttaaagcacaagagcgcatatacttctatcggttgctgtctgggccagagcctttgtcgaccttcgagaaagatcgagcatggcatgtacctgaggagcttagtcttccagctatgcaagaagcatgcagagttcttgttggattccatgattttagttccttcagggcagctggttgtcaggcaaagtcaccaattagaactctggatgaactcagtgtcaatgaggtaattgaaagtccatattttccatctctaatggatagagaacaacataataaagtcagtggtgatcttcgtagctgccccaacaactctgaaactgacattcctcctacttctaatcctagcattgataaagtaatggcatcaagtcaagatgtaggatttggcaaaagaaggcgacatcgttgcctggtggtaacagcacgtgcacgtgcttttctttaccatcaggttagactacttgttggtgttctcaaggctgttggcactggaaacttaacaattccggacgttgaaagaattttgaatgcgaggactgttacagccgcaagtccaatggccccggcatgtggtctctacctaggagaggtgaaatatgatctgcctaccacatagtagatatttcagggtctctctctcggaaacactaatgcattcaatccaatggactggatttttttatatttccttccaagtccaccagcagaggattaattttgtcccttgtatctctattaattttcgtttaacattactcggactcccatcattactttttcttttactttaaaaaaataaaaagaatcttctacaaaaaaaaaaaaaaaa

SEQ ID NO: 3365 - DNA, 1245 bp, Glycine max
  Clone ID: GLYMA-23APR03-CLUSTER2325_29
tcagctacgtaggccccccccccgataccaaaaacaaaacacaagccaagtgaaagtgagaaaaaataaaaatcaaagagcataatgtcagggatcattcacaagattggggagacccttcatgtgggagggcacaagaaggaggaggagcataagggtgagcaccatgctggagaatacaaaggggagcaccatggtgaacacagtagtgagtacaaaggagagcatcatggtgaacacaaagctggagagtaccatggtgagcacaagccagagcacaaagaggggttcctagacaaagtcaaggacaagatccatggtgagggcggcgccgccgagggcgagaagaagaagaagaaggagaagaagaagaaggagcatggccatgagcatggccatgacagcagcagcagcagtgacagtgattaaactgctgcatcacctatatatttaaaaggtatacttttgttttgcatttttatgtttggctctgtcaaaattaaatctttccacattggtctattacaacaacatggatgatgaattaggaaatttaattatgatcttattttcttctatcacttttgagctaacattagttagggaaattatacattcgggcacgatgacaccctgtgtgttagatctcatttttaaacttcatataattctttttcgggcgatctaagatgttataaccatggaattattggtcaaattttagtttctatataggtatattggaaaaaactatgatcgtcaatttctgctcccgcatgtatctcctatttttacatgtgtaatgattagtgtacactgcattctagagacataataagtgaaaggaaatgaaaggaaaaagattaaaaacatgaaaataagtaaatataagaaagagatatttaggatttttttacaataatgaacaatgacaaacgtttgctaacatttgttctgattttttttccttcgatctaatgcaggtttatgggaccatagtagcgagggctgtgccttaatttctctctctctctctctctctctctctctctctctctctttttcctttttccctatcttgtgatctatttatgagtgagaaaaacaaaagtgagaaattgtgcgtgtatctggttgctaattcgagtgctattagtctgtggtttggttggtttgtaaccccgctacttgggttatgtttgattgtatattatcctagagaaataaaaattttaaattatcagt

SEQ ID NO: 3366 - DNA, 1413 bp, Glycine max
  Clone ID: GLYMA-23APR03-CLUSTER2325_36
tacaagtctcctcccccaccaccttactattacaaatctcctcctcctccatccccaactccttactactacaagtcccctcctcctccatccccaactccttactattataagtctccaccaccaccacccaaatacccacctccttactactataactctcctcctcctccagttgtgtatcccccacacccttatcatccgcaccaccatcctttgattgtgaaggtagtgggtaaagtctacagctacaagtgctatgactgggagtatcccgaaaagtctcataataagaaacacctcaaaggtgctgttgtggaggtcaaatgtaaagcaggaaggaatatcatcaaggcttatggtgaaactaagagcaatggaaagtatagcattacggttaaggacttcaactatgtcaaatatggatccacagtgtgcaaggccaagctttatgctccacctaagggttcacccttcaacatacctaccaagttgaatgagggaacagagttgaaggtgaaatccaaagacaaatatgaagttgtgcttaaggctaagccatttgcttatgcttccaagaagcattttgaagaatgctacaagcccaagccttcaccgactccttactactacaagtctcctcctcctccttctccaatttacatatacaagtcaccacctccaccatcacctacttatgtttacaagtcaccacctccacctgtgaagtcacctccatattattatcaatctcctcctcctccatcaccggttcctaagccaccatattactacaaatctccacctcctccatcaccagttcctaagccaccatactattaccagtctccacctcttttttttttttttttttgcagaatctgatacctcgtccatattattcaaatcccacaacaaggtaaaaaaaaaacaatcaatggttttatttaattgatagctgaaattagtagtactgctcttgaactactttttgaagaagcctccagccaagtttgcaagaccaccagtagagaaacctccagtttacaagcccccagtggagaaacctcctatttacaagccacctgttgagaagcctccggtctacaagccaccatatggaaagccaccatacccaaagtaccctccaactgatgacacccatttctgaaggatgtcaagaggtgtattgagtatatgctaaataagaggtgctcaaaatgtagttatagattacaaattattgcaagggttgctcttagcttcttcatttcaagcttttgtttacactttgcagtgctatggcaaagataagagtatcatggatggaaaaagggggggggaaaatgttgctttgtactccaaattatgaataatagaactttatattatttatcaaaaaaaaaaaaaaaa

SEQ ID NO: 3367 - DNA, 1151 bp, Glycine max
  Clone ID: GLYMA-23APR03-CLUSTER2325_49
accagtaactaaaaacatgaggaatatggcttccttaagctcctcattagtgctgctccttgcagctctaattctatcccctcaagttcttgctgactatgagaagcccccaatttacaagccacctgtttacacaccgccagtttataagcccccagttgaaaaaccaccagtgtacaaacctccagtttacaagcctccagttgaaaaaccacctgtttataagcccccagtttataagccacccatttacaagcctccagtgtataaacctccagttgaaaaaccaccggtttacaagcctccagtgtataaacccccaattgaaaaaccacccgtttataagccaccagtttacaagccaccagtgtacaagcctccagtttacaagccacccgtttacaagccaccagtgtacaagccaccagttgagaagccaccagtatacaaaccacccgtttataagccaccagtttacaagccaccagtgtacaagccaccagttgagaagccaccagtgtacaagcctccagtgtacaagccaccagtatacaaaccaccagtttataagcctccagtgtacaagccaccagtatacaaaccaccagtttataagcctccagttgagaaacctcctatttacaagccaccagtttacaagcctcctatagagaagccaccagtgtacaaaccaccggtgtacaagccccctgttaagaaacctcctatttacaagccaccttacccaaagtaccctccaggctccaactgaagacacccacctgattttgaattaagttaagggatgtattaagtatatgctaaataagaggtgtatctacaaccattgactttgtcatgctcaaaaatttagtttaatttacaaattatggcaagggttacacctggctagcttccgcgtttagatcatttgtttatagtgctatggccacgacaagagtgttatgggtgcatgaatgtaaaacgaaaaaaaaaaaaattgtgtttattttgtacttcaagttatgaataaaagaatttcactgtttgtttgtatctttgttggttattcaacactccttcttcagtttgtgttttggaaagttgggaaacttccgttcaattagttgtaaccgattaaaaaaaaaaaa

SEQ ID NO: 3368 - DNA, 1506 bp, Glycine max
  Clone ID: GLYMA-23APR03-CLUSTER23349_1
catgataacgtgagaagcccctgcccccccgcccgtgccggctttgttgcgtctgaggcctcagtgtcgagggaatttgctctagacaagtttggtgattgacgatgtcgggcttgaagcttggcacgactgcttccatctacgttcgaacagcgaaaaccaaaagcaaacccctcttatcatggagaagcccaccccaacacccccgcagccgcaggtacatgctttccccttccaaaaatcaaatcctagggttcacacctagaaacaaattcccatgctattctttgggaagggctggtcttgtcacagattttggttcgtcagtgccccaacctcaacctcaacctcagccaaagccagagccagaaccagaacctgaaccttccaaattgcttacgttgccaacaattttgactctaggccgtgtcgccgctgtcccacttcttgttgctactttctacatggacggttggcgtggaactgctgctactaccagcattttcgtcgctgcatcaatcactgattggcttgatggctatcttgctcgcaagatgaagttaaaatcttcattcggtgcattcttagatccagttgctgacaagcttatggttgctgctacactggtcttattatgtactagacctttggatggtggtgtgtttggacaagcgccgtggctactcactatacctgcaattgccataattggtagagagataaccatgtctgcagtcagggagtgggctgcttcccaggatagcaagcttttagaggctgttgctgtaaataacttggggaagtggaaaacagccacacagatgacagcattaaccatccttcttgcgacccgggactggagccatggaggaggagctgccattgtagtaggctctggtgttgctttgctttatacttcagcagggcttgccttatggtcgttggttgtatatatgaagaaaatatggagggtgttgttgaggtagcttgcgaacatttaccaatgtcacgaaagggggctgcaattttagtggcatgcaaatgtttttttttttcctgcgcaatctctaaccccatgcagtgtcatttctcctactcgtgtattttctgcgcatttttttggtcctctaaaaaagataagggccactagccatgcttaagcgttacagcagtgattgtgttgggaaaacgttgtgttgtaagttgtaacccacgttttccccaaatccatgaaggcacttgcttctccgtttgatgctttggaaagtgtgaacacacgcattttgttttaggccctaactcaatttagagtcattgaaagtttgagaattgcgaccagagaaaattcacaacaggtcaggaattattgtataatggttgatttgttctgatatagttcaacgatgcataaacaaaaaaaaaaaaaaaaatggtggtcgctcgggtcatgcgccgtggcttccccgcgctcccccgcctttgccataattggtagagagataccca

SEQ ID NO: 3369 - DNA, 1475 bp, Glycine max
  Clone ID: GLYMA-23APR03-CLUSTER2334_6
aaaatgcatcctcacactcctagacttcccttcttcaaaccccctttcaatttcagataaccctctttgcacaacgattctcagactctgagctctctcgtcggtggtggtcagagaaggaaaatagtcgcaaacaaaggagaaaaagaccccattgacaagcggcacatcgtttggagctctttctactaccaacaaggatcgcggcaggatgcatggcgtctatggaacaccacgttctcgaactcggcaaccccgatctctgagaaaatgctctccatgaactctcaaggaaatagtttcaatattccctgttatttcacctccaaaccttactccagcacaatcaactcgagtgtgcaatgctcttgctctttttcagtatggaatgtcaattctgcaatgaagatagttgcaatagaattcaagacaattctgcatggtcttcaagggaaaggaacccagtgggatttcaacaagctggacacaattaggcaccagtttaaaggaagcagctcaaggcacatacataactcagttggaaaacaataccatccagtggaaacaggggaaaaggtgaaaggccaagaaatgtaatatgcttactattattacctttttagaattacagctatagcagaaaccttctgagcaagtaatggtggaggagactgcaatagcgccaaaagttaaaaatacaagcaactaaataattactgaaaccatatttagttttctagatttcacttaaaaattaacaaacagtagtataagattgagatgtcctatctgaaaattcaagtttaaatatctagatttacagagatgacactcaaatttatctatcttgcgtggcaaattctacatgcaaaggtgagtttggcacgcatcttgtgaaaattcaaagtgcaagttatatttatctgtggatgtaactgtaagtattgtacatcacccaactccaagcgtgtcaaaagtgtacatcatccaatattttggtcagacaaatttctgccaagggacaacattaaaaaagtttgcagatttatatactacaaccctgagtgctcattaaagatacatgcaacttccagtatctccaaggggatatagattggaattggacgtatagctggtttcatttttcttgggtacagtagaaacaaaaaatggatgatgtgcatacttaaattttagaatttctcttgcaacttactcttaattgcacaaaatgggtattttgcttggacttcaaattgatctcgtgacttactgtcaatagctcaacagtagttatcttctgttagtcagttgagaattgtgtcggagttggcatgtcaaattgtgttagtagtttcacttttgctttgtaaaccacgagcttaaatagaagcttgttacgtacctctttaaggggaagaatgtaatcattatatataatactattgagctgcaactgagtgcattttccactg

SEQ ID NO: 3370 - DNA, 1059 bp, Glycine max
  Clone ID: GLYMA-23APR03-CLUSTER2357_6
agaccagagaacgaataagaaaataagaagaagaagagcgaacgaacgacgatgaacgtggtgagcgcgttaatggtgactcggaaccaactcggagcacctgaaggcatacccttcggatcggtatggttgttcgtctacgccgggatctccttttccctcgtcatcttcgccggaatcatgtcaggtctaaccctaggtctcatgtctctcggcctcgttgaccttgagattcttcaaagcagctgttctccctcctagaagaaacaagcagcggttatacttccggtggttcaaaagcaacaccagctgctagtgactctgcttctgtgtaatgctgctgccatggagatagactgccgaagaggccatgactcctatagtcctattgaatcaactttttccttggatgttaattcaaaattggactggtaaatgtttcacatgtggcctccacaatatgcccttcttatttcctaactgggttgatcccttatatacctgacaatgttgaatggttgcactgacgtttgaacctaggacctcatgcactgaggttatagtctgggtctgcatccctgcatggcctacttctaatgcaactgtaaatgatttattttattgctggataaattgaaatgatttatatcttggtatacttttttccattaaatgcttcaatgcaggacagaagaattaaaatgaatttaaaagtgatgggttcggtgatgagattaattgttttgaagtttgtttatgatgattccaaatttttattccagataggcattgtgtgtttgtgtaatgcgtatatctttataatatctggtcttgattttaatcattcagggaggtcaaagcaagccagggctaactggaagaaatctgcagaggaggagggatcgaatacaaggacacagtgagctcgttttttgttttttatccggaaggggctactattcgtacatttgtgcataaagtgttatagtgtatatcaaaagggtgttcatacaaaggtgataaatgttaaatttaatggtcaatatctacctttcttct

SEQ ID NO: 3371 - DNA, 880 bp, Glycine max
  Clone ID: GLYMA-23APR03-CLUSTER2373_111
tcactcctcattttgccagtgcctactaatagcaacagaaccaaacagtgtctcatgatactgtttttgtttctgatgccccaacgtcgcagccttcctccgccgccacccgccgccgtcttagctctcccttctcataccttggaatcaaatcacgatgtcgaacccagacactcgatcattcaattggcactacacggaactcgatgacagagacctagagatccgaggtaggacactgtttttcgtcatcgtactcttctccattattcttcttgtcaccgttctcttcatctacacgcgctgggtttgccgctaccagggacgactccccaccaccgcgttctccgccgcagccgtccacgcgccgccgctagcgccgcctcagggactggaccccgcctccattaagaaacttcccataatcctccaccacgcgcctgcagaccgcgacgaaagcgcgtgggacgaaacggagtgctgcatctgtctcggcgagttcagagacggtgagaaagttaaggttttgccggcgtgtgaccattattttcactgtgattgtgttgataagtggctcactcatcactctagttgccctctctgcagagcttctctcaaggttgaatcttccttccctaagattttgattcaggaaccaccccttagaattgacttccagttctagcttcttcttcttctttttttttttacaagagacgatcgtatttatttgagtccattgagattattaagggcagaaaaactcttgtatttaatgcaaatatacatgcagaattggaatttgaaacaaatgattaatctgaaacgaagtttgtttctttttaaaaaaaaaaaaaaaaaaaaaaaaaaaaaaaaaaaa

SEQ ID NO: 3372 - DNA, 1713 bp, Glycine max
  Clone ID: GLYMA-23APR03-CLUSTER2373_145
gacagtcaaagctttattttattgtattttatttatttaaaggaggccaaagccactacataactatgaacctaggagttgcaactcctataaagtcttcccaaagaagggatacacaccccacactgggactatgcagaatcaaaggtgattcatgaccatgatgagcccagttagccaaccaatccgcaacacgattgccctttttatgggcatgagaaattttatggaaagctcttcacaataagtttccaaccgatgacaacttgtggaaaaggggcattcattttgtttctgtttgcaccaactttggtcatgattctgaaactgttgatcacttctttttataccgtccttttacccgccaaatttgaaattggatctcctctatgctcaactgttgttctgatctttcctccatccataatgttcttgctgcgattaccttttcattcttctttatttggaaacggaggaatcttataaaattttaaaatcagcacatgatttatatatctgtcagtgttcagctttctggttctatctcttctggtttatgacaaattcattacagatttcagtactttgaagaacttttcagttagcagtcacccacagaaggctcaggttatcaaacaggtttcttggaaggaagcttcctgattatccttggataaaatgtaatacagactgtgcagctagggggaatcctggtttggcaggttgtggcaaattgttcatatatagcaatgccaggttcttgggaaattttgcatacagtatagcaattaattcagctttctttgctgaggtaatggcggcaattattgcaattgaaaaagctgtggaaaatagatggaatttcctttggctgaaaactgattcaagctttcaactttcaagtgccaaatataatcccgttatcaaaggtttgatcattttgcaagaacgcaatgatagattgatgattttggaatccagattccctgcattggattgcaaagcgaaaagttcgcagttgggcataaaatgttgcctcctttcaccatttccagaaaacattagaaccgcacttgtatttgtcctttccttcacattcaagctccaagtcgtcactaaggaatggcactttcttttgtttggcaagatcttggcaaccagtgaagttctcagggaacttgcaactaccgaattccacggtgtatgctcttgcaaagtttgctccagtagtagctaacctcttcttgtcattcaattcctatagcacataaacttatcttgttggccttgctcctctcaaggtaatcttcaatgatcccagcattggcagaagaattggaagctgcagaggtgaaaagggtagctgccaagagaacaagggcacctctccttcctccttcagattctttggctttaggaactctggcctcagctttgatcaatggcaacttgtagccagagcatgcaacataggccacggaagtgaccttcccattgagctccgaacacgctgcacctgatatggcatagctacaggccaatacgctagagttcatggcagccatgcgtgggatgaatggagggaaggtttgtgatgtctacgagagtgaaagggaggaaaatgaacttaatttgcaagacccaagttttgtgggttgttattcatattattattttctcttctttccccttctgtcgtcttctcgcagccgt

SEQ ID NO: 3373 - DNA, 567 bp, Glycine max
  Clone ID: GLYMA-23APR03-CLUSTER2373_33
aaaacgatacgctgcgattccttcatttcccgtgtgattcaccaccgatctgataatcgagttgcgttgtgtgtttgggaaatggcgtcgagtgtgttgaagagtctcatgagattttcgtcatcgaggaacacgaccaccagaagtttctgtctcgtgacctctcaaatcagcaaccacactgccaagtggatgcagataccaattctgcccttggccacccgattgaatttatatgccttgacttgcccgagccagctgtttgcaaatattgtggcctacgttatgttcaggatcatcaccattaggactgctttctacaagtattctggtgtgcatgtacggaatttctgctgaacatcaatgtttttggttacaatgttttccgacgagatcatggtgtaacaaatatacttctttgttacaatttgctaaataagatgtttatgtaccatatgctgttggtgttgggttacattgttatgtgcattgtgcaaactgctgtatgtaattgtaagactggaggtgctgcttcattgaacgatctattttatattcctaatttac

SEQ ID NO: 3374 - DNA, 1359 bp, Glycine max
  Clone ID: GLYMA-23APR03-CLUSTER2373_97
ttttttttttttttttagaaacaagtaactggatcttttataaattcatcatcaaacaacagcatctaaaaatcgaaccccaccctcgctgtatttacataaattaacctaaaaaggtttaaaaacttaagaaaatcaaattaaatcaaccaaccaaaacccctcaattaataacaacacgtcctctcttcccttttttttactttctttatagaagggtatttacgtcaattccgaatgctcctgtgccctttccccgttgttgttccttctttcttctgcggcgaggagaagagttgtccgaagccgataaaacccgatttcgatgccccacggagggagcagacggggacgttgagcaccggcgtaaccctaacgttggcggaataagagcgttccattccgcggtgcttgaagcggggcccaccgttgaaagtgcttggactactcgagcttcgttctaagctctgaaacactattttccccgaagagttcattctagggctgtccacggaaactcccctgcacgtgaccgtttccgattcccgccggatcggactcctccccgggcgggaaagctgggaaggctggtccgacgagtgcttgttcgcgtcgaatgagttcgtgcggtttttgactaggcgaattctacggttagggttgcggtggagtgagatctgattagtgttaaggctaaggttagggttaggtttatcggaatcgagggataggcgagggaggtcatcgtggtcgtggcttgaggaggatgaggaaagagagaggcgcgacgaggtgatggagagggattcagcgtcggaggaatttgaagctagcagcggcgcgttttccgaggagaaggaggaggtagacgacgacgtcgttttgcggtggaggagattttttagggatttggccgaagagggtggggcggctttggcgttgttagtggcttggtagaattttttgaggccgaggaggtctttccagcgggaggagcagcgtggggctttgggggagaagagttcatggggcaggaaactcattgtcagaaagagaagggcatccctcaatgattttgataggttcaagataatgttggccaagatcaagaaggcagcggttgtaaggcaagagcttgctaagctgagaaagagcgcttaggcatagcttcacattatagtcttcaaatttttgttatgaatttgcttaccttggttgttgtgagatttcatgtatcattgaaccgcttgatttaatgttagtactccaagtttccaatactttgcatttgcttgcatattttataatattatttgtaagatcaacttatattctcaggctgcaagttagagttgcaaa

SEQ ID NO: 3375 - DNA, 1612 bp, Glycine max
  Clone ID: GLYMA-23APR03-CLUSTER237555_1
tcagctacgtaggcccccccccccccattgattgatgacttcgtatcttgtgtaagaaagagatattccatcaagtttatagagactgaaagctgcctaaactggatcaatagaatagaagacaggtaagaacgaatgcgagagaatgagactcgtaggtagtatttgttacttgcaccggtcgttacaccgacgccaaattaaggccgacatggagccatgcgcatgattccaagagtcactagaggcgaaacttagtaagaataacaagtaatgtcacgaatggatgaagcaagcacttttagatggtatcgatcagagccaatcaagccttttccctgattatcgtcacttaaatcccactagccgaaatcgaatccgtcaagtatcaagtaagagataagccagagatccagatcattagaatacgtcaccggtccgagatgggccttctcgcgaaaaagagtaggttattcctatcactaggagtagtagcgctagcggcgcagaaggataaataaataaagtagctaagcgctaagaagctatctagatagttagtttccagctgagggaaattggcttagattggtcttagcttcgactcgtagtcttcgaccactcttcttcttctccccgaaggttgcttgcttccattcaggtagctattgctgagaaatggccgaaaaaaggaaagtcttattccacttgctttctcgcttgacttgaaaactggaaaaactaactaggcagctatcggaaagaaaacaaacaaggagttgactacgcaggctttttagagagagagagtcagggggtttgcttgctggctctcagggcttatagtcggttctaatctaagtccctttcattagctacgctcaggtttcaccaacttcgcgtcgggttcacttcagtgaaatcttgttaaagcaaaccaacggttggtttaaccttaggacggtagcgaaaggaaccttctagctaaccgggtcaattcaaactcactacatactccatggaattgagaacccggcgtaattggttttctccagcggctctttttcctatattctgatggccctgctacgtctgcccactacagaacaggcctgactcccgtgagcaggtccgctggctcttagtatggcttttgacttttctgatccggcatgataacaactcgaactcaacttctattctttcaagagcaagagaagggcaccgagatcccgcgtaagcgtcgtttgcccgttgccaataggatcgacttgggtagtaagattcaattgtgagattcaaaaatacgaaagtaaggggccggaaatcttgggatcaaaaggttgttctaaaggactgtaaatccttgctcctaggatccaagaagggctttttggttttcaaattcctaattacataacttactaccctactagtgtagtgtctactgactgagtcgtgaattagattggatgggccgatggagaatcaaattaggagttgtggaaaggacttaagatactatgtatcaagactcgcgataggatttgagtgctcagtcattcaatatttgatgggtgattttttcttatagaaaaaaaaaaaaaaaaaa

SEQ ID NO: 3376 - DNA, 1046 bp, Glycine max
  Clone ID: GLYMA-23APR03-CLUSTER2389_3
atactttccactttcactttcaaacatcacaaacactttttaacgttgtttgattttggtgcaatctttacttcacaacttcctcgtacttctgagaatcatcatcaaaaaccccaaactcatgatcatgatgatgatgaataggttccttccactctttgtgttcgcattgttattcatgtggtcggttcacgcagacaatgctcctgccccttcacccaagtcatcaccctcgtcgccgacggccaaaccaccctctccggcgacccatccggcgcctcctgcaaagtctccgactttatcaccgccttcacaatctccggcagtttctccatctgggtccaccccgccgccggcgactgcccctccggcgaagtctccggccactcagctaccatcttcggttcctccagcttccagcccttccaacaatgtctcttcgccaccggctccatccccagcgactcctccgccgacggttgctccggtgagttctccggtcggtactccgccggtggcagaggcgcctacgccagattctcctgccggaattccttcatcggccgtgccggcaggttcaccaatcacactaccatccagcagtgcctcgccgggaactgcgccggcgagttcgccggaaagttcacggggttcggttggtgatgaatcgggttcaagttccaaatgcagggctccgatgattttgggtggcgtggcactttgggtcgctttggctatgatctgaggcatcataggattatttttgagtatatttttttaatatttgccacattgatcgacgaataattgattgttattgatcaattttgtagttgggttggttcaattctattcattattttgtaattgattttctttaatgttagaagttagaacaaatttcattttgttaactgtttgtttcaatttgagaagggttttgcttcctgtcaaaagtagaatagggttgtacttcgactggaaattgcataaattatcatctgtacaatttaacatattaaaatgaaaagaaaattttatatttt

SEQ ID NO: 3377 - DNA, 1548 bp, Glycine max
  unsure (1)..(1548): unsure at all n locations
  Clone ID: GLYMA-23APR03-CLUSTER2392_9
agaaatataattttttttcttacttagatatgttttgttttaaaagatagattcatccactctagacagaacaaaatgacaaaacaaacaaagatacaaatgaatggaaaanagtggtagggaggtggtggtgtagtaaaagtgaggtcaaggtcggtgaaatagagactcaaaaccaaatagtttattgctattattatttggccttgttttttcagtgtcaaattgcattattgaaataatcaaatgcactaaccacactccatcacccccatatataccccttctcctctcatactaattaacacactcatccaaacaaccttctttctttttctgtgagcctttctttcagggttcttaacttgatcagtgtgcagtgtccaaatcataagggtagttgcaaattgcaatggctaagcatgatgttgagggtggttccttctctgcaaaggactaccatgatcctcctccagcaccgttgattgatgctgaggaactcacacagtggtccttctacagggctttgattgctgagttcattgccacaatgctcttcctttacatcacagtgctcactgtgattggttacaagagccagagtgatgtaaaggctgggggtgatgtgtgtggtggagttggcattcttggcattgcttgggcctttggtggcatgatcttcattctggtgtactgcactgctggaatctcaggtgccttttcacttttcaatctctaagacacccttttgtaaatacccatgatttgtttgcaaattttggtttcttattctgaaaattgtgaatttttgtatccaatgtagggggtcacataaacccagcagtgacatttgggctcttcttggctcgcaaggtgtctttgattagagcaataatgtacatggtggctcagtgcttgggagccatatgtggagttgggttggttaaggccttccaaaaggcttactacaacaggtatggtggtggggccaatgagctcagtgaagggtacagcacgggtgttggattgggtgctgagatcattggaacctttgttttggtttacactgtgttctctgcaactgatcccaagaggaatgctagagattctcatgtgccggtatgaactcaatcatttttattgccttctttgaaaagacattgttacattaactcagaggaaaatgttgcttgcataagttgtgttgaaagcaatgattcaatggaataatacatgccatgttcatattatattgccatatatcttgcgtaggagtgaatctatggttgcttaaaagcagggtaggtctttcaggtttttaatagaagatcgagttccttgaaattattttagactggttacaggtaaagaaaaaagctgagtggaagtgacttaaccataatcacatatctaatcttcatgcttctagctttgctttctaaatgaaattagccggttattggcattaatagttttcagaagctgtacatgcatgcttccactcaataattttccagttttggggggggggggggcctacgtagctga

SEQ ID NO: 3378 - DNA, 644 bp, Glycine max
  Clone ID: GLYMA-23APR03-CLUSTER24117_5
tccgccgagcttagtagaagagaaaaggaggagcaggaggcatcaccgttaccaaacatggtgaaagggcgacaaggagagcgtgttagactttacgtcaggggttcaatacttggatacaagaggtccaagtcaaatcaatacccaaacacctcattaatccagattgagaatgtaaacactaaggaagaagttgcgtggtactgtgggaagcgtatggcttacatttacaaagccaaggtaaagaaggacggaagccactatcgctgcatttggggtaaggtcaccaggcctcatggtaacagtggtatagttcgtgctaagttcaagtccaatctgccgcccagatcaatgggagcaagggttagagtcttcatgtatccaagcaatatatgagtgatatgaatggaataatcaatggaaataaaagtattatacttcagttatgatggggccgtggtagaaagtgatgaataatgcaagttctcaggactcgtgagtcgtggagcttgttttgtcagggtatttgataggaataaatattatgtttctcttttttggtagctcccgagcagggtcgtatccttgtttaggatgaaaagaatgtattgcatgttttctctctactctcactgacatggtta

SEQ ID NO: 3379 - DNA, 1043 bp, Glycine max
  Clone ID: GLYMA-23APR03-CLUSTER24150_3
agagagatgtcaggaccattattaaggcctcagtttgttatgttcggttcttccattgttcagtatggtctttatgatgaaggttggatggctgatctttctcacttgtatgctcgcaaggttgatatagttttgcgaggatatgctggttggaattcaaggcgtgctctgcaggttctggataaaatctttcctaaggatgcccctgtacaaccttcattggtcattgcctactttggtggtaatgattcttctactccccactcatcaggcctaggtcctcatgtgcctctccaagaatacattgaaaatttgaggaagattgttaaccatctcaagagcctctcagagaacactcgcattctacttctcagtgctcctcccatcaatgatgcaacaattaccccaaacagtgatgggaagccatcaaggacaaatgaagcttgtcgtatatattcacaggcatgttgggatgtgttccgtaaaatgaatatcaaggccactgatctgtggtctgctagtaacaaaataaataattggcaatatgtctgcttcattgatgtaattcacttgtcatccgaggcaagcgatatagtgttgaaagagatacccaaggtcctcaaatatgcagaatggaagccaagtgtatattggaaatcaatgccaagtgagtttgatgaacattcaccgtatgttcctattgcacctgatggaaagtcagctattgatatttcctcctgggcgttccctgtcaatggcaaatgggagtagagtactctattatgtgcattgaaaactatataggcgtgcctccaattccttgaattctttgtcacagtctcaaaatagaagtcttgtgcctgaagatatgtgttgcttatagtttgtgtacgttcaatcataaatgaggattcaattatccatggtttttcagcataaaagtgcctgttgaatgagtgtgtcatctgttctttaaggtattaccatatggttttatctcttcattcgtgcggttatatatacatgttttctttgtttagaat

SEQ ID NO: 3380 - DNA, 738 bp, Glycine max
  unsure (1)..(738): unsure at all n locations
  Clone ID: GLYMA-23APR03-CLUSTER2427_11
acaaatgtatcactcctcactcaaataaaaaggcaactttattacacaaaacaacttaaaaagagcaaacatagtttgcatattacgcaagatagtataagtgtatcctaaacagctactgtacctcatccttgtccttcccattgactacatgaccctcagcttcagcttcttttatctgcctttctatatcagccttcttttcaaggagtggttgtatttttccgttaattttttcaagcttctgcttcagcgcactaagatccttggtcttgtcctttccagtaactttcttcttctccttcttgtctttgtcttcttttttcttcttctctttcacttccttcccatcatccttttctttatcttctttttcaccttcctttgtggtttcttctatatcaatatcccttacagaaacttcaaccttgcttttctctttctcaccctcttcttttccatcctccttcttttcttttttgtgatccttctctttctccttcttatcctttttcgttatttttcgttattttcttcatcatcctcgccttcgccattttttcccttttcctttaatgtgtctgtttcttcatctattgtccttcttttcctttttcttctccttctctttcttttccttcttctcttcaccatcaccattttttccctttccctttaaagnngnctgtttcttcatctttgnccttcttttcctttttcttcttctccttcttccct

SEQ ID NO: 3381 - DNA, 1233 bp, Glycine max
  Clone ID: GLYMA-23APR03-CLUSTER24426_1
gtcagctacgtaggccccccccccagcttggcttgtgatatggaacaaagaggcagaggtagagtgtgtgtcaccggggcttcaggctttctcgcctcttggctcattaagcgacttcttttgtctggctaccatgtcattggaactgtcagagatttagggaagcagaagaagtatgaatacttatggtgtctagaaggggcaacagagaggctccaactagtccaagccgatttgatggaagaaagcagcttcgacaacgcaatcatgggatgcaaaggagtcttccatgtggcctctcccgtactcaatactatatctgatcccaagtcagaaatattggaaccggcagttaaaggcacgctgaatgttcttcgctcttgtggaaagaacccagccctttgtcgtgtggtattaacctcatcatcttcaactcttaggctaagagatgattttgatccaaacaccccactagatgaatcatcctggagctccttggaaatttgtgagaaactccaggcatggtatgcgatggcaaagacacaggcagaaagagcagcgtgggaatactgcatagagaatggaataaatttggtgacagttctgccatcattcatcattggacccagcttgccaccaaatttatgctctactgcatctgatgtgctaggcttgctcaaaggagaaaccaagcgattccaactacttggaaggatgggatatgttcatatcgatgatgttgccctttgccaaatccttgtttatgaaaatgaaggctcccatggtagatacctttgcagctctaccgtaatggatgaagatgatttggctgcattgctagcaaatcgttatcctaccctccccatctccaaaaggttcgagaaactagataggccaaattacgaactaaacactggaaagctgaggagtctaggattcaattttaagtctgttgaagaaatgttcgatgattgcattgcatcccttgtgaagcagggccatgtcactcttcagcaaggccacggtccaatttaataaacttacataagttgctagttgagattgtactctgaatccaaatgatcaataacattgttaggttgatggtacttgcttgccaaattaatgaccctatatttcaaatgtagaactgtgatattatatcgagactcggaagtaactcatggggatttttctttccctcgcaaaaaaaaaaaaaaaaaaaaaaaaaaa

SEQ ID NO: 3382 - DNA, 1726 bp, Glycine max
  Clone ID: GLYMA-23APR03-CLUSTER245578_1
gttgagagagaagaataaaggggattgaatggaaggggaaggggggcgatggttgcattttaggagcaatttagatatataatagaacaatgtaggattggtgtttttgttttggcacgggccacaaaaacagtcacgctgctttctgcttttgttgtggtgtctcctcaagtggacctcaacttacttatctccttcttcccgcatgatcccaaccaaaatgcagtaatggaggactctgatgaagatattgtctgcaacttggtgccttcctcccccgaataaatggatttagggctttcaattcttcttcagcccctttttggagattccccagtgctgcccttgccttttcccattacttgcaacggttcaattcaaagctgcttcttctttagaatattgctctttataccccttgttctcaatataacccaacaactcacaactttattattattattctccatgaggcttcatcttcttctgctgctgcttcttcttctatgcttttctgctcctcatgccagtgctcagtctagccaagccaggtcccttgacgcaattctgcaagaatatgccttcaaggctttggtcaaacccagaacaggtaccatttacaacgcaacagcaactcagcttccttccaatttgaccggggttaagatttccgcattgagattaaggagtggcagcatgaggagaaaggggtttcccagttacaacgagtttgagattcccataggggtcattgccaaaccatatgtgaagaggctggttttggtgtaccaaaatttggggaattggtccaacagctactaccctctgcccaattacacttacttggctcctgtcctgggactcttggtttacaatgcctccaatttgtcagctactaatttaccaacgctcaatgttaatgcctctggtgaccctatcaaggtcaagttcctccatgtcaaagttcctcctctgggtgctgttccaaaatgtgtttggtttgatttgcagggttcttccaatttcagcaatgtaacaggaggcaacacttgctccacctcctcgcagggccatttttctattgtcgccgagtcttctgctcttccaccaccggctccttctcaaccgccgtcaccaccaccaccaccagcagcagttgttccaaaggagagcaagagtagcaacaaggttggggttattgtggggtctgtcttgggtggatttgcattcttagttttgctgagtttgctggttttgtggctgcttaagtacaaacaaaaaaagaaaatacaacagatggaaagggctgcagatgccggagaagcgcttcatatggcctctgttggggatactaaagcacctgctgccacggttactcgaacccagcctacccttgaacacgaatatgcgccctgacacacactcatatgtgcaagctccgttgctgtattcataaattcttcaaacacctctttttggtggttgtttgcttaggctcttttcttccccttggttagtttatactggtggtaaatggtaatatagtatagatttttgtgtaaagtaaatctgtttattattatctcctttgtgattcattgtggtgtgaatgtatgtaccagcccaaagtgattctatatgtgatgaattcagttgttccattgacaagaaataaaaatgtagatcctacttttgggattatttttactgaaaaaaaaaaaaaaaa

SEQ ID NO: 3383 - DNA, 530 bp, Glycine max
  Clone ID: GLYMA-23APR03-CLUSTER246331_1
tcgagtcagctactgcccccccccctccgcatttccatcctgtcgtgggatcccagccaccgccgctagaagaagagctcggcgattcccaggtcccgcgagaatatgccgaagcagatccatgagattaaggacttcctcctcaccgcgaggaggaaggatgcccgctcagtgaagatcaagaggagtaaggatgttgtcaagttcaaggtgcgctgctccaagtacttgtacacgctctgcgtcttcgatgctgagaaggcaaacaagttgaagcaatctcttcccccaggtttgaccgtcgaggaggtctgattggatacatggcaacgccgagttgaactacccaagcttctttatcagtagcagagcatgctactctatgtacttttggaacctaagctattagacctgtcagtgttggatgtctggatcttgcatttttggagaaataccaatttacctcgttcaaggatgcaaaaaaaaaaagaaaaaaaaaaaaaaaaaagttttatttatgcctgtttcat

SEQ ID NO: 3384 - DNA, 1389 bp, Glycine max
  Clone ID: GLYMA-23APR03-CLUSTER2463_6
acgtctgcaccgcgtttagggtttagggtttttgcactctcagcccatttcaagacaagcgattacagcttcccgtagttgacggtgaagaatggagataagtttggggaaactcgcatttgacattgattttcatccctcggataatctcgttgctgccggtctaattaccggtgaccttcacctataccgttatactcctgatagcacccctgtgaggatgttggaagttcatgctcacactgagtcctgcagggctgctcgattcatcaatggtggacgtgcgatcttgacaggttctcctgattgctcgatacttgctacggatgtggaaactggatctacaattgctcgtcttgatgatgctcatgaggctgcagtaaatagattgataaacttgactgagtcaactgttgcctcaggagatgatgaaggttgtataaaggtatgggataccagagagcgttcttgttgcaattcttttaatgctcatgaagattacatttcagacatgactttcgtttctgatgcaatgaaactgttggctacaagtggagatgggacactgtctgtttgcaatcttcgaagaaataaagtgcaagctcaatctgaattttctgaagatgagctactgtctgtggttttaatgaagcgatcgatttactgatctctcttctaattctattgatgctatgttgaagcttgatgaagacaggattattaccggatcagagaatagaattatcaacctggttgggatattacctaacagagtcagcactcagatgagttcttgatactccgaagaagagcccatgattcagagtatcatgttgagggtcatgcattttctcatgataggaagttccttgtaagcattgcttatgatcaaatgttaacgatatggggcttggataatatattgcaaggttcaaggaacaaacacaaattcaagtggagtgattgatagtcacgatgatgagatggatcttgatgggaacaagagaaataatgggcatgctgtagggtgttcggacaagttctttgtagatttataggagggaggagatttggaggcaagtttgttcgagcctattagaacattgacgtgatttcctaatcaacatattgagacgatggagccacatgatgaagtgcctgaagtctcgttaaagcagcagacgatggaattgggtccatgatgcaaccaaatacatgcttgtgttttttagaaatttatgagatattcaaaattgttgtcacgcaaagcattattcgatgtcactgttcatcctacaaggttgtctttaggtccaattttgttacagtttaacaccgacatcatttttcacaaactaatatattttcaatccgacaaaacaaacaaaa

SEQ ID NO: 3385 - DNA, 663 bp, Glycine max
  Clone ID: GLYMA-23APR03-CLUSTER2464_8
gaatttgcattaatcgatcatcaaacacatacacagagcctgccatggcttccgcttgtgcttcctctgccattgcagctattgccatctctacgccgagaagaatggatgaggcttgggaagagcaaaaggttgttttgttagtgggaggaagagagcagttggaggacgatggatgggcactagagtgtgtgcagttgctgagcctgacaggcctctctggtcctccatggctggagagctggaatacttcacagataccactagcctctttttcataggtgcatggttccagtacatttacactgccacctgtcctattgacaacctctttgctcaccttgcagatccttcctatactaaccatttcaattaattgccttttctttattaatcacaggctttcacccctaagtgaaattaaaggcttagatcgatccacaactaatggatatgagattgccagctgtttgacccaatttatagagcgaaatcgtcttaggagatgagtgtttatgtctgtaatatgatctatatggtaatccaacgtgccgacatctatttaaattttagatgccatgaatgtaagttcaggtaataatcacatttgttcatatataagatcataacccacgttgaatggtatatttcatcattcacggc

SEQ ID NO: 3386 - DNA, 1454 bp, Glycine max
  Clone ID: GLYMA-23APR03-CLUSTER2464_9
atagattacaaaaatgatatgaagagacacaaaaaactctctgtattgtggttcaagaattttctgaagaaagaatctagactttatgggactagcaaataatgttatgaaatttgtttatacaataattatatttccaaatttttactatttgatttgtatttgattattttttttattctaaagaggtcctattggacttagagggaaaatagagatgtagatctatcgataattgaaacgatttttttatgttataattgaaactattgttacattaaggatgaaagaaaaaaaaaaaaaaaaaaaaaaaaaaaaaaaaaattttatttttgaatcaagggtgagggccttccatggcttccgcttgkgcttcctctgcaattacagctgttgccatctctacgccgagttccgggcaraaraatggatcaggaggttgttttcttagtggaaggaaattgagggtgaaaaaggagagagcagcaattggaggacgatcgatgggcactacagtgtgcgcagttgctgagcctgacagacctytatggttcccaggcagcacccctcctccatggcttgatggcactctacctggaracttcggctttgaccctsttggtcttggatctgacccggagagtctgagatggaatgttcaggcagagctagtgcactgcagatgggcaatgttgggtgctgctggcattttcattccagaattccyaacaaagattggtgtcttgaacactccttcatggtactcagctggagagctggaatacttcacggacactactaccctcttcatagttgagctctttttcattggctgggccgagggtagaagatgggctgacataatcaagccaggctgtgtcaacactgaccccatctttcccaacaacaagctcaccggaaccgatgtgggttaccctggtggcctttggtttgacccccttggttggggaaccggttctcctcagaagatcaaggacttgagaactaaggagatcaagaatggcagactggccatgcttgctgtcatgggtgcatggttccagcacatctacactgccaccggtcctattgacaacctctttgcccaccttgcagatcctggccatgctaccatttttgctgctttcacccctaagtgaaaaggstaagatcaacaatcagattaccagctgtttgggatgagaggagtgtttatatatgtctgtagaaattaagcttgtaatatggctacttytatgtcatatatgcacataatatcataatccaacgtgccgacacctatttaagttttagatgccatgaatgtaagttcaggtaataatcccatttgtgcataagatcataacccmccttgagtatattaatttcatcattcccggcaaaaaaaaaaaaaaccccaaaaaaaaaaaaaaaaaaaaacaaacaaaaacaag

SEQ ID NO: 3387 - DNA, 1434 bp, Glycine max
  Clone ID: GLYMA-23APR03-CLUSTER2466_3
accgtttttgcctctgctgtgggttccttctctgttctcagatctcactcagttccttcgccggagccatagttcttgattccctcaccaccgtgattcgtctttccaaacttcttttcacttcgagtgagaatgtatagtaatgttggatcccaacccggagtacagcagcctcaaacaagtttgcctccaaatccttttgggagcgcgtttaatgttgctggttcaggactcattcgaggtggattgggtgcgtatggagggaaaatattaggatcgagctctgagtatgtccaaagcaatataagtcggtatttctctgatccccaatactactttcaagtgaatgaccagtatgttaagaacaaattgaaggtggttttgttgccattcctgcacaggggtcattggactagaattactgagccagtggggggtaggctttcctataagccaccaatttatgacataaacgcaccagacctttacattccgttaatggcatttggtacctatgtcattcttgctggcctctcattgggtcttcacggaaagtttagtccagaagctttgaacttattattcatcaagggactgctcggttggtttatgcaagctgcactacttaaggtgacactgctttcattgggaagtggggaagcacccctgctggacattatagcgtacgctgggtatactttcactggcatatgtttagctgttctcggaagaataatattgggctactcgtactactttttgatgccatggacctgtttatgcatgggagtattcttggtgaaaacaatgaagagagtcctttttgcggaagtcaggagttatgactcaagcagacaccactatctcttgctctttattgctttggttcagttcccattgttcacatggcttggcaacattactatcaattggcttttgtagggtgatagtttttacactgtactagaagcgattcttagtgaatttttttggttgatgttggagcattgtaatatatggacgttttatttccccattttttacctgttggtaagttttcagaaatgcatatttacaggccttacgtgtgcgtatttttcctgatacatgataattgaaacattattcttttctaaaaatgtatgtataccactgaaaacaatgtgatgctagtttttgtagttgtgtctgtataccttatttacttttgatttgtctcttacctaatatcatattttgcgcttgattgtttttatctgttggtaagttttctacaaatgcataatatctggccttactcacatatgtgcttagttttcttcatacatgataattgaaccatcattcttttctaaaaatatgtataccactgaaaacaatgtgatgttggatttttttagttgtatctgtatacctttatttacttttaaaacc

SEQ ID NO: 3388 - DNA, 908 bp, Glycine max
  unsure (1)..(908): unsure at all n locations
  Clone ID: GLYMA-23APR03-CLUSTER2468_5
ttnnnnnnnnnnnnnnnnnnnnnnnttttgtcaagcagtagagtttcacctccacatatctaaatcaaattaaatagctcagcaacaccaccacagacaaacacattcatccagtacaaaatattggatgaaggaatattaattctagcagcaagaatcaacaatatgcaaatccaataccaagtttagtgccattgataattctcttagttctcataatctgtacaaaagtttatgcattaatttctcaaggtcctcctggtgtgtgtggatcatgccggttgtttgctcctgtccctggataatcattactctccaaatcaatccttctctctaccatgaactcttctgccatatcaaacatttcttctccatttttcaattcctcaacaccctgaaacttatctgatgtaatttgggtaggggttttttctttgtttggcaaaagccttcttgttgtttggagagcagcagaagagagaacaaatgaaaaaaccagaaggatgatgagcaattgcaggggggataagaacctcatgttgaagagaaacaaattggagatctgaaagatgacaaattaagaaaagagctgaagaaggtgttaatcttaagtaagtgggaactggaggggggaaaggagttaaaaagccttcctgcagaccatgaaatttcaacatatagcatgaaaattaattttgaatataaaaaattgagatgaaatagttccatgttaatcataggaaaagtaatttatttaatttcattcttacttgttgtttggagagcagcagaagagagaacaaatgaaaaaaccagaaggatgatgagcaattgcaggggggatttgacgctcatgttgaagagaaacaaattggagaactgaaagatgacaaattcggacgcgtggg

SEQ ID NO: 3389 - DNA, 1560 bp, Glycine max
  Clone ID: GLYMA-23APR03-CLUSTER246_1
tagttttgagttgcgccaatttcaccggtcctctcctctctctggcaccgtattgcaggtatgacggacggttggtttttttactataattttaatggtctgtcgggtgacagtctcgatgatgtgatggacatggaaaaataataacaaaggaatcttctctttctctctctctctctctctttgagttgagtttcgagttgcgccattttcacctgtcctctctctctctctctctctctgtcaccgtgttgcaagtatgaaggactgttggttttttgacaacaatttcaatggtctgtcggatgagagtcttgatgatgtgatggacatggagcttttggatttgccccttgactttgaggatgtggaaactgatgctgtggaagaacaagattgggatgctcagctcaaactccttgaagacccaccaccaccacttggagttttcccactacaacaatcctctgcattctgtggacaaactcggaatgagaatgcgaaactcggcagcaagagtttctctgcttctctagcgaagactgtcagacctgcatatggcaaaactattcctgtccagaaagtctctttaaaaggaaaagatttgctccaattccaaaccaacagcccagtttctgtttttgaaagcagtagtagttctccctcggttgagaactccaactttgagttacctgtcatcccaacaaagcgtccccgtaccaaacgccggcgtctctcaaacatcagcctgctttactctattccttttatccttacttcaccggcttttcaaaaatttcagaggatggatttctccaaatcagatatacaaacacagccttctggggaattattatgcaagttcaaaaagaagcagaggaaaaaggatattcccctgccgactaacaaaattgagatgaagagatcctcatcacaggagtcagttgcacccagaaaatgcttgcattgtgaggtgacaaagacgccgcaatggagagaaggaccaatgggtcctaagaccctatgcaatgcctgtggggttcgataccggtctggccggctctttgctgaataccggcctgcatctagccccacttttgtagcatcactgcactcaaactctcacaagaaggtcttagaaattaggaacagagccacccaggtgactgttagataaaccttcgttgaaattctctagattagtattgttttagattttattgagtgcttgtgctaaacaggattgtccttgattattgttctccttttttatggactaatcttaatcttatattgcttagctagttagcatcatctgttttatgtaaattgattggccgaataagtagtaagattataccagtggttcactgcaaaaaaaaaaaaaaaaaaaaaaagaaaaaaaaaaaaaaaaaagagttttctgccctcatttcatgcctcaatgaatggatgccttttggggggttgactattttgttccaccgtgttgtcccgttgcctaattaagaggggaaacctcggaattttacttcaatccttctgtctgttcttcgcagc

SEQ ID NO: 3390 - DNA, 963 bp, Glycine max
  Clone ID: GLYMA-23APR03-CLUSTER25060_2
acaaaattgtcccttaaacccttacaaaagaaccgcttcttcttctgttcatctctcccactctcacttttaattttttgccctaaaaccctcgctaccgccgtggtggccgccgaagaaggagagtagagagcgcaatcgagtcttcatcttcgactcaccatgaagctcgtcaggtttttaatgaagttgaacaatgaaaccgtgtcaattgagctcaagaatggcactattgttcatggcaccattacaggtgttgatatcagtatgaacacacatttgaaaacagttaaactaactctgaaagggaaaaatccagtcactctagatcatctcagtgtgaggggtaacaacatccgttactatattcttcctgacagcttgaatcttgagaccttgctggtggaagagacacccaagatcaaacccaagaagccaactgctggcaaacctttgggacgtggacgaggaaggggccgtggccgtggtcgtggtcgtggtggtggccgttgatttgcacctttcttcatttttgtggcatgtggttgtaagctatgcagcaagaatttctgggtggttttaggaacttctacggagcatattttttattcctgctattttcttgcaagagcttatcatgctttagtgtacaaccatcttccttctgaaactgatgtaacatgaattacctatctgctattgccttatactagttgttaatggggatctattcattgagcagtatgacaaatcgcccacgactttggtcatacataacacagtaaataggcccaagagttgcctaatgagtttgaactagatgatggatttcctgatggcacatattgtgttatttatttatttacatgtatgaatggtatttcttaaacgtcttttttttgtttgcctctaatgtgtcactaactgactgtcatatacacattttaagttaatgtaattttt

SEQ ID NO: 3391 - DNA, 831 bp, Glycine max
  unsure (1)..(831): unsure at all n locations
  Clone ID: GLYMA-23APR03-CLUSTER25060_4
attccaccttttcctttttgttactctttttttttcttcttcttcttcttcactttgaagctaaaaagcgtctaaaactgaaacaggtttctgnggaagctgaacaacgaaaccgtatcaatcgagctcaagaacggcacagttgttcacggcaccattacaggtgttgatatcagtatgaatacacatttgaaaacagttaaactaactctgaaagggaaaaacccagttactttggatcatctcagtgtgagaggcaacaacattcgatattatatccttcctgacagcttgaatcttgagactttactggttgaagaggctcctaagatcaagcctaagaagccaactgctgggaagcctttggggagagggcggggacgaggacgtgggcgtggccgtggtcgtggtcgttaagatgcacatcacaaaatttgtgtgcatttgcttatccattattgagcaagaatttctgggtggttttaggaacttctgaggagcatattatttattcctgctattttcttgcaagagctgaaactgatgtaacctgaattacctatctgctattgccttatagttgttaatggggaatccattgagcagtatgacaaatggcccccgacttattggttatacataactcagtaaataggcccaagagttgcctaatgagtttgaaatagatgatgggtttcctgatgacacagattgttatgtttatttacatgtatgaacggtatttcttaaaaagcttttttttgtttgcctctattgtgtcactaacttactgtcatatacacattttaagttaatgtatttttttttagt

SEQ ID NO: 3392 - DNA, 1344 bp, Glycine max
  unsure (1)..(1344): unsure at all n locations
  Clone ID: GLYMA-23APR03-CLUSTER252_10
cacaggagaagacaatgaagagtgtcgaatataagcaggcacaaaaagtggaatgtagtcgaacggggttaatagaatgttgtgagaggcaaccgaatacaacacagtggttagggtggcagaagagtggagttatacacgagcgaccggctaggaggcgacagctgactnatcgaataattggggtcgcgtactccagtactacggataagacagcgaagaaaagcgatgtgccgagatcagctagtgagagatgaaggnacatcactctaaaagcagccgccgcattcggagggaatagaggaagaggaggcggtagataacgggagagaatgagggaaatagtgaggatataacagaatgagcggagagaaatgtgaagcggcgtaagcgtgagggatatgtagtcgacgcacacggggcaccataggcccgaacaaaggcagaacagcttcaggacgtcgcatgagtagaagatacatgtaagcaaaaatcattttattaggtccctcctcngcatgtcagagcgatgagggttaggaangatggaactggataacgctcgcgtgcccctccctcgncgccacgtggatcgccgtcctcccctcggagtacaccgcatccacttccaactcctcgccgtcgttgccgtagcgctccaactgaaacttcatcgtgtcgattcggtccattgccgcggcctcgtgaagaaccgattcgtcgattttgcagccggaggcttccagaagcttcaccgcttggaggctcccaaccctaattgcgagcggcatgagggattccgccgtcgcgcagcaaatccgcgacgacgtcggcgctgccgcattccatggcgacgtgggggccgacgagggagacgtgggggccgggtttggagaacaagcgccggaggtcggcggcggtggccttcccggtggggagcatggttgctcggacggtgatggcgtcgggagggtcggagagagggggttgatcggagggctgagagagttgtagtttgtatgatgccgtagatagtgggggaattgtggagaagggtttgttgatggagaaaagagaagagtttgtggtggttaaagacactgccactgacatggtgtgcatgaggttggtgagcttgaaggaggagctgcacttttggcccttcagaaaaatcatctccacttcctttgtgtctgctttcactaacctgtccatgatcaacctgattgattatttgattaattgattgattctgaatttgagatttgaagggtgcttgattacttgaaggaggatgattgattcctttgtctgtttagttcatgtttatcggctcgagcgaga

SEQ ID NO: 3393 - DNA, 1510 bp, Glycine max
  Clone ID: GLYMA-23APR03-CLUSTER2530_2
agcattgattctttctttaaatttcatgttcttgatttctgtatatcatctttatagacacgactcatcatcatactatcaaatattaagatttgtgctatgttgcccaacttgcatctagacactccccgctccctcccccctccttctcctaggtacaattaatgtatggagatttaaacctagggcaaccccctcaccacttgcacagtgctagttcttttcagctgcacattacaatatgtggatctttttgtttgtcttcagtccagtgaaatgtgcatattttatgtatttaattacaggccagatacacaacacatatttgtggatgtaggatttggattccatgtggagtttacttggtcagaagctctgaactacatagaaaaaagggaagaaaagatagccaggttggcatgtgagttaacacttcacaagtttcaaatacatagaaagggcatatagtttggaaggcttggctaacattccaaaaatctgtgctcaagcattttggctaatatggtgttagttcatcaattctaattgctaggagacattagctacttggttggttgtttcattacatgagattagatgtcaagatacagctacagaagttttgtcaaaaatcattatggaaacaattaagagatccttgttagtcctggaattgtgatcaggtcttgagtttctgttatgtcatcttttagtaattctggccgttgtgggacagaattatgttcatccttttcttttcttttaatatgtttaaagtctaaacatggtcagcttcttttctttatttccttttccttttcctttttaaggttgaagcttgaaaatactgtttcatgttcaaacttaaggcatgttttatgttgcaggcagatagaggagtacacccagttgattgcatctattaaagctcagattaagcttgtttgtgaagggattcgagaattactgcaacttccagctgagaaatccctaccagaacggatattttgataattactgaagaaatgcatgtgagcagaccagagattgatgtttatctagggcgaaagattgcatctctttctctgaccttatatcaaagtacatgaagatatattgaacgtcgttatgttgtcttgttaacctttttgttatggtgtcctgtgtttggtcttgtggcactgtgatgcctcaaggtttatttttgttagccattatgtttaaactcgatggttatgggaaatcatttgaagaatggctagtttagttttgcattcaaataatttgagaaaaacatagctaatgtattcgcataaatgctagcggaaagtttgataatggaagatggcagttgcttcctgaggccgcctttatttcttccaaaaaaaaaaaaaaaagaacatccgagtgctttatggtagggcgcttaattctaaataaacaaccaatgtcgttgtcgtttgctaataaaattaatctgtgatgattgtgttaaaaaaaaaagaataac

SEQ ID NO: 3394 - DNA, 820 bp, Glycine max
  Clone ID: GLYMA-23APR03-CLUSTER25400_1
aactcaacaaagagactgtggttacatcaaaacaaagcaaagcaaagaaagaagaaagaaaatggggagaatctttgtggtggagcttgagggcaggtcttatagatgcaagttctgcagaactcacttggcccttgcagatgatctcatctccagggcctttcattgccggagggggaaagcatacctattcaataatgccgtgaacttcacaattggaacaccagaagaaaggatgatgctttcaggattacatactgtcgcagatattttttgctgttgctgcggtcaaataattggctggaaatatgaatctgcacacgagaagagccaaaagtataaagaagggaagtttgttcttgaaagaggaaggattgttgatgaagttgatttctccactgagttctacatcgatagtcatgccagcatgagtgatgctgaagaaccttaaaacatgcgggctggccttgttgggatcatgagaaagaatgcactgcttctgtatacgaacaataataatggtgacccatgaaaatgttcagaattaatagtttattttggttcgctttgatgtgtattctccgtgtgttttgcttggtttagatgtatatttgtgtatagatattgtatgtggtatgtagaaggcaaattgtctagaaatgttatgttttttttaattgaattatggtgattggtagttgaggattgtgcgcgcgctctcgcgagcgcccccgcggccccggccgcccgcggcggggcgcgcgcgcgcgcgcgggcgcccgcgcccgcgcgcgcgcgcgcgcgcgcgcgcgcgcgagag

SEQ ID NO: 3395 - DNA, 694 bp, Glycine max
  Clone ID: GLYMA-23APR03-CLUSTER2540_10
ggcacgagcttctcaaactagtagtattattcttccattccgttctacatataatcattcataatgggtgttttcacattcgaggatgaaatcaactcccctgtggctcctgctactctttacaaggccctagttacagatgccgacaacgtcatcccaaaggctcttgattccttcaagagtgttgaaaacgttgagggaaatggtggcccaggaaccatcaagaagatcactttccttgaggatggagaaaccaagtttgtgctgcacaaaatagaaagcattgccagacacggcggagggtctgctgggaagctcactgtcaaatacgaaacaaaaggagatgctgagcccaaccaagacgaactcaaaactggaaaagccaaggctgatgctctcttcaaggccattgaggcttaccttttggcccatcccgattacaactaatcctcttcaacttacttgttatcactttcttgctttttcttgcttggagacttatccaatcactctgtgctcaacttaagttgccttacaatgtatccagtctttcctttcttctttccttttcccatataatcgtgagacttatgatatatctgtgtctcacttcatcaataataaattataataaagaagagcaatcattaaaaaaaaaaaaaaaaaagggcggccgctcgcgatctagaactag

SEQ ID NO: 3396 - DNA, 854 bp, Glycine max
  Clone ID: GLYMA-23APR03-CLUSTER2540_16
acactatggtatggggcatacataggagcagagtgacaccagcggtagtgcttggctgcttgattataaataaagggcactcctctgctaaagaagcacacagcagcaagcatctccttctcaaactagtagtattattcttccattccgttctacatataatcattcataatgggtgttttcacattcgaggatgaaatcaactcccctgtggctcctgctactctttacaaggccctagttacagatgccgacaacgtcatcccaaaggctcttgattccttcaagagtgttgaaaacgttgagggaaatggtggcccaggaaccatcaagaagatcactttccttgaggatggagaaaccaagtttgtgctgcacaaaatagaaagcattgatgaggcgaacttgggatatagctacagcgtggttgggggtgctgcattgccagacacggcggagaagatcacattcgactccaaattggttgctggtcccaatggagggtctgctgggaagctcactgtcaaatacgaaacaaaaggagatgctgagcccaaccaagacgaactcaaaactggaaaagccaaggctgatgctctcttcaaggccattgaggcttaccttttggcccatcccgattacaactaatcctcttcaacttacttgtcatcactttcttgcttggagacttatccaatcactctgttctcaacttaagttgccttccaatgtatccagtctttcctttcttctttccttttcccatataattgtgagacttatgatatatctgtatctcacttcatcaataataaattataataaagatgagcaatcattacaaaaaaaaaaaa

SEQ ID NO: 3397 - DNA, 543 bp, Glycine max
  Clone ID: GLYMA-23APR03-CLUSTER2540_9
atggtgcatcgtgatggtattactcagcagcaagcatctccttgtcgagctgcgtagtattattctttcaatcataatgggtgatgtcgcattcgaggatgagatcaactgccatgtggctccagcttgtctatacaagaccgtattaacagatcgtgacagcgtcatagcaaagtctcttgattctttctagagcgttgaaaacgctgagggaaatgctggctcaggatccatcaagaagatcactttcgttgaggatgtagaaagcaagtatgtgctgcacaaaatagaaagcattgatgaagctcactgtcaaatacgaaacaaaaggagatgctgagcccaaccagagacgaactcaaaactggaaaagccaaggctgatgctctcttcaaggccattgaggcttaccttttggcccatcccgattacaactaatcctcttcaacttacttgtcatcactttcttgcttggagacttatccaatcactctgttctcaacttaagttgccttccaatgtatccagtctttcctttcttct

SEQ ID NO: 3398 - DNA, 987 bp, Glycine max
  Clone ID: GLYMA-23APR03-CLUSTER25432_4
ctgccacttctcattctcgccgtcgctgccaagttcatttaggtttcgcgacacaaaatgataaagaggaggttcttcaagctcgatcacggtgatcgagaggcctccgatccgtcttcttcttcttcggactccgagcttgaagccgtagctgaaacctctgaagaagaatcagaggaagatgcaatagcagaagtgaaaccgaatgatgatgaagctggctcaaattcttctgggtatgcaagtgaggatagttctgcgaatgatgttgatgtcaactcagcaggtctgctatttagtgaagatgatgctggagctataaacgaaagacaaatgcttattaacagagagttgctgagtaaagtatttaagtgcaggctgtgtccccggattatctgtttatctgaggaaactttgcgggatcatctgcaatcaaagagacatgctcgatctgaaaaactacttagcgaaggtagactgaaggctatgctcaacagtgatggtgaaattgataatcaagagatctcagagatccaaactaaagatactgaggataatgctgagaagaatctcaaaagaaaaaatcagcataaaaagagattgagaaagaagaaaagtgccaaagcaaactcaaggaaaatactgtcaacaaaaggagcagccaagagagggcgaaacaaatgacacctctaatatgtagtattctgcattttgtagagcaaattttcccgccactaccacccgcctttgtgtgcaaagtctgatattatgctctactgatagtgcttcttgagccccctttctcttctgttcaatatttttcttcgtttatttatttatttattcaacatgcttcctacaatgtttgagattttcttttttatttttcctttttacatagcatactaatgtaaccgaaatcaaattttccctgtaaagactttcctgggaaagattatttaaattacgaggttaaatttggctgtt

SEQ ID NO: 3399 - DNA, 1029 bp, Glycine max
  Clone ID: GLYMA-23APR03-CLUSTER2546_2
attctctttctctttctctgttctgaaaccactctcgcgtcgttaccatgccgcaaggggattacatagaacgccacagaagagactatggctaccgtctcgatcacttcgagcgtaagcgcaagaaagaggcacgtcaagttcacaagcgctctgcaattgcccagaaggctctgggtattaagggcaaaatgattgccaagaaaaattatgctgaaaaggcgcagatgaagaagactttggctatgcatgaagaatcatcgtctaggcgcaagactgatgataatgttcaggatggagctgttcctgcatatcttcttgatcgtgataacacgaccagagcaaaggttcttagcaacaccattaagcaaaagaggaaggagaaggcagggaaatgggatgttcctctacctaaggtacgtcccgtggctgaagatgaaatgttcaaagtggtccgaactggtaaaagaaagaccaagcaatggaagaggatggttacaaaagctacatttgttgggcctggttttaccagaaaacctccaaagtacgagcggttcattcgtccgacaggattgcggttcactaaagctcatgtcactcacccagaacttaaatgcacattcaatctagaattaattggagtgaagaaaaaccccaatggccctatgtacacctctcttggtgtcattaccaagggaactataattgaggtgaatgtcagtgaacttggtcttgtcacgccggctgggaaagttgtgtggggtaaatacgctcaggtcacaaataacccagaaaacgatggttgtataaatgctgttttgcttgtttaaggtcgcatcagggttccaacttgatttcagaggcagtggtctggtacctctcctatgatttttttttgggcacaggttctaaaattcttgtttggattgtcaatgcaatgatctgatcttgcactttgacatttgagataactattgtacaagagttaagccaaacaaatctcataaatttatatagttcattcgcgag

SEQ ID NO: 3400 - DNA, 1498 bp, Glycine max
  Clone ID: GLYMA-23APR03-CLUSTER25594_2
attttctctaacaagaaaagtgatatccgttttctcttctcagccaggtcgttgagatgcacctaaaccccttattgctgagttcgaattcgctgcttgttcatagtttctttctttgattagttatcttcaaatacaaaagacggattgagggaagtcctcgttgtatttattctcctctagatcacagggaagattaaatcaatggagttggacttaacaccgaagacggcagaagcattgtttgagggagatggtggaggttactacacttggtcaagttctcaagtgccactcctggctaagaataatgttggtgcaggtcgccttgtgcttcagcctcgtggctttgcccttcctcattatgcagattcatccaaaattggttatgtcattcaagggactgatggcgtagttgggatggtactccccaacacaaaagaagaggtggttttgaagcttaagaagggagatgttataccagtgcctattggagctgtctcgtggtggttcaacgatggagactctgatctcatcattgcttttcttggagaaacttcaaaggctcttgttcctggccaattcacctatttctttctaactggggctctaggacttgtaggaggcttctctaatgagctcacaagcaaagtatatggtttggacaatgatgaggtggaaaagctcacaaaaagccaaactggggttttgatcatcaaactagacaaaagtcaacccatgcctaagccacaaatgaacatgaccaaaaagctagtctataatatagatgctgcacgcccagaaaatgttgtggaaaatgctggattagtcaaaaccttaacggagaaagattttccttttattggggatgttgggttaagtgtgatgagagtgaaacttgaaccgggtgctattaaggcaccctcatacccaaccaaccctacggttcagttgatttacattgccagaggaagtggcaagattgaaattgttgactttagtggaaagagtgtattaaacactcaagttgaggctggtcatttgcttgtcgtgccacaattctttgtgcttgctgaaattgcgggtgaagaaggaattgagagttactccatcgtaataactacaaagccattgtttgaagaattggctggaaggggatcaatttggaacgccttttcgcctacactgcaacaagtgtctcttaacgtggattctgattttcaaaagtttttcatatccaagatcaaggaatctaccaatctcatccctcctactgtttagttcgatgcgtgtgatgtacgtactaccgtatttgtctatgtataattttcagatgatgatgatatcgatttaagaaaattctaaacttttatctttctaaaagttatgccgttgtattgcttttgttttaaagaaaatattttcgtcagaatacttctttaagttttatatatcgagcaataaatgaatggaaggatatgaatgtgttgacccaatt

SEQ ID NO: 3401 - DNA, 1549 bp, Glycine max
  Clone ID: GLYMA-23APR03-CLUSTER2572_2
atatattattatgagtgatggttcttgcgttctaccctgaagttttattttattctcactatcgttcagcatcctcattgcattacttaattttcatggacagagaatattgaaggctgggaagctgactgagaaagttctgagactttttatagcaactggtaaggatgaagtcctctcatttgttcaggcactcaatatccaacatattttgacccctgtgcttcctaccaggtgttctgaggcaaaaccagactattagtttgtgggatagtctgtattctgtaccttgcaagatgtctcaagcagttatcaacgaaaatgaagtggacattgtgattggtgcactgcactctgatcttacaacttttatgaatgaatggaagccaattttctcccgttttcacctgataataataaaagatcctgatctcaaggaggaactccgaattcctgaagggttcagtgtggatgtgtatacaaagtctgagattgagcgagtggtgggttcttccacttctgttcgcttctctggctactcttgtagatattttggcttcctaatttcacggaaaaagtatgttgtctgcattgatgatgattgtgttcctgcaaaagataatttagggatactggtggatgctgtggctcagcatattgtgaaccttcagactcctgccacccctttcttctttaatactctgtatgatccattctgtaagggtgcagattttgttcgcgggtacccattcagcctgcgaagtggggttgattgtgctctgtcatgtgggttatggctcaatctggccgaccttgatgctccaacacaagctctcaagcctggacagaggaatttgcgatatgttgatgcagttgtgactgttccttcgagagccatggtgcctgtgagtggaatcaacattgcctttaaccgtgaagttgttggtccagcattagtcccagctttgaggcttgcaggggaagggaaattgaggtgggaaactatggaagatatatggtgtggaatgtgtgtgaaagttatatgtgatcacctaggtcttggtgtgaaaagtgggttaccttatgtttggagaacagaaaggggtgatgcgatacaaagcttgaagaaagaatgggaaggggtgaaattgatggaggatgttgttcctttctttcagtcattaaggttacctcaatcagcaactacagcagaggattgcgtggtcgagatggccaaaacagtgaaggagcaactggggaaggttgatcctatgttttcggcggctgctgaagccatggaagagtgggtcaagctctggaagtcagttagatctgtttgaagctcccgaacttgaggactctcgtaggagtggaggttattgccttattggcttctatatttctttattttatttaactaatttatatctgcctttttttttcagtttgtagtgaactaagcttacattttacctgacacagttagactaaaggctgaataaaatgagtacttattggctttgtggcaaaaaaaaaaaaaaaaaacaaa

SEQ ID NO: 3402 - DNA, 1699 bp, Glycine max
  unsure (1)..(1699): unsure at all n locations
  Clone ID: GLYMA-23APR03-CLUSTER25741_1
atttcctgcttctctctcatctattgactcatccattacctgaacaaacacctagaattttgtcctgttcccttcatttcattttcattggatttatatagcattgcaacgatcggatagctatttgctacttgattgattctttgccagcgtgggatttgagaaagaaaaaaaaaacagtaacaggaaaggagggtagcattaagggaagaactcaggttgcgggaagaggtaaaaaaaatggagcatggggatggagaagcggtgataattgggggtatggtattggacattcatgctacaccttcaatgctagcaaatcctggaaccactacccctggcaaggtctattatgtccaaggaggtgtggcaaggaatgtagccgagtgcatgtcaaaactaggagcaaagccatacatgattagtgctcttgggtttgacatggcaggaaatctgctgttgaatcagtggaaatctgctggcctatctatagaaggtattttgaaggataaagatattgagactccagtagtatgcaatatatttgatgttaatggtgaggtagcagctggtgttgctagtgtggaagcttttgaaaaatatctgacacctgactggatctttcgcttcaaaaacactttactatctgctccagtgttaatggttgatgcaaatctgagtcatccttctcttgaagctgcttgtaaaatggcgattgacatggagtgtcctgtatggtttgagccagtatcagttactaaatcccgaagaatcagttctattgtcgagtatgtaacttttgcttctccaaatgaagatgaacttattgcgatggcgaatgctttatctggcagtgatgagtttcatccacttaaagaaagtcagaagaaaaatatttcagtattatctttgtttcaaatgctgaaaccagcaatatgggttttgctagaaaaaggcattaaagtggtcctagtgacctttggctctaatggagtgtttttatgcaataaaggatggcctagacaatttaaaatgcctgcagagaaaacaaatcagtgtggcttcagaggacaattattcaagactgttatgcaaaaatgtccacctagtcgttattctggtttttcagaacttgatagaagctctcatctctttgctgtgcattttccctctcttcctgcatcagttgtgaggcttactggcgctggtgattgcttagttggtggaacactcacatcaatttgtgcaggattagatattatgcaaagtgtgtctgttggcattgcagtggctaaagctgtagtggaggttgaggctaatgtcccatctactttcagtttatctgctatcacaggtgctaaagttctcttcccccaatcgatgttgtaaattttgaatgaggatgactggtagataaacagcttgagttgcgatacaaccaccacctttgcccagaaaaaatgataacatcttacaaaggcttgtggcattgaaatatgaattaataactatatttttttagtttttatttcatatttttctataagagtttaattgatacacttttttttaaacattgatatgcacttttgcactaacatgttatacttgatcatgtcatgatgtcggtctttgtagtgaatatttttccccctacaaaaaaaaaaaaaaaagccaatnnagtcttaactagacagaa

SEQ ID NO: 3403 - DNA, 1880 bp, Glycine max
  Clone ID: GLYMA-23APR03-CLUSTER2578_3
catttaaaggctatccaattgccaataactaggtaacatattaatagataaataaactcgtatcaatttggcttttcccaaaatactttcctactagtttcacaagcattaaacacttttgaggcagtcctgatgtatagttaaacttcagtgaaattgggcacataaaatctggacctcatcagggttacagaaagctgctgcatcacatttgttggatcagaaaattttcaatccttccagcttgagcttgggcatattataaatttcgaggctttcttcaaattgcttcgcaaacgaattaatttgtgattataagatataaaaaaagagcaaccagagttacacaaaaatgggttttggtgttcaaaataatacatctgacatatttgttctcatgtatcaaggcgtgtctacttcgaccacaaggtggaaaggggcttccccttccggcattctgtgacacaatcaagaacaatctcttgcaactgtttctccacatcttctatgggttggcaagcatcaacatccttccaggaaacatcatgaagaactttgtaccaatcagcaactttcttctgaaactccagcttttcatatctctcacctccataccctcctctttctgcagctttctctggagatatgtcaaggtatactaccacatctggtgctggcaatccaatctctgggaccttacaccattcaaaatcaagtcccttggcagatgagaaagccaccccagaataagaataacggtcaacaatgagggttgttccagttttcagttttgattccatcaatgacctcttttcccaacgattagcgctgaagaggagatgaatagtatgatcatccaactgagatgtgttagttagataggcagatatcatttgcccaacatttgtagttctgtcgggaaatctccataattcagcagagatcccttgtccctccaagaaggacactagcctgctacactgagaagacttcccagaacgatccaagccttctaggacaaccaaggcacccctagacgctttattgttgccctctatgctatgattaagattactttccattcttatcttcgtaggaaaacacttggaggagaattttacttgaaaatttaatggcttctgcaacactaacgctctgaaaatcagtgacttggaagctgtgacacaagtgccatagatcatatcctcacaaagcccttaaactgtaagcttatggtcatttttcgcaaggagacgctagctatggtttaatgtcctgaattagggcacgtggcatcacttttacgcgtcctaaaaaccctcaataggggttgtggcaagtaggagagactaaagtggagtggtgtaatgcttcaacattatattcttgaatctcatttctgctcctgagggaatccactgcgtgtgtaaaaggtttccatcattgaagattgtcacgtctgagattgacattgaaataaacgaagagtatcgtgttatcccaggattgggggaatttggtgatcgatactttggtaccgatgattgatcctgctgtttgtgtgtcttaaggtgcagacacctcttgggtagcagctgccttgattaagaatatgagaatcagctaactacattgtattcagatattaaggattctgcaaaaatcagcatgattgtgatttgaggcaggccgattacaattatcaatgcaaacctactccaaggttgatatgcacgaataaatattaaatgtagagatcattcttagcaagatgatgatacctgacacaattctaccaatcttgttctccaaagttggttatgtggaaaatatttcctagttatcaatgcaatctataaccaaccagatcaatcgtcaat

SEQ ID NO: 3404 - DNA, 780 bp, Glycine max
  Clone ID: GLYMA-23APR03-CLUSTER26038_2
actcgcctttgttgcccgaaaaacctttctttctgcttctcccatccatccatggcttctggaatctcctcataaccctcgctctttgcctctcacacaccaaaagaaaccatgaaggttcggtcatctgtgaagaagatgtgtgaattttgtcagatagttaagcgccggggacgaatctatgtgatttgctctgggaaccctaagcacaagcaacgacagggcatggcaacatttgcaagtgaaggcccatctcaaccagtgtcctcgaagacaagtagctgcaagattatgattaagcctgctcaaattgcgcgaccaggtcggatttgtacttcccctcaaaggcacagtttgtctatgttgtatggatggagggtgggattggcctctattctgtctataaagtagcaaaaataattagtaaccttgaacattacaagtaataagtgtgaagagattgataatcaacggttctggattaaagtctccatcatgctctctcctttctttgtattggtggatgaagttgtctcaaacttaattttgttctcactgggggattttgtttctccgttaagaatatggtcaacagattgtaacctcgtagtatatttggtgttcactgttaagggaatcagcggagcacaattgatagcgctctcctccttatcacttgagccaaagacgagaattttttgcaacgtattgtcatctatatctatatgttacatagtttttgccatcaacgaacaatatttaaaaaaggcagccgccgac

SEQ ID NO: 3405 - DNA, 839 bp, Glycine max
  Clone ID: GLYMA-23APR03-CLUSTER261_3
aaacgaagaaaaagaagaaaccaaacgcggccaagttgctgatataaagcaactcaagcaagtagactaaaagctctctctctctctctctgcttccgagttccgagttgcgagttgcagagagagcaatgagtcaggaatcgtttatatatagcttcgtggctcgggggacgatggtgttagccgagtacaccgagttcactgggaacttccctgcaattgcagctcagtgcctccagaaactaccctcttccaataacaagttcacctacaattgcgaccaccacaccttcaattttctcgtcgaagacggttacgcttactgtgttgttgccaaggaatctgttagcaaacaaatctctattgctttccttgaacgtgtaaaagcggactttaagaaaagatatggtggtggaaaggcagacacggctgttgccaaaagtctcaacaaggagtttggaccagttatgaaagagcacatgaagtatatcatagaccatgctgaagagattgaaaagctaataaaagtgaaggctcaagtttcagaagttaaaagtattatgttagagaacattgataaggtatgttcatgttttagagtaagacatgggatatttttcagatcttcagtcatttccccaagggcaagccttcgcgcaatgggtaaagttctgcctttgtgactggttggtcataggctgagggagagttttggagcaacaataaggttgtgcctttgtgaccggttggtcatgggctcaaatccagatacagcctctttgcatatgcaagggaaagattgtgtgcaattatcctccttcatactttcacaaagggag

SEQ ID NO: 3406 - DNA, 2124 bp, Glycine max
  unsure (1)..(2124): unsure at all n locations
  Clone ID: GLYMA-23APR03-CLUSTER26280_1
aatcagaaatcagaatgatatatacagaatttgtactgtcaccttgtttactctatttaaaactacacgtatacatactgtctttgactatacacaggaatttaagtattactgcagatcatgcatatattatatagtagcaggatcttgtatggtatagggggtgtcctctctgtgaggattttgatctagtgtcctataagtacaaaagaatgaggcattggaaaatagcaatggactaaacgatgtcatgatggatgagaaattcagtgatacatggatacagttgatctgcagccagacgaccacccactaagtcatagtgggcatagtgtggaccaccaggctccccaaagactttgtatgtaaccaattcttcaggaataagcttcaccgtttcatatacagcttcaggagggcagattaagtctcggtcaccagcaattgctaagacaggaacattacttttgtggagatggtccttgtagaagaatgttccactcctgtcacgtaaaccacctttttggaaaactgatgataactgcaagagaagcttggaaggtacggtatcgaagttgttcaaaacaagcttctcaaatagattttggtccatcatatcttgagctgaaatctgagaatttagccaagaaaaaacatatggaggatagcttgcaaggggatgaacagtagccatcaatggcccaactggaataacaggaatgttcaaagctcgagtaggttctgccaggggtaaaagcaacttgagagatgatcttgaaggggtatagtcaagtgacgatgccaaagtgccaacagatgccaacccagaatcctttccatcaaaacaacaacttgaaagctttgcatacaacaagataccccccattgagtgaccaattgccagcaattttccatctcttggttggcattgagcccttatgtactccatctaatgtacgaatgtatgaaaccaacaattgaaaaacaaatttaatgagaacatccaaaaattttaggccaatatatagnggaacaaacaaatattaaaattacacaaaagaagtaacaaaatagttaaaagtacagatcttgctaaaagtaatgtatcccaaaggaaagtcatctcacagcagcaggtacgtcctcttccaaataatggtcaaagtcccaatcatacttgaccatcagctcaagctgtttctggaactcttctagattggcagcaaaacggtcttgcaattctaaaatttttgctgggaacaacagctgaccttcaataatagctcgaagcctccgattgaaatccttgatttgtccagcaattgcagagttctgtccttccaacaaatctccattgagaaatcctgcaagcctttcagatatccttgtaagaatctccatgaacctcgtcattagctgcatttcctcatatttagttactacctctgatcctctcgttttcatatgaggaacttctgatacaaaagaagcactgctttcaccaatatcatcattaataacagaatcaatcttagaaaaattcttgaggcattcctcatcttcctccaagctatctccaagtgtgctcaacccagcacctcgaacctcaagaatccatgtatcgaaaccttgggctgacatgtaccgagcaaatgaagactcaggagaaagatcatagcctattgcattggtagcaacccctgacaacaacaaaagcgggtgattcctcgacagggcccaaaagcttcatatcattgcattgccaaaagggtattccaattggagttcgaaactgccacgcggtgaagctcgtcggcggtgcatatcgaccgccgcttgccgcctttcttctccattcgcactccgtggaacgccgcatgcctcgccggacgcggcgtcgaggccccccgtcgatgaaaacgcgaggggcctattcgggttctgggattcgggtcgggtcgtggcgggtccacccaacagaatccggcgccaatgtggttaagaagcatttattttttctttaattgtttagtgaacaaaaacatgtgtttttttttaattttatttttatttttgttttcttctcttaagggagtttgtaactttggtaatttggttggtttt

SEQ ID NO: 3407 - DNA, 1142 bp, Glycine max
  unsure (1)..(1142): unsure at all n locations
  Clone ID: GLYMA-23APR03-CLUSTER26346_1
tttacaaaggaggcacgtcttcaggttcctgaagagattctccacaagatacggtctcttaatgaccttgacttacagctctatggcctggcaaaagccatttaaaataaacagcataaaacctcatggctgtttactgaggtatggttgctggtattatagattttctctcttcagataaagtgcggcttctgcaagtgaagggggagaagcatgagaatttaatatgactgttggagaactaatggatgcttatgaagtctgcatttccaatttacgtaaggcccagtcacgccgacgcatctcttctttgaagaggatttctccagtgaactttacaaaggaggcacgtcttcaggttcctgaagagattctccacaagatacggtctcttaatgaccttgacttacagctctatgaatatgcaaaagccattttcaataaacaacataaaacctcattgctgattactgaggagagttgggacaacatatcaggcagtgcatatggcctctggagggtcgttacgctagcaattacttgtgtcttcttcattttcttattcttactaattgtaaatgtgagaagaagaacgtccaaagttaagaagtgaaagtaattaaatcataatatgtgagatcacagagtctaaaagattttagagaacagatattttagacaaagccatggtttgaattgaaccatcgatattctcatccccggtcgtatagcttatacagttaaactggattttgttctaagttttgtccattgatgagaaacccagttcttgatttcaaaaaaaaaaataaatattacatttattttcatttttgaccactatacattttcatttgacgacattcagctggttatgggggttaactctgcaactatgaactgtggttatcatgtaattaattttattttattttttcttttntaagttttgtccattgatgagaaacccagttcttgatttctgttaggcgtttcctttttacttttattttcatttttgtccactattctttttcatttgacgacattcagctggttatgggggttaactctgcaactatgaactgtggttatcatgtaattaattttattttattttttctttaaaaaaaaaaaaaaaa

SEQ ID NO: 3408 - DNA, 605 bp, Glycine max
  unsure (1)..(605): unsure at all n locations
  Clone ID: GLYMA-23APR03-CLUSTER264449_1
ccaaaacacccttcgccaaaatgcagatcttcgtcaagaccctcacggggaagaccatcaccctcgaggttgagagcagcgataccatcgacaatgtcaaggccaagatccaggacaaggaggggatcccgccggaccagcagcggctgatcttcgccggcaagcagttggaggacggccgcacccttgccgactacaacatccagaaggagtcgaccctccatctcgtcctcaggctccgcggaggcatcatcgagccatccctgcaggcgcttgcccgcaagtacaaccaggagaagatgatctgccgcaaatgctatgcgcgcctgcaccctagggctgtcaactgccgcgaggagaagtggggacaccgcaaccagctgaggccaaagaagaagaaagaaatctagagtgccactagtcagtttcatgggccggttgaatccatcgcgtgtcggagtttatgctattatcgtctcttgtttgtcgttgacccttttttttctgctttcaccccctcctcgtggtggggtgatgataattgacagtattggtatatggtagcaaacctataattttgccgttgaaaaaaaaaaaaaaaaanc

SEQ ID NO: 3409 - DNA, 1129 bp, Glycine max
  Clone ID: GLYMA-23APR03-CLUSTER264456_1
tcagctacgtaggcccccccccccttctccgcagagcagccgacaactctctaccgtccgagaccccaagcaccagcgcggcggcggcggcggcggcgaccatggctgtcgggaagaacaagaggatctccaagggaaagaagggtggcaagaaaaagaccgtcgaccctttctctaagaaggattggtatgacatcaaggcaccgtcggtgttcagtgtgcgcaacatcgggaagactctcgtatccaggacacagggtaccaggattgcttctgagggtctgaagcacagagtctttgaggtttgcctagctgatcttcagggcgacgaggatcaagcttacaggaaaatcaggctccgtgctgaagatgtgcagggcaggaatgtgctcacaaacttttggggtatgaattttaccactgataaattgaggtccctagtgaagaagtggcagacattaatcgaagcccatgttgatgtcaagacaaccgacaactacatgttgcgtttgttctgcatcggcttcaccaagaggcgcccagaccaggtcaagagaacctgctatgctcaggcatcccagatccgtcagatccgccgtaagatggttgagattatgatcaaccaggcttctacatgtgacctgaaagaacttgtttcgaagttcattccagaagttattggtaaggagattgagaagtctacctccagcatcttcccacttcaaaacgtcttcatccgcaaggtgaagatactcaaggcccccaagttcgatcttgggaagctcatggaggttcacggcgactacaaagaggatgttggtgtgaagcttgagaggcctgtcgagggagatgaggctgggcaggaggttgctgctgccgagtagtttgtttgctagttctatatctaggcgagtctggacatgaggttgcttatgacgtgaacttatagagttgtcttggctatgtgttttcgtctagccctaagattttgtcttgaaacaagtttaaaattaagattatttgtaacaagtgtttaggattactcgtggtgatattctgtgttcgattactgctgtactaagttccatcatcctcatttttgtttggtcataaaaaaaaaaaaaaaaaa

SEQ ID NO: 3410 - DNA, 1046 bp, Glycine max
  Clone ID: GLYMA-23APR03-CLUSTER26499_1
catcctttctcttttcctgtctgaaaagctaatccaattattttctttgtttccctgaagacgcaaagaggggataatatgcaataccttgttgcatctggttcctcttcctttattgagggttattcgtatagtctcctccgccacagttatcctctccccagaattcgcaaattgagtttgcttaagcctcactgttctcagagacagcagagccgaagaagcctgagaacttcatgggcttcagtgtcacttacactttttggcactggcttcttacttggtccccttctcgatggactccattcaagggtcaatctcgttgtgtacgaatctggctccattgatattggtccactccacacaaacatatgggttcctttcttgctggggttattttattcctctgttggtttgcttcaactctacctagacgaaaaggtcttgaacaaggttcaagaagcaagtttagcaaaaacaattgtctcactaatattgttggcgctgtttatagaactgagtgctgacctctacaaagccggaatatcgaacaacattgaagcctacattttatttgctgctgcagaatttatatggtttttcttggataggacatggctaggtttcaccttggcatgcattgttgggcttggttgcccactagctgaggttccaattatgaagttgttccacctttggtactatcctcaagcgaatattgaaatatttggccagggactagttacttggacactcacttgctacttcgtgtatacgccattcttgatcaatttgtcacggtggctgagaacagtttatgctcctcaaacagaggactctgcctagaaaattatgtacctgtgctgtctattccattatgtagtacttataaatagcatcaatttgcagcctttgacaaacacattgtggcaaggcattgtaataaggcattctagcttaaatatatgatactcgtgcatattcacaatgacttagcgacttgaatcaattctctattttaaatttcccgaaaaaaaaaaaaaaaa

SEQ ID NO: 3411 - DNA, 1461 bp, Glycine max
  Clone ID: GLYMA-23APR03-CLUSTER266407_1
tcagctacgtaggcccccccccccccgtggccataactctgcgttttctttccagcggcttagtaactggagttgcaaatgatccataaggcataaaccaagcatgagacgatgctgtggagaaagttttgacttttgagtttgtttcggagacatcacatattgtgacaatgcgataattttggcaagatgaaaaattcaagaggacgcagcatgaaacatgcacatttatttcattgtgaagatcaaagaagtcaagaacacaagaaaattgtaagggacagactggagggtaattctaataatacttttaggacaagggagattccaataaagaggttgttcaatgtagggcattttactaatgcttcaggggacttgtcagggtatagcaaaggaaagaacttttctgcaggaatgaatgtcatggactatgatataccagagcttgttgtttttattcaagaggaccatcagcagtttgtcaaggacaattgcattggtaagggagtgtcaccagaaggcaagtgtatgtcagaagattgcgcattagatcatgatataatgtcacgtcactttgagaatgacatgacaagcagaagagattcaaatctaagaactatggaagcaatgtcaatcaattcaaatgggccagagtatgcctctaaacctcttacccttaaggatgcaatggaattttatgattcaagaggtttagtgatggatggtgaagtggattcaggatacaagatttcaattgaccacctcacaaagaagacaacaccagagacccttagagaggcattaacaaaggaagcagaattttcaagatctttcaagaattggcaaataaattcatttttgggtacaattggcagcaaagtggagtttccaagttgttcagattgtgttcaaattgctgacacaatcatgtgtagatctaagatggcaaactcacacagtccatctggttcgggcaaaagacaagaaaatgatcctcaagaaacttgttcctgttcctgtgctgtaggtcgaacaccatatgctgctcctgcaacaacatctagcagtgcctctcatcactctaatgatagcataagcagtactcattcatttgcttttcccatattacctgcagaatggaatggaagtcccgagagaatgttggaagctgataaaagtcaattgagaaaagaccgatggcagaagataagggtttggtttccctgctgcaaagttgattgctaaaattttgcagtttagcagatactggcagtgaagattattcagaaaaaactagtatgcggtgtttactttgatggtgttataaatataggatacatgtggtcatatcaaattatttttggcatctccattttgatgactcattagttaaagactgtgtttggttttatttatttatacccccttccccccttttttaaaaaaaaaaaaaaaaaa

SEQ ID NO: 3412 - DNA, 848 bp, Glycine max
  Clone ID: GLYMA-23APR03-CLUSTER2687_2
aactctattttgttttctgtttatcctcacgctatcatctatctgcttggatgagcttctagttctggttattactccctataacatgtggtggtgatttgaagatggcagacttaccagggtatcttcgtgcctgtttgaacacagggaagcttgcctccttggcaattttggtgtctggaggaattgtcttgcaaattttggcatgtgccttgtataataactggtggccgatgctgagtgtgttaacgtatgtgcttctgccaatgcctttgctgttctttgcggggtctgatgattctatattttctgaatctgataatagctgggtgaattttactaagttcttgactggagcctcaactgtgggaggtattgccattccaagcatattaaagcatgctggggttatcggttggggagcctttgcaatggaactctcttcctactttgtgtttggaatggccataatatgttacctttggatgagtggtgatgatgattacagtatcctatgagataagactttagccgggcttgcttcgtcagtgtaaaaatggatttattcctttcatgtgctattgatttttcttgcttttgtgagctttaccacagcatatttcttttcccgtttagaatactggctacctcaagtaatagcgtttaacaacgaatcattgatgtaccaattgtagaggaggtttcagccaagtatacgggaattgtatgtaatagacgatcttgtgtctgttcaggaatgaggcagctttgttgcgccttcttattgtgattgtaagtttgattttcattaagctatttgataccattgggtggagttcttcctgtag

SEQ ID NO: 3413 - DNA, 779 bp, Glycine max
  Clone ID: GLYMA-23APR03-CLUSTER2700_5
attgtttcttaccccttcaaagcaaatacagaaaaaaagagtcmagcggcgagcaatggcgacatcgctggtgcgatcgggttttcttcgaagcgccctaagaggaagcgctcgtggctcccaggttccgaagcgaaactttgcttcctctggtcatcacgatgatgcatatgagacggccaaatgggagaagattacatatctaggcattgttagttgcactggtttagccgtttataatctatcaaagggccacccacacttcaaagaacctcctgcttacccatatttgcatatccgcaataaggaattcccctgggcatttgccaagcccatcctgcttccaatctaaggatttgtgagaacttagcattcattttttataagcatggcatgttcttgtcccgatggactatttgaaacgaagcaccatgaagagcattagtggtttaatgaaggtatttgtggcactggtgggcattcgttttgtcaatgttcaacgaatagtgataatgatgattattgtgatttttgaaatgtgatctagaacttgcacttggcaacgttagtttgtcatgtttttatctcatgttcgtttgtatggttgaaacaaaataaatttgtcaaacaatatgatgcttctttttatgccgattcttgttcagtaagatttttaaagaaaatgatcttaagaccccagacttttatcaaaaaaaaaaaaaaaaaaaaaaaaaaaaaaaaaaaaaaaaaaaaaaaaaaaaaaaaaaaaaaaaaaaaaa

SEQ ID NO: 3414 - DNA, 2175 bp, Glycine max
  Clone ID: GLYMA-23APR03-CLUSTER27040_1
tcagctacgtaggccccccccccaaaaaaaaagagaagagaaacacttgtgaacgtaacaaaagacacttctcaaacaatatagatcaatcgtgctgcgaacaaattaagtatggcttcaaggcctggaatcctaacggattggccatggaaacctcttggaagctttaagtatttgttactagcaccttgggtagttcacagctcctattctgtgttggtgaaggataagagtgaaagggatataagcacctttctcatatttccatttcttctatggcgtatgcttcataaccagatatggatcactctctctcgttaccgaaccgccaaaggcaatgctagaattgtcgacaagggaattgagtttgatcaagttgatagagaaagagattgggatgaccaaatattgttcaatggattattatactacttggcaagctacacattatctggggcatcccgtattccattatggagaacagatggagttgttatggcaatattgcttcatgcaggaccagtggagtttctctattattggttacacagagcacttcatcatcattttctctactctcgttaccactctcatcaccattcttcaatagtaacagaacctataacttctgttattcatccattcgctgaacacatattatattttcttctctttgcaatacccaagttaaccctcgtcttcacaaaaacagcttctgtgggggccatgcttggatatgtcacttacattgatttcatgaacaacatgggtcattgtaactttgaggtggttccaaagtggctctttgacatctttcctcctctcaaatatctcatgtacacctcatcgttccattctttgcaccatactcagtttagaacaaactactccttgtttatgcctctttatgactacatctatggcaccacagacaaagcttccgataaattacacgagtcagcattaaaacaagaggaagaaatccctaatgttgtacacctaacacatctcacgacccctgaatccatatatcatctcaggcttggatttgcttacttggcttctaagccttacacgtcaaaatggtacctttgtttgatgtggccagtaacagcttggtccatgatcctcacatgggtttatggccgtacatttattgtggaggggaatcgttttgacaaactgaagttgcaaacttgggcaatacccaagtacagtctccaatacttcatgcaatcacaaaaagtggctatcaacacaatgatagaggaagcaatactcgatgctgacagaaagggcataaaagttttgagcttaggcctaaggaatcaaggagaggaccttaacatctatggaggactatatgttagtaggcatccaaagctaaaagttagggttgtagatggaagcagtcttgtagttgctgttgttcttaatagcattcccaagggaacaactcaagttttacttaggggcaaactcaccaagattgcttatgctcttgcctacacattgtgtcaacaaggtgttcaggttgctgcattgtatgaggatgattatgtgaggctcaaaaagtcgttcaatagctctgaaaccaatttggcctttaccaaaagcagcacacagacgacttggttagtaggagatggattaactgaagaggaacaactgaaggcacccaaaggaacattatttattccatacacacaatttccaccaagaaaatatcgtaaggattgcttctaccattgcacccctgcaatgttagctccttgtagtgttgaaaatatccattcttgtgaggattggttgccaaggaggataatgagtgcatggcgcatagctgggatagtgcactctctagaaggatggactgaacatgagtgtggccacacaatgcataacatagacaatgtttggcattcaactcttcaacatggattccaacctcttccggtgccaattaatgagtaactagctaggggaataatatatatgaataatatgtttggctgcttaatttgttttagctctttggagggtattaatccatcctacttatggttatctttaccttaaataagattgttaagtaataccttaagacaaagcaaatggatatcatctacatatatttccatagagctacaacattttaagaagtagctatataag

SEQ ID NO: 3415 - DNA, 1542 bp, Glycine max
  Clone ID: GLYMA-23APR03-CLUSTER2714_2
gaacaacatttcactcccactactcctaaatcctaattctccttcatttcctaaaagcttcgtgtgttgggcatgacggtgtattggtcctactttccttttctctaaagtattcctctgtttgaacacgaagctataagcctacaactataattgttgctagttattcactgataattactataattaacgtaaaacatgttgcactgcgccaacacgtcggggaatctggctgtggctggggacatgacagtgttggaaagacagagggcgaggatgaagtggcaagaagagcaagggtacttttctggcaacagcttcaacggtgttttttcttcttcttctctgcacgttcatgattccattatggtggctgctgactccggttgtgcactcgctgaggtcgtggctcaggcccaggctcgctcaaccaattcttcttcaatttcaaggacttttagttgtccacctgctctggtggagcccgagtccgagtccaagcccaagcccaagcccaccgactcctctgttgggaaagacggtttcaagaagaggaaacctgacaagcctcaccatccgaaggttgttgcagaaaatgataacaaagacaagaggatcaaattcggctctgatgatggagaatccaaaatcaccaagagtaacacaacaaacacaaataccaacaacaacaaagaaacttgcgcagagacttcaaattccaaggcctccgaaaagcctgattacattcatgtccgagcacgtcgtggccaagccaccgatagtcatagcttagccgaaagagttagaagggaaaaaattagtgagagaatgaagtatttgcaagatttagtgcccggttgcaacaaagtcacgggaaaagctggaatgcttgatgaaatcatcaactatgttcaatctcttcaacgacaagttgagtttctctcaatgaaattagctgctgtgaacccaaggcttgacttgagtattgatgatctatttgacaaagatgttttttctacttgtgctacaaattttccaaacataggaatttcatcaacatcagacatttctaaccctgcctatcttcagtttaattccccacaacaaattttttcatatgatggattagacccatccgatatggggctcagaaggaccataagtgctcctgtatcaatgcctgaaacatatcttcaatcgtcctgtttcacacaaatgctaccctcctcaacatgggaaggtgatttccaaaacctttgcaattttgattttgatcaagcacgggctacatctttcccttctcagctgttatcaggtctggttgaagctggcaatctaaagatggagatgtagactagagcttctatttcctactgcaacttatcaagattctttttgttttgttttcaagtacatagcatatataaattgtttgtaactgctccataatataaataaaatttattaattaatacctgttaacttcaaaaaattggttgtatactgctccgtagaataaataagatcatattaataccacac

SEQ ID NO: 3416 - DNA, 1623 bp, Glycine max
  Clone ID: GLYMA-23APR03-CLUSTER27181_1
gcgttcgtgctgcttcggagagtcgccaagtttctgaaaggttgtgattgatctgatcctctatatttggcattggcattggactatttttgggaagaagtaatggcagtgggaatgggaagtgagggtatggttttgaccacgttgattttgacgtccggggccagcggccgaatccttggcttcttcaacgccctccttttgctccttctctatctcttccccaccaccaccatgcgcctcgcctcctggaagagtacctccacgtggacgtcgtcgaggagggcgttggccattcggagggtgttggaggatgcagattcagatggaaccacattcagggagtaccatctcttttcaacctcaaggtgtgacaccatttttacccagtcttggattcctcgctctcctagcaataccatcaggggacttgttattcttatgcatggacttaatgaacacagtggcagatatactcatttcgcaaagcacctcaatgctaatggtttcaaggtttacgggatggattggcttggccacggtggaagtgatgggttgcatggttatgtccattctcttgatgatgttgtttctgatacgaaaatatttttggagaaggttcttaacgaaaatcctgggcttccatgtttctgctttggacactcaacaggagcagccattattcttaaggctctgcttgacccaaaggttgaatctcgcatagctggtgctgttttgacatcaccagcagttggtgtttccccttctcatccaattttgctggcacttgctcctatagcttcaattttgctgccaacgtatcaatgtagttctgcatataagaaggggtcaccagtgtctagagacccagaggcgctaattgctaaatattctgatccattagtatgtactggacctcttagagtacgtactggttatgagattctcagaattacaagctacttgcagcgaaatctgagaaaattgagagttccattttttgttctccatggcactgctgattccgtgactgatcccattgcttcacaaaaattatatgtagaagcctcctcatctgacaaaactatcagactatacgatggtttcttacatgacctgctctttgaacccgaacgagatgctatcacacaggacataattcaatggctaaacaatagagtatgaatatactaagtaggtgtcagtgaaaatatatcatgaaaattgaagaagcacctttgtcttgggtgggtaatttctgcctctttgtagaggaaagaaatttgaagctgaagctgcataaattgaggcattcttttatcttgaaatcttaagaccatatatcagcttcttttatggttaggatcttttctccgatccagtagttatccatggagcgcagtaagtatataccttcagttagtttttttttcctttgtcaagtttgtccatagaaagtatgtaccattttctttgtcgatcattttttgtgatgattattagcatttgtgccaaccaacaagtgggccagtgcttgcactgtttaaattgtaataacaaagttttatatcatttggctcggttgaagttttaaacatgttatttccaaaaaaaaaaaaaaaa

SEQ ID NO: 3417 - DNA, 646 bp, Glycine max
  Clone ID: GLYMA-23APR03-CLUSTER27240_3
atatatgtaaatacaaacataaacatgataggatatgatcgtccctaataaatatattagaccttgatcacacgacaatgttggcaagtgtgcacagaattgaataaacagacgcaggtgtttctgaatcgagaggtagagaaaatgtacgtggatcacgcgttttcgatttcagatgaggacataatgatggatggaccgtacacggtgagcaacaaggcacccatcaaggagatctccctcgccgtttcccttctcgtcttcggaaccctagccatcatcatcggttccctcatggcctataatcacgtcggcggcgacaccgctcacggtctgttctttgcgatactgggaacactcttgttcattccgggtttctactatacgcgctttgcctattgtgcttacaaaggatacaaagacttctctttctctaacatacctcccgtatagctcagctctaacataccacctttatgtatagatcttctctgtttctaccttcttatttatattgcttgcattgctctaaactagtatatgtattactttgctaagattttgtttttgttttacagaatcaatcttcctcctctggaaaaaaaaaaataaaataaaataaaaaaaattattatataaattaaaa

SEQ ID NO: 3418 - DNA, 1044 bp, Glycine max
  Clone ID: GLYMA-23APR03-CLUSTER2725_11
caaggccgattaaagttgggtaacgccaagggttttttcccagtccacggccgtgtaaaaaccgacggccccagtgaattgtaatacgactccattattaggggaattgggtaccggggccccccccctcgagtcagctacgtaggccccccccccccccccgatcaagctggacttgttggatgacctgatttcagattctgagtttgactctttatgagattagtcagatcacctttgattcaaaccgattgaactgaggctgcccttgtttgactgcttttaatcgaattcaacataacagctagaatatgttgacttctggcaggtaacctggtgcttggacaaactggctcaatcggtctgtccagtgcaggcttcccaacactagtattagtctatatatgatgttcttgtgtcttgaagtttgaatgtcatccattgatccatataaagcttggttgttttcattgttgaagttatgctggctgatttgcatgaagtttgtattgatgtgatcagttttgaactgatcccatgcagggggtttagctgagtccaaaatttcttctttaaactatgtactttgacatcattgtttactttgtttatatgtatttggcatctttaggtgttgctctcaatttgttccctgttgacggacccaaatcctgatgatcctttggtccccgaaattgcacacatgtacaagacagacaggaacaagtacgagtcaactgcaagaagctggacccagaaatatgccatgggctaattgacatagagaagagagcgatttttactttcagtgtttaggccaaacagccttgtatgaatatttgtggtcttcgattaaggcccctccagttgaagatgaatggggaaatatttcttctgttgtctgtattgcagaatgcaaacgctacttttaaaacagtgaaatgtaagcccaattaaaaagtttaaaattttaaccttgtattgacagtattgtcgaatatttagagaatgattggtttgctctgtcaaaaaaaaaaaaaaggt

SEQ ID NO: 3419 - DNA, 2070 bp, Glycine max
  Clone ID: GLYMA-23APR03-CLUSTER2735_7
gacagttggattgtagtggaaaagatgaaatgagagaattattatgtgtctataataatagttattgaaagttgtgaggaaggaggaggatggtgtccccgatgtcaacggttctggtgacgggaggggcaggcttcatcggatcccacacggtgcttcagcttctgaagcagggcttcagggtttccatcatcgacaaccttgacaattccctcatcgaagccgttcacagggttcgccgcctggtcggtcctcatctttccaacaacctcaccttcttccacggagatctccgcaatgttcaggatttggaggcagtgttctcgaaaagcaagtttgatgcggtgatccactttgctgggctgaaaggtgtcggcgaaagcgttgcaaagccccggcgttattacgacaacaatctagtggggactataaacctttttgaagcaatggctaaatacaagtgtaaaaaaatggttatatcatcatcggcaactgtttatggggaagctgatagagtcccatgtgtggaggaggaggtgcatttgcaggccatgaatccgtatggaagaacaaagctgttcgtagaagaaatagccagagacatccagagggcggagacagaatggaggatcattctgcttcgatacttcaatccggttggtgcccacgagagtggacagattggggaagatccaaggggaatccccaataacctcatgccttacattcaccaagtcgccgttggcagattgcctcagctcaatgtttatggtcatgactatcccactaaagatggcaccccgatccgggactatatccatgtaatggacttggcagatggccacattgctgccctccgaaagctttttgcaacagaccacatcggttgtagtgcctacaatcttggaactgggcgtggcacatccgtgcttgaaatggttgctgcctttgaaaaagcttccggcaagaaaattccattaaaaatgtgtcccagaagacccggggatgctactgctgtatatgcatctacggacaaggctgagaaagaacttggttggaaggcaaaatacggtatagaggaaatgtgcagggatttgtggaattggacaagcaaaaatccatggggataccaggggaagcattaaatgaaattgggttgtacttggaggaggtcttcctccaccatatcatatcatctccactccagatataatatgttgatgtttcttttgctgatacaattgattgattgattctttacactaggtatgttgttggcctaaataattgtataattataatttttcacattgtataaaggtccgctttgatgagtcatatatgagaattaatttaaatggagagaaccaagtgtctgaatcagcctcaggaatagagaaatgaagtaaataaccaaaagccctcctcccaatagtgcatcaagcttcatgtctcttctaatcagcacgacaagtgcccaaaccaatccaacccccaaaagtgccaatgtttcccacagatatgcacgacctggacctgccagtgaaacacgttagcagaaaaataacttattcggataccctaagtgcctaaatctgcgctgataatcctttcattgttcttttgctaacctttgcgtgcagaatagtttcttcgttttgcgaaatgaccagacataattaaagttacctgtcgtgttatggacaaatttgatgcagcaacctgaaaagaccccgagtggggtgggcttaagggtggccaagtcatggctcaacctaaaccagtctttgccaggattgaaaaccaaactgaagtggaagacaaaggagtcgcagttggaaagactaagaaaagcaaagcgaagccgaaacagcctcaagaagtcgtcggagcctagatacccatttttgacattttccccttttctgaattgttaatgttttcaccaagttcagcttcatgtaaaactaattcttttgttaatttatgtacacgaatattttgatacatacatgcgcaagaaggtatttatgagaaaaaggcatatgtgtatatgaaaaaaacccccaa

SEQ ID NO: 3420 - DNA, 1551 bp, Glycine max
  Clone ID: GLYMA-23APR03-CLUSTER275221_1
tcagctacgctggcccccccccccaaacaactagttcccacaaaggaaagacacttcacagttcacactctttctctttctctctctctgaagcatcaccgtcaccatgaatacgcaaaccacaagcccggtgatcaaagaagaagaagaaaaggaggaaggaacaaaggaagtggttcaagaagaagaagaagcgtctcacccttacgcatttcatgtttctggtcctcgtaatttggccaaccttaattggagagaccttataagttcgagctggaaggatgcaaattacaaaagaactgtcattgcttgctttatacaggcagtttacctgcttgaactcgatagacaggagaaccgaacgcaagaaaatgctctagccccaaattggtggattcccttcaagtacaagctcacacaaacattgattgatgaaagagatggatccatttttggggcaatacttgaatgggacagatctgcagcaatggcagacttagtactacttagaccaagtggtgcccccaaagctgttttagcgctaagaggaacgttactcaaaagccctacaatgcgaagagacattgaagacgaccttcgttttcttgcctgggaaagcctgaagggctctgtcaggtttaaagtagctctggaggtactaaagtcggtttccgacacatatggaagcagcaatgtttgcattgcagggcattcgttgggagccggcttcgctcttcaagtgggaaaggcattagcaaaagaaggcatttatgtggagacacatttgttcaatccaccttctgtttccctagccatgagtctcagaaacattggagaaaaggctgagttagtttggaagagacttaaatccatgcttccttcttcgagtaatgaagaagctcaagctggcaacgatggagacaagagtttgagcataggactaaagagttggatacctcggttatcatctagcttcaagaatgccggttttggtgttggaaaatgggttcctcatctgtatgtaaacaacagtgactatatatgttgctcttatacggaccccgaatgctcaggaggaggagagaagatcaatgatgctgacaaggagaatattggtccgatgaacggacaagttgcggcaaaactgtttgttgtctccaaggaaaagcagaagtttcatgaagctcatgccctggaacaatggtggtctagtgatgcacaacttcagcaggctaatagcaaactcataagcaggcaacttaaatctttgtatacaagtggcggtacttctccacaagtaatgcagggaaaattgcctaggtaacaaatggtgatattgctctgcttgtttgtgaaatgagttgttttaaaaatcttggttataataattacaatttgggttgtgttcatatcttgttacttttggttttcttgtatttttcctttaaacaaaattgtatcaatttaccttgtaatatatgaagtcattcttttatgatttcatggttggagtcaaaaacataaattcaaatcaaaaaaaaaaaaaaaaaa

SEQ ID NO: 3421 - DNA, 1956 bp, Glycine max
  Clone ID: GLYMA-23APR03-CLUSTER2758_1
agagaacgcccaaagcgctgctgaatggccgccacattcccttcctccgacatccacgacctccgctcgccgatgctaccagcggcggcggtggcggcgaagaagccggcgatggagaagctctgcatcgacgacatgctgcagaaacactgcggcgagttcgggcggtggcagctcaagcacttcatcctcaccagcctcgcgtgggcgctcgaggcctttcacaccatggtcatgatcttcgccgaccgcgaaccggactggaagtgcgtcgccggcgccgcctgcgacggcggcgacttgtgcggtctctcgccggagtcgagggagtggatcggcggccgcggcggctccacggtttccgattggggtttgatttgcggagataagtttaaggttggattggtgcaggctgttttcttctttggctgcatgattggtgctggaacatttggccacctctcagactcctctttaggaaggaaaggctctctcacagtggtttgtgccctaaacaccatcttcggctgcttaacagccctgtccccaaactactggatctacgtcctcctccgcctcctcaccggcttcagcagcggtggcgtcggcctcactgccttcgtccttgccaccgaaccaatcggcccaaccaaacgtggtgcagcgggtatgtccaccttctacttcttctccggtggcattgcacttctctcaggcatcgcctacatcttccaaacatggcgctatctatacatagcttcctccatcccctccttcctctacatcatccttgtccttccctttatctccgagtctccaagatggtacctcattcgtggcaaagttaccgaagccatgaaactcatgtccaccattgcttcttccaatggtaaacaccttcctgatggtgttctccttgcacttgacaacgaaacatcgcccacaacaaaccaaggttcaggctatgacataacagaaatcatgacttacaaaaacgaaaacaaagatgcacttattgggtccatcatagacgtggtttgttcacccatcactcgtatgaggttgttcattgcggtggctcttaatttcctagcctctgtggtgtactatgggcttagtttaaacgtcatgaacctggaaaccaacctttacgtgaacgtgatgctgaactcggtggcggagatgccagcctttacgataacggcggtgcttctggaccggtttggacggaagccattgacggtggcaacgatgtggttcagtgggttcttttgcttgatggggagtttggtgagcaacgttggggtgtggaaggtggtgagaatggtgtgtggtgttttggggatatttgggatggcggggacttataatttgctgtttatttacacggcggagctgtttccgacagtggtgaggaacgccgcgctcgggtgtactactcaagcggcgcaaatgggagcgatattggcgccgtttgtggtcgttttgggagggtatttgccgtttgcggtgtttgcagcatgtgggatagtgggagggatgtttgcgtttaatcttcccgagactctaaaccaacctctctatgatacatttggtggactggaagctggacttgcttgatggtagtttggtagcttctttttattgattgtttctgatcttttacatgtttagctttgatcatttgattgatgcttatgcgtggaacttctctcctttcctttgttttgttttttgtcaaattttgtagagtgggaaaatattgatacatgttttctaaggattaaagtcaaaaaaaaaaaaaaaacacggcggatgatttgaaaggaggggttagagaggcgctgcatagagggtctttgttgctttggaatgcgactagtagcagctagcgcaagagttttgggaggaggtgcgggttcgacatcgaccctcctgtttatgctgggccgtgtt

SEQ ID NO: 3422 - DNA, 1673 bp, Glycine max
  Clone ID: GLYMA-23APR03-CLUSTER2758_3
gttagtgacttatactctctgccttcgttctttctttatatataaccctcttcctttgctctctttccactcttcaaattaaaccagcaaaatcttatcttagcaatagctacccctatcacaacaatactctattaggcaaaaacaccaaatgggagaggaaaaagagcagcctaagaatgaaaccgagaagaagcccgaggaggccgccgcagcccccaagaaagacgacggacccatccctgtcgtttacaaactcgacttgcattgcgagggatgcgtcaagaagatcaaacgcacatgtcgccacttccaaggtgtggaaaccgttaaggcagatctatcgtcgaacaaagtgactgttaccggcaaattggatgccgagaagctgcgagataagatcgccgagagaaccaagaagaaggttgacatcatctcagctccgcccaaaaaagaagccgccgccacggaaaatccaccggagaagaaggttgaagagaagaaacctgaagagaaaaaaccagaagaaaaacctaaagagagtatggtggttttgaagatcaaactgcactgtgacggttgcattgcgaaaattcgaagaatcattatgaggttcaaaggtgtacaatcggtgagccttgacggaagcaaggacttggtgacagtgaagggaacaatggacgtgaaggagatggtgtcgtacctgaacgagaagctgaagcgaaacgtggaagtggtgcctcctccgaagaaagacgacgataagaaagagaaagaaggtgacggtggcgaaaagaaagagaaagagaaagacggtgccggtgagaagaaagagaaagacgttgctgcagcggcggaggttattaacaaaatggaatatatgcaccagatggcacctccgtcgttctggtacgacggaggacactttccaggtcaaacaaattacgctatggaggttcacccaggatatggtgctagtgctaataatcattacgtggagccagggtacgtgaaccagggttatcctctgcagccacctctaccgtactacatgcacccgcacgcacctccgccacagatgttcagcgatgagaaccccaatgcttgttccatcatgtgataatcagtgattaattttcgttttcggtgtactcttacacacggacggaatacgggatacggaatatgcacgcacgttgtaatttgtaaataaaaaaactggaaaaaaaaatcgacctgcgtgtaaaaaatgaggggtggataatatatcaatattccgtgttattgaaaattaatatagagaaattttatgatatggtagaattttgatataatataatgttttagagaatagagatagaggatggccggctggctggagaatcctgtccagaactcacatcacatgagttgttatttgttttgtttatttttttaatatcagaataaatggttactattgtttcaatgaatgtttcgggactggttctgaattgccgaggcattatgtgtgaaaagtgattggtttggttacttttttgtctcatttgagatttttttttctttctcgtttctgtttttgcttttggcaattttcatatgtggattgttaacctaacaattctgttattgtttttctttttcttttttcaaatatagttcattacgcgttg

SEQ ID NO: 3423 - DNA, 1765 bp, Glycine max
  Clone ID: GLYMA-23APR03-CLUSTER27718_1
ttgtgtgcgtctatatttgctgatgataaattgataatcaacatttgaaatgtaacttttcttgtatgtttcatgtgtgcatcaacaatatctcagtcaacacttcaaaacataaagaccattatagccctcaacaaaaaaggtcaaaataaggggattagaactaaaaaaatagtcagatacaagtactggagaaataaatttacaataacaatatttataatgtgaaaaatcaaaaaagttgtctggtgttttgaaactctagcgtgtgaatattggaagccagtatctctttaagaactgccagtaccggaatctgaacatctcaagtgctccacaaattcatcatataaaatctgatgagccttgatgtcatgccatgtgtctatggtttcaactaccaacttcagcaaattactaaatttaacctaatcattgcttgagtaactgtgtgtaaatcatttccaaataatgtcacccagaaatttgagagctggaacacctcttatctcaacatctatgagtggtgcctggatcatcaataagctggagagttctggatcgttctgaactatatcaagagcacgcatttgatcctttcttttcatagcacaaaacttgcaatcagatgtagatggtggaagaatctggttgacaataagtctcttcacaggaacattttccttcttcagggaagcactcaatctagatgactcactaattgccatcaccgtggggattgtaacaatgacaaattcggtcgaatcagtatcacgaaagagttcgcgcacttttatcatcctctctctgagtttctccaatttgtcagcagcattctgtcgggtttcttcttgcccaaacacggatttaattgctgaggtagcagaagctattttttgtcttagcttcagtatctttccaatggatgcatccaagaaatcgggtaaggacaataatcgtaatgtgtgacccgtaggtgctgtatcaaatactattcgagtaaacatgctatattcctgtgattcaagaaattgcataaccttggagatcgcaatagcttcatccagtccaggaggaggagaatccagtaattctcccagttttagttctcccaactggtctgcaatcattccaagacccatgccatccatgaagtctttgactccagttccaccatttttctgggcggcatttcgaaactcttccctagacttctcagggtttatttcaagagcaaaaagaggataatcaggtccttctactggcaccaatgcaccccctgtcaaatcctgagcaaaagaatcactcaaagaatgcgctggatcggtggaaaccacgagagtagggtgtccattattggcaaatttaacagcaagtgaagcagcacagcttgtcttccctactccccctttcccacctagcatgtaatacttcctcttagtcccagaaaccatctcatcaaaccccgatgcagcttctgtagtaccagcaattgatctcacttgaaaagacttagtgggggatttagtggaagcagaaaaggaaagaaaggtgacagctttggggagacgaagaagcagaggaggatttggtgcgaaggagaggacacccttgatggccatggagttcgttatgtgaagaaaagatgaaagaacagagccacatgccatttccgtactcctcctgctactcactttgcctttcgttttggtttactctatctctgtctctttcactcttcaccgctgcaaggtttttcttttca

SEQ ID NO: 3424 - DNA, 1266 bp, Glycine max
  unsure (1)..(1266): unsure at all n locations
  Clone ID: GLYMA-23APR03-CLUSTER277436_1
atatgatgcctgcctcaattttctataatttagaagttttttatggacaccttaaatgtagatatcaagatgtggtcatttatggtagtctggttcgtagtggatttgtttgagaggctgaaatattcctttgaattttataatggaagatgatgaatgatcctatgtaattgaaaccttttggcaaaatcttaattttatagcttgggaatggcgggcaaaggtggatcaactccggccacatattcgccgtctccgacgaccgataagaagaaaccatcgcttttcaatgaggatttggctcgacctgatggccgcagtttccaccagtgcagacccgcatttttcaggactggtgctgtgaatgctgcatctggatctgcttatgctgaggttggaaataccaaggtaattgtatttagtgagtgtgttgcaggtgatctcccagttgtcatatcatgtgctagccttgcccttgcagatgctggaataatgatgtatgatatagttgcctcagtttctgtgtcatgttttaataagaaccttgtcattgatcctattttggaggaggaaattggccaagatggcagcttaatgattacttgcatgccttctcgctatgaaatcacccaactcaccgttactggggaatggtccaccacaaagattaatgagggaatgcagctgtgtttggatgcttgtgcaaagcttgcgaagattatgaggtcatgtttaaaagaagttgcttcggattcccaggagtagaatgacagttctaaattaacacagatcgccttatgtgctgttgtgttggaggaaggtagggaaaggtgccttgaatgccctgaaaattttgtgctcatgatcttgtcaaagacaaagtaaattactctgaatttcgaaattgacaaccaccaacttgagtaaggtgaattgggttgaccctcctattatttttctgaaaaaaatccaaaagatagtaaaaccccaaaaaaaaatacaaatgcatgaattttttgctggtttagaaggaaaaaagaggagggttgttggtaggatcattttggtttgcatcaatcctgatggaattgaccatgtcggaccccaaaaaaggggtgattgaaacaacagtaattgtagttttatattaggatagcacgactttggtattctagtgtataaccaaactttgaaatgttaaatgaattgtttagttatttgcatgaattttttgntggttacaaaaaaaaaaaaaaaaaagaattc

SEQ ID NO: 3425 - DNA, 590 bp, Glycine max
  Clone ID: GLYMA-23APR03-CLUSTER27835_1
atctttgttgtgataggtccatggctctcttcttttctcatcatcctcttcttcatgggaacaaattacttttagctctgcagtcacaacgcataacttcatcaaagcccaacaacacatgcgcgttcacatacccatctattcggtgttgctcaagtttgaaccagaaaaacagcatcaacctcaaaacttgcaagaactgcaaaacccaattcgacccttcactcaatcaccctcatgcttgtcgatttcacacttcccattttggaggagaaactaagagaaagtttgagagtgtgtatgaagggggcacaatgaatactcctgactctggcaaagtttttcagtattggcattgctgtggttctgaagatccattcgatcctggttgcactgcttctcctcattcttcatatgatgattgatgcagatgccattcatcatcatccatgaatctaattcacctcttccatttagttttcttttagctatagtttctaaactcttgtataaaattttagaatccttaaataatttctgaaaatttaaatgtcgtccacattcctcatacaaaaaaaagaaaagaaaag

SEQ ID NO: 3426 - DNA, 644 bp, Glycine max
  Clone ID: GLYMA-23APR03-CLUSTER27936_1
atcaatggccacttttccttactacacccttcatcctctatcttcttctctcactccttcttctaaaggctctgttcatctttgtccatgctcttccacacgttctcgctctcttccccaattcccttccaaactacgacgcaaagccaccatcaagccgaggctgttgacgatcatcgaccccattttgctctttaacggcgtcgccaccactttctatttcgacacgcaaacacttatcgtcactgtcagtgttttggccgccattgctctttctctcttccttggccttaagggtgatccggtgccttgtgagcgctgtggtggcaacggtggcacaaaatgtgtattttgcaacgatggcaagatgaagcaagaaatggggttaattaactgtaaagtatgcaagggttcaggattgatattctgcaagaaatgtggaggttctggctattcccgtcggctatgagctgtgaaattcgtgttatatctaaaaaccatctgttctgaaatatgtaaggtcttgtaacaattttattgtccatagtgtcttttttctgtgaatcattttaatcacgttaatctgcggccctttgaggtattggccgattgcttttgcataaaatcagtcaaattttgatctt

SEQ ID NO: 3427 - DNA, 1437 bp, Glycine max
  Clone ID: GLYMA-23APR03-CLUSTER2795_2
acaacacttccagtgatcatcttctccatccagaacgaacaaaaatggagaattcgacccaagaatcccacctccgatccgaaaactccgtgagctacgaatccccctacccaatctacggcatgtcgttctccccttcccacccccaccgcctggccctcggcagcttcattgaagaatacaccaaccgcgttgacatcctctccttccaccccgacaccctctccctcacccccaacccttctctctcctttgaccacccttaccctcccaccaaactcatgttccacccccgcaaacccccctcctcctcctccgacctcctcgccacctccggcgactacctccgcctctgggaggtccgcgacaactccgtggaggccgtctcccttttcaacaacagcaagaccagcgagttctgcgcccccttaacctccttcgactggaacgatatcgaccccaaccgcatcgccacctccagcatcgacaccacctgcaccatctgggacatcgaacgcaccctcgtcgaaacccaactcatcgcgcacgacaaagaggtctacgacatcgcatggggagaggccagagtcttcgcctccgtctccgccgacggctccgttagaatcttcgacctacgcgacaaggagcactccaccatcatctacgagagcccccaccctgacacccctctgctccgtttggcttggaacaaacaggacctgaggtacatggctactattttaatggacagtaataaagttgtgattttggatattaggtctcccactacccctgttgcggagttagagaggcaccgtgggagtgtgaacgctattgcttgggctcctcatagttccacgcatatttgttctgctggggatgatactcaggctcttatttgggatttgcccactctggcttctcccactgggattgatcccgtgtgtatgtattctgctggctgtgaaattaaccagctgcagtggtctgccgtgcagcccgaatggattgccattgcttttgccaacaagatgcagcttttgaaggtttgaggtgagtcgagggagaataaacacaattctagttactcaaacttgattgtgggatagataggactcctttcgcggatgctgcaacttcttagttctcgtggcttgtgtataagagtgagcgagttagtactatatataatactattgtagttgttgactgtaaaatagtttgccctcctcatgttttacttgtagcgaaattgatgatcaatttgtctgttgaggacagcttttagatacatgtatgtcctgttcaggatttaagattccatgtctgttgatgtggaagccataactattagtttcttagtaaacatgaaaaatcacatgtccagatgatagttgtaaaatgttcagtgtatgtattagcatttgattgtcatta

SEQ ID NO: 3428 - DNA, 1408 bp, Glycine max
  Clone ID: GLYMA-23APR03-CLUSTER28059_1
aactccatctccaattccctcttcttcaattgtcccctcctctcaaaacacattccacatgggagaaactcaagaaccgcaactctcccctgagacttgtttcaccatccacatgggagaacctcaagaagtgcaacttagcaaaattgaacctagcggagccaaagaaacaaattccttggaggacaatagttttggtggtccaatgaatgagtcaataatgagtaacaaaaaaagatactaccgttggctcagagtagccatccattcttcacttgtgttggtgtgtgcatcagcagcagtactcctcggaagattgtactatgaaaagggaggaaaaagcaaatggatgggaacacttgttcaacttgctggtttcccaattcagcttcctgtttacttctttttagcacccaaaaatctcaccacaaataatagcattcatccaaaacaaccatcagtttcaatgctatcatttatctatgtctcaattggcctacttgtggcattagattgttatttatattcagttggactatgggaccttcctgtctctacctattcactcatttgctcatcccaattggctttcaatgctttcttctcctacttcctcaactcactcaagttcacaccttacataatcaactctctagtccttctcaccatttcttcaaccctccttgtgtttcaaaatgagtcatcatcagatgatgatgatgattcagattccacaaaaatctccaagaaaaagtatgtgattggattcatatgcacagttggtgcatctgcagggtatggactatggctttccctcacacagcttgtgttcaagaaggtcataaaaagagaaacattcaaagtggtcttggatatgatattatacacttcccttgtggctacccttgctaccttagtgggactttttgctagtggagagtggagtggtttgaagaatgaaatgaaggagtatgagttggggaaggcttcatatttgctgaacctcactttcacagccatactttggcaagtcttcaccattggttgtttgggcgatattagtgaggtttcttccctcttctctaatgccataagcgctttgggagtgcctattgttccaatgctggcagtgttgttctttcatgacaaaatggatggcattaagggtatctctatggtgttagctatttggggcattgtatcatatgtgtatcaacagtacttggatgatacaaagtccgaaaacagaaacactactagtcatgttccaaaagcttcttcacctatagaagaggttcatagatgagttacgtgggcttttaagttatcaatttgatatttgtattacaaatttacaacacttttacatacatgcatatgttagtaattgaacttttagcatcaaaaa

SEQ ID NO: 3429 - DNA, 560 bp, Glycine max
  Clone ID: GLYMA-23APR03-CLUSTER280822_1
atctattcatttaacgctatgtccctccgcaagaggctgagaaatcttgggcacaatctcaaggacaaagcctcggtgatcgcagcatcactctctctcaagcgccacgtgtcctccgtccgcatccatgtcctccacgccaccacccaccgcctctctgctccgccatccacgtcgcaaatcgccgccgttctctccgccggaaaaggctcctatctcctgtcacgcacctgcatagacaccatcatggaccgcctccacagaacccgaagcgccacggtggcactcaaatgcctcttcactcttcacaacatcgtatccgagagaaagggacccttaacgttgaaggacaacctctcccactacccttcgaacggaggacgcaacgcccttaacgtttccaccttccgcgacgacacggacgttgaaaccatggagctcagcgcgtgggttcgatggtacgctaatgttctcgaacatgtcttaaccgtttcgcgcgttttaggttattatctaataaactcgaatgacggcaccagagaggttttttcgagtgtcga

SEQ ID NO: 3430 - DNA, 1203 bp, Glycine max
  Clone ID: GLYMA-23APR03-CLUSTER28128_1
tcgagtcacatctacgtggccccccccccgtcctcacgcactccctctccctgccgccgctgagacacgaagagtaactgcctcgcaacgccgcccttgccatcgcgacagagtgtcgtacacagcggagctccctcgcgacgccatcctcactgtgccgtttcaggtgtttgacgaaattccccataaacgaagctcatgggcaagaaaggaggggccaaaaaattagagtctgtgtctcacactccaatatcattgagggaagaagccaccggaaaaatacaaaccaaggcagcctcaaacaccaagtccaaattgagatttgagcacttgaaaaacctagcagtgtgggccaccgccataccatctttgggtgccttctatggacaccaattcgccgcctttggagaggccactggaataccacccgatccttctttaataacttgccaaagatgtgaaactattcttcaacctggatttaattcaactgtacgaattgagaagaatcaatcaaagctcaggcatagacacaagaagtctggtaacatcactcaaaacaaggtagtgtacaagtgccatttttgtttgcatcagaatctgaagagagggactcctaagggacacataaaaggaatctgtccatcaaaagataaatcatcgttagagtcaacacctccatcaaaatccatcacaagtgattcttctaaattagagaaaggcattttaagcaaagatgaagccaatgaaataaatgtgtttcctttacgagatgtagctaacgtggacggtttagctactccgtcaagtacaaatacgacaactttgtctaaaaaggctattaaaactataaacaagtctgcaaaacaagtagcaaaatctgcaagtacatccaacaaaagacgaagaaaatcttggactagtttaaaggaaattgctcagagcaacgagcataagaacaatccgattgctaatttaacgatcccattctttttataagcagagatattttctatataggttaaattgagttgtatttctttttacatgatgcatgcaggctttatgttttatctgctattacactttcaagcaaatatgtttttactgtgtttgatgctctgttggacttttgttctcctgcatggatatcagtttagttttcctttttctatttgcaattcaaaaaaaaaaaaaaaaaat

SEQ ID NO: 3431 - DNA, 1480 bp, Glycine max
  Clone ID: GLYMA-23APR03-CLUSTER2833_2
actgaattttgattcatgacctcatgtatactactctaggcccaacattaagccgaccctggacggttgatactgtgttactatataggaaacaatgcttgcaatgtgtgtgtgggtgtgtaaagaggacatcaaataagtatgaagtatccaaatattcatattggatagtgaagcaaatgcaagtattggtgctttgtagactgatggttagaacagggatcatattggataatggcgattccattttcatctcaaatttttccagttagtctgtcttcttattggaaatgactatcctgttacctgactgacttgttggaagggcataatttgattatttgtatgggattctggctgaatttgttctaaacttgtactataggtttaagcatatctagcattgcgggacaatttgttgtcaagtacccaaaatatttcctatattatgtttctcatgctttctttttcttttcatctaattcttaaatgctatagaatgataagcctaagctttttaagaattgcagtgtttgacctataacattttctaatcagcatggctactctaatctcaagttttcatatcatgttgttcctgtgaccttaaattgttatgatttttattgcctctattgagaaattagacttgaatacttgtgaaatattgctgaatcttgcaggtggtcgaaatagggaaaggaagcaaggtgaaatatgaacttgacaaaagaactggacttattatggttgatcgtatactttactcatcagttgtttatcctcacaactatgggtttattccacgtactatttgtgaggacggtgatcccatggatgtcttggttattatgcaggagccagttcttccgggttgctttcttcgggccaaagctattggtctcatgcctatgattgatcagggtgagaaagatgacaagataattgctgtctgtgctgatgatcctgagtataggcattacaatgatatcaaggagcttcctccacaccgtttagctgaaattcgtcgtttctttgaagattacaagaagaatgagaacaaggaagttgcagtgaacgactttcttcctgcctcagctgcctatgaagcgatcaagcattccatgaccttatatgcggaatacgttgtggagaacttgaggcggtagtgttgattcctgggtgcttggaattttgtttggttgtgaagacatacattacatgtattcaaaggctgctattataattacgattatgacgataacaaaagctttctatccttgtcgcgtgtgcattggtctcagggctgcaacatgcatattctacacatgtgcttagttttgagtgaatgattttttcatttattaatatcaaagttttattattgtagctcactctaccaaatatttggagcatatgggattcttacatcttatataaagcatttttacaacaaatattagtactatgttttgtgaat

SEQ ID NO: 3432 - DNA, 1907 bp, Glycine max
  Clone ID: GLYMA-23APR03-CLUSTER28433_1
attacattcattcatctcaacgttctctctctctctctctctctcacctctgagatcagccagcgacatgaatcctgcccttagctttattttagtggttgcgtgaagcagaagtttggaataatagtcgttgtgtggtgttctctactctctagctagctaccttcttggagatttggtaattattgcaaacacatcacgtttctaagtttgtgtttctcgaaatggggaagaaaacagagctgaaagatcacaaggagatagccaaagttgaaactgttcttgagcttctcaggaaacaaacccctctcactgtgaaacaggagaagttttgcaactatgcttgtgtgaaacggtttctgaaagcaaaaggggatagtgtgaaaaaagcttcgaagcaactcaaggcttgtcttgcttggagagagagtgttatcgctgatcacttgatagcagatgatttctcagctgaactggctgatgggttggcctatttggctggtcatgatgacgaatccagacctgttatgatttttcgtttgaagcaagattatcaaaagttgcattcccagaagatgttcactcgtttgctggcctttacaatagaggtggccatttcgaccatgccaaaaaacgtagaacaattcgtgatgctttttgacgcaagcttttacagatcagcatctgctttcatgaacctattactaccagcactgaaaattgtggcggagtactacccaggaaggctatgcaaagcgtttgtcatagaccctccctcgcttttcgcttacttgtggaagggtgtgaggccgttcgtggaattatcatcatggacgacggtggtatcatcgttggatttcgaagaatcgttggacttcaacgacttcgcggcgtacccgcgagcctcgtccctccgattcgacagcgcgagcgtgaaatcaacggcgaagataggctcgtgctcctcgtcacggttctccttcaccgtatctcaccaccttgactcgttgaagccctggtacctgagcctggccgacacgtcagcatccaaagtgggacccacgagtccttcggccgcactcatctcgccgctgaacgcgcgctcgctctcgttcgcgtcgcccgtcgcgagaaccccccgaggccccccggccaccaggaagggcctcttcccctcaacgccgctgccgcagcgcgtgacggcgccgccgcggacctcgttcctccagtcgccggcgacgttcttcaggcgagatagccacgttgccgccaagggagagaggtgccgggaatcgttcttgccgtatgtgaagttctaccgaagaccatacgacgaaatggtgtataggtcaaagatgcggcccccactcggcggcctaatctccattgtttcccctcatatcacaagacgccatgtttccgtttctcagcgtttctaatattttatttaattccaaaaatccttaatctaaatactactacaccgcaatcaacgcctccaattaccttaccattgccatttcccccccttcttgctcagtacatagtattagtatatttgaatgtgtactattattattactactgttaagtagacattaactcgttttttgatcctcaatttcaatttccaagttccctcgtgcgtgcaaggtggggtatgaaacagcgtgcagtatgttaatttatttttggtgtttgaagaggcaatattggaagtaattgcatgggaagaaggtagcgtggtcgaaacgacgagcactagaagtgcacattggtgggaaatagtaatagcagtagtaatggaatgaatacaagtagaccaagattgggaaagcgttgaaaatgaaaagacaacgttgatctttgtaattttcctttattttaatactactaaagttttgggg

SEQ ID NO: 3433 - DNA, 1590 bp, Glycine max
  Clone ID: GLYMA-23APR03-CLUSTER2850_13
gatttgtgtgttttaggttgcatgctgtcagatctacaccctaaacatgcttttcaagctcgaatcctccaagttccgaatcttctaaatcatttccacatgatctatatgcaataatagtaaaagatgatatagtttgggagatgaaataacctgaacataacaactttaatttggagatacctggttgcatctgaaacgctcatagatatttttcgccgctttttttttttcgttaaagaaaaaagcatgaaaatatgctgctaacgattaggcatatttattgattaatgatcagaaacggagggcgggagcgtgagatcgtacggagacgaatcgtyggaggaagcgacgagagtgacgcgtagtatcatgatcgtgaaaccgcccgggtaccaragtggatcgcctccggtttctcccgccggttctactactccgatttctccgttttccggtwaggkcgtttatttcttttctactactctgtttactgtcacggtaaaaaaatatwtatgcttgcgcggtccagtwaaagtaaacaacgcccccacaatttcgggtagcggatattttgtcctttgccaggcatgataaagcagtgtttggtgggagtagttatgaatgaacaatgatatttggttgttaaattgacttgcccacataagtagcaccttcattggtcacacagtatatatgaccacatttgtttgttttgggttcagcacttcagctcaacccaagtgtccatttctcacaactaggttagccaacttggttacattatatgattatataatataatatatagcagccggataattaattatgggaaatgctaatcagtacgaagagtaaattcagccttttatgcagttactttactaaattatgcttttttatctcatccctgatttctgtttttaccttttttacacgtgtcaagttgattcttattgtttcgtctcgtaccaaatagtaatcctcgttaattattgtgtgtgaaattcgtaggaaggatgatggcttttgttaatcaataagcaacgactaacagtaatagctaggcataaattgtactgattttatttgatgtgtgttttttaggaggaaaagattcgtttcggtttcgaagaaggtcggcatcagatgcgtacgagaagagagggcagaacagatcaggcccttcttctcctttcgatgtgtgagaaatgagagtcgcattttctcgtacccgaaagctgaggatgtagtcttttggcctatgctgtattcatttttgtttagatctccgtttgcatgtatgaatgtatgtaaggaatgagttgaggttaaggttgtgccacagttctgccagttcacgcgaggtagctttttggtttagcttctttaagtctttacttaggtgagctgcgtagtggctggcaaattgtaagtaagaaagtgtaagggtagagtagcggtgtatcttattattatgtaatgtatatttataattaataagccattctgcgtttgttggtaaaaaaaaaaaaaaaaaaaaaaaaaaaaaaagaaaaaaaaaaaaagaaagaaagaagaaaaaaaaaa

SEQ ID NO: 3434 - DNA, 1619 bp, Glycine max
  Clone ID: GLYMA-23APR03-CLUSTER2867_2
gaaaaaagaataaatacatattatcctcccatgtattgtatttgtggggagatagagcgagtggatgtggtgttccggagaagttggaatggcagcggttagtgttagtgttactgtgagagtgaggtggtgcactcgaaaaccacccactccaactccaaccagattcagcgttaatgctctgtttggtgattggggatttgggaatagaacaaggaactcccttcagcagcaattcacgttcactcttgctgatagtaaagtgataagcgtgtcggttgtttcttcgatctcagatgttgcatcgagcgaatgggacgcttgtgctttggatgcgactggccctgacaacttcaatccattcctttcgcatgcctttttgtcgaccttagagcactctgcttccgctgtcagggaaactggttggatcccacaccacatcgttgccaaagccaacaacaacagcaacaacaacgttgtagccgttgtcccactctatcttaaaaacccactcctacggcgaatttgtttttgatcattcttgggctaatgcttaccattcttatggctacaattattaccccaagttacaatcttgtgtccccttcacacctgtaactggtccaaggatcttacttcgtaacacctccttcaaacatcaagttttcgacattattgtctccgcaatgaaggaactcgctctcacctcccagctttcatcattacatgttacttttccctctgaaaatgagtggcacaagctcactgaaaaaggcttcctccccaggattggaatgcagtaccactggaaaaaccgtaactacaaaaattttgatgacttcttgatggacatgaagcaaagtaaaagaaaaaatatacgtcaagagcgcaaaaagatctcagcccagaacttgattatgaaacgcctccggggttatgaaataaaggctaggcactgggattccttctactctttttacaggaacacaactgataacaaatggggcactcctcacctgacaagggaattttttcatgagctgggagcaaaaatgggagataatgtgctacttgtggtggctgaagaaggggatgaactagttgctggagccctaaatcttatcggaggagataccttgtttgggcgcctatggggatgtcagccacgaagttactacccaagtttgcattttgaagcgtgttattaccaggcaattgaagcagctattgaactcaatcttaaaactgtagaggcaggagctcagggtgaacacaagattcagcggggatatcttcctgtgacaacttatagctgccattaccttattgatgaagaatttagagaagctatacaagattttttaatacgtgaagctgctcaggtgaagctagttataaaactcttgcatgattctggtccttttaaggaaggtatcctttagaaagtaaatttatgggtatagtatttgcaaatatgtatatgattgtaataatttatttataatttagcagaaatgtatatacagctgaagtaatgagtacgttgggtatttggtacaaagatgaatgatgcatgcgtgcgcattgttagagtaaaaaaaaaaaaaaaaaaaaaaaag

SEQ ID NO: 3435 - DNA, 664 bp, Glycine max
  Clone ID: GLYMA-23APR03-CLUSTER28706_2
aaagaaaatacaacatgagagttccaacagtgctagttttaccatttccaggtgtagggcatgtgaatcccatgatgagcctctcacaaaagttggttgagcgtggatgcagagtcatttttgtccgctcagacttcaaccacaagcgagtgatgagttccatggtgtatgagcaacaaggtagccttgatgataaatcactaatgaagttggtctcgatccccgatggtttaggacccgatgacgacagaatggatcccggagcactatatgatgctgttgtaagaactatgcctacgacacttgagaagctcttagagaatactcatgaggatggtgacaacagaattggcttcattgttgcagatttggccatgctatgggcgttggaggttgggagaaaatttggaatcaaaggagctatattctgcctatagcagcaactatgtttgccttgttatgcaatagccccaagcttattgatgatgggatcataaattctgatggatcactcttaaccactaaaaaggacaattcgactatcaccaaatatgccaagagatgaacccaggaacatttttttggttaaatatgcctggcacaaaagatggtatgaatatgatgcatattacacgaactttaaatttgacagaatggtggcttt

SEQ ID NO: 3436 - DNA, 1234 bp, Glycine max
  Clone ID: GLYMA-23APR03-CLUSTER28728_1
tcagctacgtaggcccccccctcttgttgaaccccagattttggaatggaaataggtttatcgattcctcttcagcgtagccaggttcatgatgcgacaagtttttgtccgtcaaccccaacgttgtctgtatagcgcagcatgttcattctcggtatggaattcatggggcaatcacttgcacgcaaactccacaaccaaggatgggtcgtgtctgggacttgcacagcccatgtgaagaagaagcagctgcaggacatggggtttcatgttcaccttttaggtgcaaaccaccccgatgtggatgtcctacaagtactgacaaattacactcacattcttgtttctgtcccacctcttgtgggcattggagatccgacgcttcggcatgaagagcttttaagaagctcgatgatcgatggggatcttcggtggctttgttacttgtcttcaactagtgtctatggagactgtgatggtgaattggtggatgaggattatccaacaaacccgaaaagtgagtcagctaaattaaggttagcttctgaagaaggctggtcaaatttggcccacaatcttgggatctcactgcttttatttcgactaggtggtatctatggccctggtagaagtgctgttgatacaataatcaagcataagccaatgtcagaaggtcagaagaggagaaaaaaccgaaaatatacatccagaatacatgttgatgacatctgccaggcactgatggctactgttcttgcacctccccccagagaagtttacaatatcgtggatgatgaccctgctccgagggaagaagtatttgaatatgcaacgagattggtggagaaaaagtggccagggtcgaagttacaaagtgtggagcagaggcagaaagagtggtcaaatgtgaagaatccaaggggtgagaagagactgtgtaatgcccgaatgaagagggaacttggggtgcaactacttacaaatcaggattgaagagtataattcaccaaattcagactccattccactctcattgatcaataccttattcctgtgtcgtcattatttatattacttcatgttcaagggaaaatgctatttgtagaacttcatatttaatttttttttgttaaattccgttaaattctttttgtaattaattttaacttaattaaataataatcacatttatgatttaaaaaaaaaaaaaaaaaaaaaaaaaaaaaaaaaaaaa

SEQ ID NO: 3437 - DNA, 1844 bp, Glycine max
  unsure (1)..(1844): unsure at all n locations
  Clone ID: GLYMA-23APR03-CLUSTER2885_1
tcagctacgtaggccccccccccccaacacatttctcatttctctcttctaattctaatttataaccgtccgcttatcagggacgcctagatcaagccctagttctttcacttttctctctattcccgattttcatcgccatcatgcatcctcttcaatttcacgattagttcatcgcactccgattcttcaccatgttcgaagctcacgttcttcatttgcttcgaagttatttgggtgaatatgttcatggactctctacggaggcgttgagaataagcgtctggaagggcgatgttgtcctaaaagatttgaaactgaaggcagaggctctaaatgcactaaaactaccagttacagtcaaagctggctttgttggtacaattacattgaaggttccatggaaaagtttggggaaagaacctgtcatcgtcttgattgatcgtgtgtttgttctagctcatcctgctcctgatagtcgaactatgaaggatgaggatagggaaaaacttttcgaagccaagctccagcagattgaggaagcagagtcagccacacttgatgcaatatcaaagtcaaagttgggaagtccatcttctggaaattcatggctaagttctctaatttctacaattattggaaacctcaagatatctatcagcaatgtgcatatcagatatgaagattcagtcagtaatcctggccatccattttcttcaggtgtgactttggctaagcttgctgctgttacaatggatgaggaggggaatgaaacttttgatacaagtggtgctttggataggctgaggaagtcagtgcaccttgagagactagctctttatcatgattctaaccagcttccttgggagattgataagagatgggcggatataaatccacaagaatggattgagatatttgaagatggcataaatgagcctactggggatcataagttggtacctaagtgggctaggaatcgcacgtacttggtttatcctatcaatgcagtcctacagtatcatcgtcttggaaaccaagaaagagttaatcctgatattccatttgagaaagttacgcttgtcctcacagatatctctctaactcttacagaggctcagtatcatgattggattaaacttttggaagctgtttcaagatacaagacatatatggaagtttctcatttacgacctgtagttcccatctccaaggctccttatttgtggtggcagtatgctgcacaggctgtactccagaagcagcagaagtgttaccgcttgtcatgggaccaaattcggcatctttgtcagtgtcgacgtcgatatattcagttctatgtggcttctcttcaacattcatcacatgtcaatcaaacagaaatcaaaaaaaaaaaaaaaaatttttttttttgttaaataagtcatctacctttttgtaaatggtacggagagaattttgagaaaaccttatagagaaccctattgttattgatgtattctgtgtaattgaaacataatgagagaaacatacaatcatttatttatagagctgttgacagttagcttagatcttaacagaagcttctagacacagctgtcacaataactgctgtgtaatcaactcagtaaccacccgagagagtcagttaaaaaatgctcttggtacaacactctccccctctcccacaaagaaaagaaaaaactcaagattggtgagattgaaaagggagctgaacaccttaagtttttctcctagaaacagaaatctggtgggaggggctttgatgtaagccacccctttgatatctggcaggaacatgcagtacagtngagatgtttgct

SEQ ID NO: 3438 - DNA, 1006 bp, Glycine max
  unsure (1)..(1006): unsure at all n locations
  Clone ID: GLYMA-23APR03-CLUSTER288693_1
atgtgtttttttacgtttttttcattcctcatatactccttttttttttttttctatttcatgatcacaacaacagcttcaccttcattcacaacagcaccgagccaaaactgcaccttccaaaatttcatcattgattagacaaacccttctaccaaaatccaaatcaaatgactccaactaacaacacccgacaacaaggtgctgtggcaactcctttttccgcagactaacattggtgttggtctccatctttgttatcatcatggccatcatcagcatagcatggcttgccatgcatccgcatgaccctggttttcggttgacatcactttccgtgaccaacttcgccctctcagactcgcaggtacgaggaaagtacgaggttggactaaccataacaaacccaaacaagatcaaagcacaagtggtgcttcaccgtgtccacacgttacggctttatggcgaggagtggcactccatggntgcggtgcaacagcaacaacaaaccgtgttcatggagaagtttaccaacaagagtgtgaaggttgacatggaagtgagggattcacgccagaaggtggttcctgatgttttgtttaagaactggaccaaaggggtggttaacttcaacatggtggtcttgggtgttaaggttagattccaatctggaatttggccaagtatggataagttatttgatgttcagtgtatgaatctggatgtggagttcctctctccaacaaaagacactggcaagcttttgggtatagggaagaactgccacacagtgaatgctagagggacggcaagatccagaaagtagtgcaatgcgaagagtttaatttatataccctgctgtaactgtaagacatttttacatagaacattcaataagatttaattatgttatcacgccattttcttaatatgacgtgatgataaaataattttttattggatgtcgatgtaaaaaatatattttacactaaaaaaaaaaaaaaaa

SEQ ID NO: 3439 - DNA, 1332 bp, Glycine max
  Clone ID: GLYMA-23APR03-CLUSTER288694_1
ccgggcggcgacggcgccggcggcgctcaattcagggctagcaccatgcagttgcacgaacgcccggcagcggcgggggctccgccgagggtgtctggcggggtgccacgcaagtcattcccggggacgagcttggtaaagcgcgggccaggcaactgtaacacggctccctatagggcgaactgggtcccggcccccccctcgagtcagctacgtaggccccccccccccgaaaacatctgcaccgcgacgaggatgtcatgttcttcagctccacttcgatttcctccacagattcctccagccttggattctcctcctccgacaccgaatccatctcacgcgcctcgtgtttcgcgccacaggtggggcgcggaggaggaggaagcgcttcattccgttccgagaaacagggaatgcgcatcttcgacagtttctgtcgaacctcctcccatagatcgtcggaacacgcgcattcccaattctgcatcacaagccgtcgtcatctgtccgtgtcagaagatcataaacaaatcagacacggacacagacaggtgacggcttgtgacgaagaagaagaggccttaatgatcaaatccaagtcgagggccttaaagatttacaacaaccttaaaaaagtgaaacaacctatttcccctggcggcagggtcacgagtttcctcaactcgctcttcgccaacacgaagaaaaccaccaccactactacttctacaagttcccgcacgtgcggcgaagtgaatactccttcttcttcttcatgttattattcttccacgtgttcctctgcttcttcgttttcacgttcttgcttgagcaagaccatgtcttccgaaagggacaggttgcgcaatggggtgaagagaacggtgcgtttctacccagtgagtgtgatcgtgggtgaagatagcagaccctgtgggcacaaacgcttgtgcgaagagaaagaagcttctagagagttcttaagagagtacaataaccgacacaaccccaagattaagagcaatgataaattggtcttgaaggacttgtctttaaggactactaacgttgatgttgatgataacgatgacgacgatgatgcatcgagttatgcgagctcggatctcttcgagcttgatcatttggctgtgtttggaagtgataggtatagtgaggagcttccggtgtatgaaactactcatgttagtactaaccgcgccattgccaatggcctcatagtgtaataattctgttcaatatacgtacagaaccatttttgagtttaaaaaaaaaaaaaaaaaaagatacctgcagaaaaaaaatatcccc

SEQ ID NO: 3440 - DNA, 1356 bp, Glycine max
  Clone ID: GLYMA-23APR03-CLUSTER28_2
gactcaaccaattccaaattctcaactttcctaactttagcaaccatctaagaagttcagtcccttaattatctctcaccttgaattagaaaagcattcaaagctttgaacccaatttcactgtttgcacctcaaacatcttagaagtcccaattgagtctcaattccacaaccaaaaatgcaaagttcaatttcacaatctgatatttttatcactgattaccttgtaccccaagaagttccatttcaatttcaatttcaagatatgagcaagaatgacaacaacatgccaatgaaccataccaataataaccttcaaatgcctcaaatcacatctttctccaagcctccaaggtcctcatcaaatctaagcaaccgcaaaccctccttgaaaaacatcacaatcccttccataacctctggtcttgcaacagctatgtcacaaacaacagcaacaacaacaacaatagctacaaccatgtataacaacaaccaagtttcttcttcttctttttcttcagatgaaaccaacaataccaaagacgacaagcactatagaggggttagaagaaggccatgggggaagtatgctgcagaaatccgtgaccctaatagaaaaggctcaagggtgtggcttggaacctttgacacagccatagaagctgctaaggcttatgacaaagctgctttcaagatgagagggagcaaagccatattgaacttccctttggagattggatcagatcagtctaaagaagagtcatcatcatcatcatcatcagtttcaagcagcagcatcgtcatcaaggttggtgtgaagagagaaagagaggaagagagtgaaaggaagaacaactatgagaaaagtgagtttaacaacaatagtaatagtaataagcatgtgaagaaagaagagtgccctttgactccatcatgttggaaaggcttttgggacactgatgttatgggaacaatctttagtgtgcctcctttgtcaccactatctccactaatggttgtttgagattttgtggaacttttgctctttcaatgatgttttgaggtaaccaaactaaggggagagagagagatgatgctggtgattgtcctctctgatttaggttgctaatttgcctaaatcaaaatggtagtactaattaatctactaatagattaatttgcaagtgaatatatatatggatttgtataatgtaaatataggatagtactatgaagcaagatctttttgtttgttgaaaaaaaaaacaaaaaacccatgcttatcttcttcctttaggtaaaaaaatgtactgtacttgaagcaatattgaaatttgtttattcgtttattggagg

SEQ ID NO: 3441 - DNA, 1543 bp, Glycine max
  unsure (1)..(1543): unsure at all n locations
  Clone ID: GLYMA-23APR03-CLUSTER2900_2
gcacttaggcttagcttctaacttggtgcattgactcaccatctttgcgttgaatcgccatggaagataaactagcaacaacaagtgaaggacaacccataagatgtaaagctgcgatttgtcgcaagccaggttctccattgagtattgaggagatcattgtggcaccaccaatgcctcgtgaagctcggattcgtgttatatgcacttctctttgtcacagcgatgttactttttggaaaatggaggtccctcctgcaatttgtccaagaattttgggtcatgaggctgttggggttgtggaaagcgtaggagaggatgtaaccgaagtcacaaaaggagatgtggttgttccaattttcttacctgattgtggggagtgtatagattgcaaatcaagcaagagcaacctttgttcaaagtttccttttgaggtgtctccttggatgcctagacatgccacctctagattcacggatttaaaaggagatatcatacaccatttcttgtttgtgtctagttttagcgagtataccgtggttgacattgctcatctaaccaagattgatccagcaataccacccaacagggcatgcctacttagttgtggtgtatcaaccggggtaggtgctgcttggagaacagcaggtgtggagccagggtctacagtagtcatttttgggttgggaagtattggattagcagttgccgagggagctagactttgtggagcaactaggattataggtgtggatgtcaacccagaaaaatatgaaactggaaaaaagtttggactcactgactttgtccatgctggagaaagtgaaaacaaatctgtgagccaggttatcataaagatgactggtgggggagcagattattgctttgaatgtgttggaatggcaacattggtgcaggaagcatatgcttcttgtagaaagggttggggaaaagcaatagttttaggagtggagaagccgggatccatgttgagccttagctgtaatgaggtcctccatagtgggaagagcctcgtggggtgcttatttggaggactcaaacccaagtctgatgtacctattctccttaaacgctacatggacaaggaactgaatttggatgagtttgtcacacatgaggtggagttcaaggatatcaacaaagcttttgatttattgattgaaggacagtgccttcggtgtgtgatttggatggacagatgagtccattcttgtacaagtaattgttgtttcgagcaattgaattatgatatcaacaagtaaaatgttggatactgctcttattttgtatttgatgaaaacatattcaattcaatgtaaaagcagttgataccccaacaaagtaattgttataaaggttgatgatcgtcatcagtgcttatttggagagaacatattcaatgtaaaagcagttgatgccgcaaagtaattatgtcaaataaattgatggtggccatcaatgcttcaaagtatttttgtatccaaaaaannnnnnnnnnnnnnnnnnnnnnnnnnnnnnnnnn

SEQ ID NO: 3442 - DNA, 1073 bp, Glycine max
  Clone ID: GLYMA-23APR03-CLUSTER2902_13
gaattcggcacgaggcgagctttcaaggcccaagtttcgcccaagaccctacgccaccaaggaggagcacgatcatcgcttcggcgtcttcaagtccaacctccgcagagccagctgcacgccaagctcgacccctcgcgtccacggcgtcaccaaattctccgatctaactccggccgagttccgccgccagttcctcggcctcaaagccgtccgcttcccggcgcacgcccagaaggcgcccatcctccccaccaaggatctccccaaggatttcgattggcgagacaaaggagccgtcactaacgtcaaggaccaaggggggtgtggttcgtgttggtctttcagtacgacgggagcgttggaaggagcttattatcttgccactggtgagctcgtgagccttagcgagcaacagcttgtggattgcgatcacgtgtgtgatccagaagaatatggagcgtgtgactcaggctgtaatggtgggttgatgaacaacgcatttgagtacatacttcagtctgggggagtacagaaagaaaaggactatccatacaccgggagagatggcacctgcaaatttgacaaaaccaaagttgcggctactgtatctaattacagtgtggtttgccttgatgaagaacaaattgctgcaaacctagtaaagaatggccctcttgcagttgctatcaatgcagtttttatgcagacatatgttggtggcgtctcatgcccatacatctgtgggaagcatttggatcatggggttcttctagttggttatggtgaaggtgcatatgctcccattcgttttaagaacaaaccttactggatcattaagaattcatggggcgagagctggggagagaatggatatgacgagatctgcagaggtcgaaatgtgtgtggagtagattccatggtctcaactgtagctgctatatatccatccagccattaaatacaagatatgcctgattgtggttgtgatgtgatactggacgaaggggagtttgtataatatttatgttgtgaacttatgatttgtactggtaaatatctccgtatagatc

SEQ ID NO: 3443 - DNA, 699 bp, Glycine max
  Clone ID: GLYMA-23APR03-CLUSTER2902_24
ttttttttttttttttgtaggaaccaacggtaaccatgccactttcaaaacataaaatccctttcaagttaggttgggtcgaccaagtttgcaggctgacccatattcgtctacattcttagaataaactaataaagtcatgactataaggtccacgcttattggaatcttttgggcttcattccactccatttcttgttgtggttccatctctccaatttaacagggaggggaaagggatcagtgttgttctgcaaagaggtggcgaaggcgagaagcgaagaggccggtggaatcttgagaagcttctcgaaggaggtcgttcttgatgttgttgatgcggtcggtgagagaaccgtggtcgaccctgagggcgtggatgtcttcttggaggccatggattttgtacttctgactcaaagatcgcatgctcaatagaaggatacccgtcatggcgaagaattggatgaagctgtccttccgttgcttcgcgtgcgccataaaccctaatatcttcctcgaatgttccgcggcggcgctcggtcgaggagaagctgaagaagaagccatgccgatctatccacaacacgaccgatactattactcacccacctacaacagaacctccctgctttctttcctcgctgatcacaaattgcaatgaatgtcgacggattcacctgtgtaatcctccgcgtt

SEQ ID NO: 3444 - DNA, 1033 bp, Glycine max
  Clone ID: GLYMA-23APR03-CLUSTER290711_1
cccggcctcaggcgcgcacccatcttgtccgccacccccggaaccgaccacccaaccgccgtgacagaaaagaggcgtgccctcccccgtctccccgcgttttagaattattccacccctccggggcatagacccgcgcaccatatacgacctgctagatctatcgcagtccatcggcctcagtcgcacatatctactatactatactctaggaagcaaggacaccaccgccatggcagccaagatgcttgcattgttcgctctcctagctctttgtgcaagcgccactagtgcgacccatattccagggcacttgccaccagtcatgccattgggtaccatgaacccatgcatgcagtactgcatgatgcaacgggggcttgccagcttgatggcgtgtccgtccctgatgctgcagcaactgttggccttaccgcttcagacgatgccagtgatgatgccacagatgatgacgcctaacatgatgtcaccattgatgatgccgagcatgatgtcaccaatggtcttgccgagcatgatgtcgcaaatgatgatgccacaatgtcactgcgacgccgtctcgcagattatgctgcaacagtagttaccattcatgttcaacccaatggccatgacgattccacccatgttcttacagcaaccctttgttggtgctgcattctagatagaaatatttgtgttgtatcgaataatgagttgacatgccatcgcgtgtgactcattattaacaataaaacaagtttcctcttattatctttttaaaaaaaaaagaaaaaaaaaaaaaaaacacccgcgccactctaacccccccccacccccccggacgggcggccgtcaacgccgcctcggctgcgcgcgcacgccgttaacgcacgtcaatgctcaaatgaaagtctataatttatatcccatttcctgttattactaattcgcgaataccccataatctccactctgtatgcgccccaagaacgagcacacgcacaacatcgaacacacacagctgctcccc

SEQ ID NO: 3445 - DNA, 1926 bp, Glycine max
  unsure (1)..(1926): unsure at all n locations
  Clone ID: GLYMA-23APR03-CLUSTER29112_1
cacgaaaatagttgccattcccgatcaaggtccttcaacaccacaaagngcttaacaataattaaaaaaaaaaacactaatcacaaaacacttaacaaagctacattcatccaaattttgcctttttttttctttctaaaaaaaaaaacaaatttatctaccaggatcanatctggtcaacgaccttaacctaacgaaaaactngactttnttatccaaatngttacacccatgctgctccttcctnttnttcccactgaacgcatcccaattntccggcgaccccatcagcagcacgctctccggcgacctaactccaaccgcctcctcattctctgcctggtcattggcggcggcggcgacggccaacatcctcccctgcatcgccgccagcacctccctcatggcgacgtcagcatcccctctattccgcagcaaaatctctcccacctgcgccggcgtgagggccccaccgccgcggatgcacccctccaccgcctggaacagcacgtgcgactccaagccgaggtagttccgcgcgagctcgcggaacgcatgggccccacacgtggcaaggctaacatggacgtccatgcggccacaccgcacgagcgcggggtccacactatccctgtggttggttgtaaagaccacaatcctctcttcaccgcaacagctccgcatcccatcggtgaaattcaaaagccctgaaagcgtgactcgcccactctcttcacaccccgtttggcccttcttattactactcctcaacgacagcttcgcgccctgacttttcttaaccttcaccgttctatccgccgttatgtcaacggaacagtcaatgtcttcaattactattatagaacggttcgtcgtttgtattagtaacgaccgcaactcggagttatcagagacttttgttaattccaagtcgtaaacgtcgtaacagagaaaattcgccattgccgcgattaagcttgatttacccgagcccggtgggccgtggagtaaatacccacgcttccaggcccggcccactcgcttataaaactctttaccgtcagcaaacgccgttaagtcgttttttatgtttttcttgagttctggctccattgctagggtttcgaaggttgaagggtgacggaaggggacggagacccaacccgattcgaacgagcccgaagaggtggtgttgttggtgaagagcctccgctcgcgcgagacgcgctcgaactcctcggcgcgtgaggtcacgtgcgcgaggtagggcgagaggagcgcgtggcggtggcgcttcggcaggcggagcgtgaagctgcgcctttcctccagcgagtcctgagctgtctccacgtggtgcgtccacgccacgcggtggccgcggaaggcgtcgtggacggtgtggttcggcgcgacggcgaaggaaatgcggttcgaagacggcgatcgggagagagttaatcggcggcacgcggtggcgggggcgtggttcgaggcgttgaggtagaggtgcgcgtggcggtagaggtcgttgaggtcgacgccgcagtagccgttgaactccggaatctcgaaatacgagtacggagaaagtagatcttgaagagattcgtatagtgaatgaagcaacgagagaagctgtgatggaagaacgttctggagaacgcactatgtcggttcaatctggtacgggggaacccactagataaatttatattcactatatctttttgcatggacccattgaatggttttttattcataatagctcttcatgtttttcttattcttcacctttgtacttatgagccgtatagaccatgagtttagattttcaatccacaatagcacaaatatgaagtatgtaattttagattgtgactgaaaatgccaattttgtttcttagttgcgtatttggttgggct

SEQ ID NO: 3446 - DNA, 823 bp, Glycine max
  Clone ID: GLYMA-23APR03-CLUSTER2928_4
aattctcgaattacattaggtctaaaatcaaagccaacaagatttctgatttccgtgctagttgattgaggtgaggcgagagaggtttttgtagcagaatctacctcatctccggaagacgatactgggacagctgcagaaccagaaattgatgtaactggtaaagaacaactggtggtaattatttcagtttgatctttggatcccttcggaacctcacttggtaccatagttggtgattctgtttctgcagatatcaaaccctttgcaaccaatgagcttaaaaggtttgaaattggatttagtttattatttttggcagtatttaaggtcggagctgaggaactgctaatgttagaggaagcgggtggttgagtagaaagcctttgtggtggttgtccagcctttccttgagtgttttttggcagtgtagatgagtcattatgcagaggatctaatgtggtaggtctaccagactgagtaggctgaaccccagtctgagatggatgcttccttggatccggatcacaggtaattgatttcttggggatgactccactcttgacaggtgcagctgacaaattatttgtggtcaactgtgctgaagtttctctggttaaagaaactttagactgagacgggtccagctgcttttgctgaagctttggtcgaaaagaagtcatggaagataacgggccctgcatgtccttttcctgtgatcttcgcaagttaccaacctgaacaatcgggcgtagcgtaagggagtgatctctaatatgctgagttatcggacctcccaaaaattgagaggttttgagattct

SEQ ID NO: 3447 - DNA, 929 bp, Glycine max
  Clone ID: GLYMA-23APR03-CLUSTER29457_2
gttgctacgtatgtgacttgaagttcttcgaccttgaggtttaagagccactctgtctctccctctcgccgctccgctgcaaactacaacactaacagaatgaatcgccgcgaaaagctttccctcttgaacgcgttcttcagaacccgacgcccttttcaccaatccccaattgttgctcccttcactccaccgacccacgtcgcgtccacctcaaagttccactcttttcccacaatccctcacacccacttcgcgattcggcaatatccgagaagtttcgctggtgggtctggcgcgttggaccacaccaaggaggtggacaccatcaacctcaagtttgcagaggcgagggaagagatagagatggcgttggagtccaaagataccgtttatttcgacgaggaagccgagtgtgcacgcgccgccgtcaacgaggttttgggcatgttcgagggattgttggctaagttgccagagagggaaagaggggctctgcagaggtctatgggtctcaagattgaacaattgaaagctgaacttgcacaattgaatgagtaagagcttgattgtgcggctgatagaattgctttagggtgttttattggctatagttttgaataaatgcattgaaagccaagccaactctaagtcacttatatgtgagctctgactagtgactactactatggttctttttatttaaagggatgttgatgctgttattcttttggtattctcgttacagggtttgcatttgttgtattggttttcaattaaagggatgttgttataccaattcttagatttgctgatagtgtgacgaggacaggggaaactagttgattgaggtgcttattaggaaactgaaagtaacaaattgacaatcaataaacttattttaataattacaactctaattgttgttt

SEQ ID NO: 3448 - DNA, 806 bp, Glycine max
  Clone ID: GLYMA-23APR03-CLUSTER294764_1
cttttctttgacgttctttaagtttaagcctctctctcactctcatcatcgctcatttcaaaacgacaccgtattctccaccacacttccatctctctctctatatatgcttcctcttccaaccgtcactccaaattcattctccatggaagtaaccttcgccatcgctgtcttcgtgccactcattttcgccggagcttcctcggccagggagctccggccgtcggaccacggcctcaccttccagacactctcgccggcagggccgcattcctcgccggagatgcgatccttcttcaacagcgccaactcctctccgtccatgtcctcctcctcggacgtcgcacttccccgtgccatggactccggcgaagcctccccgccggcgtggtggcaaaccgacggaggccactccgtcgaaggcgtgggaaaggcgctgacgatggcgagcttggggtgcggcgtggccggcgcggttctgcttgtggcttcgggtttgatctatttgttaaagtaccgaaacagaaacagaaacagaaagcagaagttaaacgcagcgttttgcggtgagaatgagaatcgcggtgaaaatattgatgaggaaaacaacaagttgcaattggtggtacgcaacccttgagtgagtgttgtgtgttcttgatttcattttgattttttgcttgtttcccactagctatgtatgattccacgttgcatgtaaagggtagctgttctaaatttatgactttatataatattatttgtttatctattttacttttttctattcaaaaaaaaaaaaaaaa

SEQ ID NO: 3449 - DNA, 1031 bp, Glycine max
  Clone ID: GLYMA-23APR03-CLUSTER29549_1
ttttttttttttttttttatttatgaattttttacactcttcaattatttatataataaatatatttttttaattccttaaaaaatactctaaagacaccaattatccatactcattacctttaagtaaatttctagcacaggattaataaaggggagggagtacttggggatgtgtgctaataaggcaaaggcaaaggaataggaataagagctataagggtataggggggatagtgtgagtatctttaggggaggtcagcactcagcacaacacaagcacaagcttgtgtttaaattgtataatgcattggaaactttaaatttctttaaactatacagagagagaagtaaccgaaggtcgttcattcattcagcacgaagcgagagaagcggaatccaaagtagaggcaacatagtcgcgaacgttgctcctcttccgcttcggcaccattttcgttggtttcaggtctttcctaaaagcttcagggattaggttacgggtttcgtcgatcctgttctctttctgggcctgcgacagcgagtggttcacgacgcggaggctctgatcggagcaagcagcagggaacacgctctggccgtcggagaagctgatcttctcgacggagatcacgcagcactcctgccagctgagctcaccgagatccgcaaccacatcctccagcaccaccgccgcgaacgccgatacgctctcgctcaccgttgaccgcggcagatccaccagttccagcgactccaccgcttgcaccagcactttcttaggagcgtggtggattttcttgaagccgtgaatgcggatgacctgattgagttgatttatggtgaggtgaagcgtttggcgagagtgaacgaggtgaaggtagtcctcgaggcacagcttttcgttctttgaagcgcgtttcttcgtggtgcttgcttgcgattgcggaatcgctattgataattcttccgccatggtaagtcaaaacggaaagagcgagagagagaccggagtagctgacgaaatgagag

SEQ ID NO: 3450 - DNA, 1807 bp, Glycine max
  Clone ID: GLYMA-23APR03-CLUSTER2969_64
aacaaagaatgaggacacaaagaaatcttatacttctaatgtggctgagtttgacctggtgatgcagacagtgaaatctggaacacatgattcagagtcttgtttaaaagaagaaacttgccttcctttaggtggatacaggcagtgtctggtcatctcttcctccgatcaacatttcatccttacaacggtctaagcccattttattgacagtggcatctatggattctgcttcattttttcgggacaaaagccttggtgcagactcccctatttctggtttaattgcattactagcagctgttgatgcactttctcatttggatggtcttggtgaccttagtaaacagcttgtttttgcagttttcactggagaggcatggggttaccttggaagtaggagatttttggtagaacttgacatgcactcagatgctgttcatggccttaatcatacattaattgaaacggtcattgaaattggttctgttggaaagggtctcagtcaaggtgttaaaaacttttttgctcataaagagggggattcttctgccacaaatcagacagtggctgccttgaaacgtgcacaggagtcactgatatctgaaaacataaagatagcatctgcaagtgcctcaaatcctgggatacctccatcctctttgatgtcctttttggaaaagaatcctgcaatctctggtgttgccctagaagattttgactctgtctttgtcaacaagttctaccatagtcatcttgatgatttatcaaatgtaaattcatcagctgtagttgctgctgcttctctcattgcccgaaccctttacatgcttgccagtgaaactgaagatgtacaaaattctactttggctgctataaatgttaatgtctcacttgttgaacaacttatgggttgtttgttggactgtgatcctggtctttcttgtgaattggtgacaaaatatatttcacccatgtcaacctgtccaagccattacgtaggtgttatcttggacgaaccttcatctacaccatatacaggatacatcaatgatgttcccaggttcatctggaattttctggctgacagaacttctatcccaagggagaataatagttcagattgtcaacatggttgcaatggtagagatgaagtatgcatcaaagcagagactgatggcaagggagtttgtgttctctctacaacgaggtatgttccggcttattcaacacggctaaaatttgaatcaggagtgtggaatgttttgccccctaattcctctgacaaaatgggggttgtggaccctgtctggacagagagcaactggaatacgataggtatgcgggtctacatagtacaaaatgcggcttatgatcgtcttgttctgtttgggggcatcactctgacagtctttgcatatcttgcgatagcaaccgcaagagcctttttcaacaaagcaatgaagagggattgacatttaacttccagaatctaactggtaaattttgtgaaactagtaaattataatggggattagggtcatttgataggcaaattaaccgtttttgaagagtttccaaggatgtgcagtatttggggccgcattcttgtgttcattaattctatttcagaaatttctctatgacacgatcatttttgtcacttgtaggcaagtgtaaggaaatataatgaaaatagttcaaattagcttgtgctgtaaatgcctagttagtgactacatgatttttatttggttaatggttttaatttattagttgccaatgagtcatcatatggtttaactgg

SEQ ID NO: 3451 - DNA, 1095 bp, Glycine max
  Clone ID: GLYMA-23APR03-CLUSTER2979_176
cttctgaatcagtgaaactaacgaagcaaagatgtcgtccatgctgcgcttccccttctcgtttcttcagccccaacggcctcaattccctcgcccattcactgcattcgccgcagccgccgccgtatcctcctccgaccgctcctttctccggaatgctctgaattccttcttctctgttaacccatcaatgcctctcttgggttctctgagtttagccgacagtggggtttgcgtggttgaggcaaaaaccggaacttcgttcccttcgattttagacagttctcagaaactctgcggaattgggctgcggaaaaaaaacgttttgggattgaagaacattgatgtatacgcttttggtgtttacgctactgatgaggacataaagagacatctttctgagaaatatgggaagttgtctgcgtctgaattgcagggcaataaggagtttactgaagatcttatggaaagtgatatatccatgacaattagacttcaagttgtctatgggagattgagcattcgttctgtacgtagtgcatttgaagtgtctgtaggaagtaagctgcaaaagtttgggggatcggacaataaggaattgcttcaaaggttcacttcacaatttaaagatgaattcaaaattcctcgtggatctgtaattcatctctcaagagacaagggccatgttcttcgcacatcaattgatggacaggaagtgggaagcatccagagtaaactcctatgagaactttctcaatataagagtttatggtctctgggtcacaatatgctccattgtaaaagcccttgaccactgagaggaatcaattcttgacattggagtgcatgccatcagaggaattttggagcaccaattgcacaagttcttgtatgtctgattcaacgtgagaggtagtgatgctggttggactgaggctgccgttgccactatcttgagcctaacaataattgcagaactataaaaaatctggatctgtaagtctgtaacttaatctaggcttcatatttgaagggatttagaagagcttttacacatcttatttaaatatataaaaaagacttttaacatttttt

SEQ ID NO: 3452 - DNA, 1481 bp, Glycine max
  Clone ID: GLYMA-23APR03-CLUSTER2979_200
ggatggctggcagcgggcaacaaatgaaccaccaccacctctagagttcatctcagctcatccacaaaaaaggttagagcattgcctacgacacatggccgaccaataggcgaccatagtccaaagccaaaggtaagcaaagtactaggtccgtgaccgacaagtcattatgcgtctagctcaagacgttaaagaagcgctactaggaggcagcctagtaccttttaaatctctgcttgttatttgatcacctttgtttctccagtcatagtaggacacacctagttgttcatgatcctaggaatttaaataaaacaagcacaagctcggaaggtagtcatacctcacaaaatatatatatgtatgtttaggtagcaagataccttggatatgcatgtatatagcaaaaattcctcacaaaatatatatatgtatgtttaggtagcaagataccttggatatgcatgtatgtggcaaaaaatacctcaatatatatatgtatgtttaggtagcaagataccttggatatgcatgtatataacaagactacctcacaaaaatatacacatgtttaggtagcaaaatacctcatgaaaaaaaaacaaaaagagaacaaaaaatatatctttcggctgaaaagccaacatgcttttgaagagaaataacttccagcttttctttgaaaaaaaaagattcactgatcataactagttttttgaaaaaaaatgtgtatacacttgaagggtgaatgctgtgaaaattttcccgaacgcccaaaatggactcggatgaatgcataaattgataaaggaccatattttggaaacactggttttacttaaaatagggaaaatgaatcctgagccctagtgtcacatgaccataaaaacttgatgcttgaggccacatgggtgcatgcatgaccagttttgcataaaatttcctaatcatcattgttgcatgtgtatcatggaaataatgtgggacatcccctttatccttgaaccgctggccaaaccctgacatatatcatgaccagccgttctacaatccttgagccaaaatcccaacttatcataaaccttgacccagggtgagaatgtcaatccttgccctcggaagaaaataaaaaaagaggaaaattcccaatcaaagattggaagaaagcaaaataaaaaaagcaaaaggagaaaattcccggtcaaaaaatcggaagaaagcaaaaggagaaaatttcccgatcaaagattgagagaaagcaaaaaagacagaaaattcccgatcaaacatcggaagaaaacaaaagaaatatgcagaaaggtctttggaccagacaatatctgaacaatacaaaattgtcaccaagtaaacaagaaaaagaaaggaaaccacgacctaaagtggtcctctccctttgattgccaaccaaaatcctgtgcgtcggtgacttgttcacctcacactaaaaaaaaaaaaaaaaa

SEQ ID NO: 3453 - DNA, 991 bp, Glycine max
  Clone ID: GLYMA-23APR03-CLUSTER2979_228
tcagctacgtaggccccccccccaaaaaaaaaaatcccaattcatttttgccctaagcgctcagtctcgcaaaccctctttctcctttgtcttcctcaccctatctcctcctccgcacactgtcgtctcgcaccaaacctgtaactgcactgctgaacctgcaaacgagttggggttcgttactatcacgattaagagcggatagagcgtcttctgaatgaaaacaatgcttcttcatctgaagacaagtcactagatttgtcatttagagaggatggaagaagtggtacgtttatgattgggaatgaacaattcccagcttctctattggatcttccttgcgttgttgaatcctataagacttatgatgataactctttgattaagactgccaatattggtcagatgattatggtgagggaatctggtgatgctgctccagatgtaattgagtacagacatggcctcactccacccatgagagatgctcgcaagcgtagatttcgcagggagcctgatcttaatcctgagcttgtctcccgtgttgagaaagatcttctcaaaatcatggctggaggaacagcggacaatcttgatgtggaaacagctgagcaagaagaaggggatgagaatgcccgaggtgctaataaaaaatctgcacctaagcctgcaccaaaacatgatattccagagaatcttactaatgcaggagaagctgacaggagtgattctgaggaatctgatgactcagtctgaccaaatcaactaccaaaagaatatttatatcacaatgatgaaatgaaagcctgtatagtataactttcgcagttaaatttgaattccatccagccttaaaatctcacctacagtagattttccattgtaggtgatctgtatacactgttttgtattttacaaatcgtgcattttctcgctatcttttacaaatcgtgcatttacttgtctaaaaaaaaaaaagaaaaaaataaaa

SEQ ID NO: 3454 - DNA, 1395 bp, Glycine max
  Clone ID: GLYMA-23APR03-CLUSTER2979_254
tcgagtcagctacgtaggcccccccccctaaaaaaaaccctattgctatgactttttgttgacatgcatgtaaatgaattcttcttttcatttctatttaatgcatgtttggcttatcttaattgtttgtaaaaaagaaaatcagtttttattttaagctttctctgtaggttttgattatatgctataccggacacaaaatatgacaaatcaatcctgcgtattaatttgttttgaattttagatggccaatgctgcagcaattgcagctgcctttgggggaggtttgcctcctggcataactggaacaaatgaaaggtgtacagttcttgtcgcaaatctcaatcccgatagaatagatgaggataaaatgttcaacttgttctccatttatgggaacattgtcagaattaaacttctccgaaataagccagatcatgcacttatccagatgggagatggttttcaagctgaattggcagtacattttctgaagggagccatgttgtttggaaagcgattggaggtcaactattcaaagcatgcaaacataacccaaggtgctgatacacacgagtacgccaattcaaatctcaatcgattcaatcgtaatgctgctaagaactaccggtattgctgctctccaacaaagatgatccacttgtccaccctcccgcaagacataaccgaagaggagattgtgagccttttggaggagcatggaaccattgtcaacagcaaggtctttgagatgaatggaaaaaagcaggcacttgttcagtttgagactgaggagcaggctactgaagcccttgtgtgcaagcatgcaagcccactttctggatcggttgttcgcatctccttttcccagttgcagaatatatgagccagactttgataagggctgaagggaaacagttttatggttgcaacttgctcggcttattagggacaaggaattctgaatttgggaaggataattttatgcagataatgtcaccttcattgtcattgtaatggtctctttgcttgctaatttactgataaaacctgaactactttttttttctctttgaatcatttatcttttcatctccattgcctctactagatatttaggtttctaacataatattgtggggcaagctttattattgcagatggatgtagtcttaaagaatagaaaaaggaggagggaagttactaccttcttcggggttgagggattgccttagggttttttataatgattgttgtatattttctgtaattcaggctaagtaggccttttctgttgtattctcaatccatttcaattttcttgtccaactaagtaaaatgctactacatttttgtttttggttcatttttattcctaaaaaaaaaaaaaaaaaa

SEQ ID NO: 3455 - DNA, 1789 bp, Glycine max
  Clone ID: GLYMA-23APR03-CLUSTER2979_264
tcagctacgtaggccccccccccaacttcaacctcaacctcaacctcaacccccacttaccagttttcccaaattttcgttcttttttcctttccatgagttgatgcatctttttcaagctaattaagcttgaattagctggtggggctttttaaattcgtcgataaaaaaacagtgttctgctttttttctcttgtgttttttggttgcagattcaggaactggtgtgtgagatttcttcaacttggggtgtcattgacataaatgcaaacaatcttgaatttgaaggcagtaagtgattacttaaatccctgaaagacatgcagtcagccttcgttctgctgaaatgaagaacttgcagacctcggaggaattacagtcatcgactcaagcttctcatgagcccaagagtgaacaaccaaacaatcacacaactgatgctcctgttacagacacaggctcagcatctgctacaagtaatgacagcaaaaagtttcacggcaggatattgagtttgttcagaatttaatagaaagatgcctacagttatatatgaataaagatgaagtggttaaaacactactgactcgggcaaagatagatcctggattcacaactcttgtatggcagaagttggaagaagagaacgctgatttcttcagggcctactatatcaggctaaaattgaaaaagcaaatactattattcaatcatttacttgagcatcagtatcatctcatgaagtgtccaatgcctgcaaaggttccattggctccaatacagaatggaatccatccaatgcctgtcaacaacctacctatggggtatccagtgctacagcagcctcccatgccagcaacaggtcaacctcatattgactccatgggttgtggtttatcaagttgtcatgtagttaatggagtccctgcctcaggcaactttcaccccattcggatgaattctggaaatgatatgatgatggaccacagcgctcctgatatggttcctgttataccaccaaatggtacaatgtcatctgtctcagaaatgcctgtgagtccgacatcagtagcatccagtggtcattttcccttcactgcatcagaaataccaggaatgggcgcagatacatcagctcttgatacagcatttacatctgatgtggcaagttcagtaggactacagcttgcagcagatggtggcaatggaatttctagatcgctggatcaaattcaatggaattttagcctatctgatctaacggcagatttgccaaacttgggagatctaggagctctgggaaactatcctggttcaccatttttgccatctgattcagacattttgctagaatctcctgatcaacaggatatagtggatgacttctttgttaattctgagcccccatgctctcaatcagatgaggagaaatcttgaggtgaggcgagttgcatgtttcacattaattgttaggttagggaaaattagtattaataaatgtcatctagcttacatggcatacaggtttactgttacctaagtgtaggcagcctgatttatatcatcagggtgaagatagagaatgtcaattttccatgtagtagcaaactagcaatcttttgcattcttttaagaaatctgttatcaggatgagttgggacagtggttaggatgtaattgatttgatgcatttggattatatatgtatattgtttggatccttgtcagtccattggttggtgtgatatctgattcacattgtttcagagcaatattttatttccttgac

SEQ ID NO: 3456 - DNA, 1581 bp, Glycine max
  Clone ID: GLYMA-23APR03-CLUSTER2979_297
gaattttgaagtgtgaccaggtggtttaagtgcaacttgtgtaagtgatgttttggggcaagtgttcctgaattctaaacgctagtttagtattgagtttgaggaatgaatactggtttaagtgcatgttttatgtctcaccttgtgcctgttttaaaccatttattgactacttattttgttctccagactgtttaggtaggcggttgggaccgaggcttcttgggagggctgatgattcaggggtaaataacaggttggtcaatgctttattattttggctgtctgtgcaagatttacatacagaactacttcataccaggatcctgttgtagaggtaaattaattattacccttacatacataactatagttattgattattattttggtaaaacgtatttggccgccgttcatgttgtaatcatccttgaaggccaaaatgaaccctagccttctcatcttgtaagctttctttttttctctctctttgatttttctatgtgtttcgttttcccctctctttgctgcctctgtggttggagatacaacatgcttgcagtgttcagttagtagcttctgaattctgatattgatcacttgcagtgttcatgctgcctctgtagttttagagatatttgttattatgcataatttatttttctttaaattcatcagatctatcttttttccctcactcctatgttggaaatagaagtcctgtaaagctgtttaatctgtttgcatgctcctgattatgagatgtatactgaaattataacctagattaactatgaacgtgctgagggcgagccctggtgcagcggtaaagttgtgccttggtgacttgttggtcatgggttcgaatccggaaacagcctctttgcatatgcaagggtaaggctgcgtacaacatccctcccccataccttcgcatagcgaagagcctctgggcaatggggtacgaagttttttagtattatcatacatataattaaatacttatatgggtatggttttctattgtaattgatgtttatgattttgtaatgttatatgacatgacctcgaaagttattattatgttgtaattagagaatattattatttaatgagattgtgtgctgagatgttgtatgtattgagttgtgagctatgaactctgcaatcacacaaatataagactctttaagggcgacgagttaatgggcttcagggtgggaacttgacgagtttaatcacttgaggtgcgatgagttaaaataattttggaaatacactgagtttgagtgctcttttaagcttgtgttgatcctacatggttggagcattctcgcaaaacagagtgaccctaactgatctccctaagatttcacttagtgagagtgacctgccttagccattgtgaggcatgtctcatcgtgtacttctaggtgcccgacaaggtttttcactgaaaaatggtatcacattgcatgtaggcttgaatctagggtatctgttgcataacacttgtgtttgactttcattgagttaacaattgtggtttgatgttattttctggagtgtgtgaacttgaat

SEQ ID NO: 3457 - DNA, 1281 bp, Glycine max
  Clone ID: GLYMA-23APR03-CLUSTER298592_1
tcagctacgtaggcccccccccaaagacttcatgaaggttcagtttgaagaaaaaaaaattcgcatttcatttggaatgtaccatgtttcacagtgaagctaatcatccccatggtgagaagaacatgctacgaggatagaatatgcggacaactgaaaccgattggatcccatgaaggcatccaacgtcatggccatgaataaaaccatgtgaaacttgtaccataatttttttaatttgagttgaagtgctcacactcacggtttgcacactcatggacaaagaattctccactataccggttgccggccggagctccgacgatgtgagctttgctgatacagtttttgggttttgggattcatccaattcaagcaatgatcgcgacgacgacgacgatgacgacgacgatgatgaaaccatttgtactgcggaaaatggtaaagcattttgggaggaacaatatcaacttcttaaggcaattttgtgcaggaccagttcatatgagacaaaagttcggcaagcaacgaagggggttctaagagaactgaacatatcggagatgctttgtatttgccggagggcagaggtggctaagagttgcaggaattgcttgctgagggaagtatgtgatcgattattgaaccttggctacaattgtgccatttgcaaatctaaatggaggagttcacccgaaatcccatcaggggagcatacttatttggaagtgagaaataacgtatcaaacaccaaacgaggggcagtaaaagtggtgattgaattgaactttagagccgaattcgagatggcacgggccaatgaagagtacaacaaattaattaagcgattacccgaagtatttgttggtaaatcagacagattaagagcgttagtcaagattatgtgctcagcatctaaaaaatgcatgaaggagaaaaaaatgcacattggaccatggaggaaacacaagtacatgcaagctaagtggttcagcacgtgcgaaatgtccacaatggaatcactgcctacgataatgaactctgctcagcaaccaaaatctaaggcttcaatgctcacttttgatttattagataacattattcacgggttgcactgtactacagttgaggtcgtgtgaaaatgggatgatgaggaatcttgttaattatgttttcatgtcataatagtatatggctgtgttaaaatactgtaaaaatttagtaagttaatatgatgatcatcgtttttcttttttttcttcaaaaaaaaaaaaaaaaaag

SEQ ID NO: 3458 - DNA, 1714 bp, Glycine max
  Clone ID: GLYMA-23APR03-CLUSTER29886_1
tcagctacgtaggccccccccccccccatggtcaattaaatagttcaaactttgtatgataatctgcaatgcacaacttcatctagctccctccttaatcatgaagtcaattcacaaacctatcaaaaccaaacccctgatgaaattcattttagtctcctcttcattttgtgccatttctctgtgtgtatcagtgttactcctagccacaccaaagatagtagaggtgggttcttcaccacaatatgtgtctgatcccaccactgttgatcatcttgtgtttggaattgcatcaagtggaatttcatggcctaagaggaaggaatacagcaagatctggtggaattggaaactcaataaaacaatgagaggatgtgttttcgtagatacacttccacatgaagaaaatgccaacaacaacaatgatggttctcgtcctcctctctgtgtctctgaagacacttcacagtttctctacacttacaagcctggtggtctccgatcagcaatccgcgtggcacgtgttgtgaaagagactgtggctttgaaccattctggtgttagatggtatgtgtttggggatgatgacaccattttcttccctcagaatttggtcaaaactctttccaaatatgatcataggctttggtactacgttgggtcgtactcagagatttatgagggctcccaggtttttggttttggaatggcttttggtggaggtggttttgccatcagttcctctctagcacaagtcctagccaaggtttttgattcatgcatacaaaggtattctcatctatatggaagtgatgccagggtgtactcttgcataacagaactaggtgtgggattaacacatgaaccaggttttcatcaggttgatttgaggggagatatatttggcctattggctgcacatccattaactcccttggtgtccctacatcacccagatcacactgatcctatctttcctaacatgacaactacaaaatctctgcaacatttatttgaagccgttaatgttgattccgagaggatcctacaacaaacagtttgttatgaaaggaggttttcatggacaatttcagtgtcatggggctatggtgttcaagtgttccagaacaacatgcttttgccagatgttctaagagtggaaaaaacattcaagcaatggaaggaaggaaatgttttggcaggaatatatactttcaatacaagagaacttcacccagaccaatgtaaacgacccaccattttctatctagataaagtgtcttctggcaaagatggcatcataagcagttacaggaaatattctcaaaattgctcatacaaggaaccaatgaagaaattggaggtgatcaaagtgtttacaaataagttataccttgacaataaacagattccaagaaggcactgttgtgatgtgttgccctctaacgctggtgactcaatggaaattgcaatcagagaatgcaaatatgaagaaatgatttacatgcactagaacatatactttaaatctctttcaccttgctcaagcagcaggtatccttgatgagtgttgctacttaggtagtgtatatagaaagcaagagattgtgtaagaaaattcccaatataaatttgaactttcatatatctaagatagcaatttacagaagcataaaagaatgcttctatcgaaaaacctcttgtgtattccaaa

SEQ ID NO: 3459 - DNA, 1120 bp, Glycine max
  unsure (1)..(1120): unsure at all n locations
  Clone ID: GLYMA-23APR03-CLUSTER29952_1
ttcgaagtctcgaggccggtggggctcgtccaaagtccaaactgaagaccttcaatctcagtcgtggaatactatattgcaagataaaggtttgagtattaaggattcgattccagaggcaaatgttgtcggttctggtgtgtccatctcatgagttggccacaccctttcagtgccttcacttcccaaacacagattatagcctgaaatgttcaccgaaactgcaattgggaagcactccctcccaacgcaaccctttcaagtgcttttgcaataggaaagaacacgtcacacccttttctcagggattctcagagttgcaagaggatgatagtccatgggagagtgggaacgtgtggagcaatcttgcactctatttattcactctgcatatcccttttagctttggaggcttatccgtggttgctctatttaatggacaacctgttcttgacccacaaactgaggccttatcacttctcaccattcaaattctcgagtttggtggggctctagttttattgaagtacacagctaagccacaatacaagttttcaaatttctccagaaagaacaaattattgagcaacaggaactggtttttgtcatcagctgtgggatttgggtttcttgttctgttaattttcctaacatctctacttgctgacagattatttggctccaagcctgtgaacaaccccatactgaaggacatgctcctaaacagtgacatctcaagattgtcttgtgtgcttgcttattgcattgtcactccccttttggaagaagttgtttataggggatttcttttgacctcactttcttctaccttggagtggcagcaagctgttgccataagctcagttgtattcagtgcaattcacttctctggtgagaactttctacaattgttcatcattggatgtgttcttggatgctcctattgctggtctgggaatttgagttcctccattgctatacattccttgtacaatgctttgaccttagtaataacttatttttattaaattgtatttaaaaactttggtattaaaaaattacatgagtcttttttctctatgaataaaaattacattagtccaaaaaanaaaaaaaaaaa

SEQ ID NO: 3460 - DNA, 1520 bp, Glycine max
  unsure (1)..(1520): unsure at all n locations
  Clone ID: GLYMA-23APR03-CLUSTER3000_3
cagctacgtaggccccccccccaaatttgcaaaaaaagttttttttttctctatacagtagtactatttctttacactactacccatttctcctctttattatgagagggtagagtaaaaaaaaaaaattcgtacgaaaaattaaattgtagtaaaaaatttgtgttgagttttgggttgatggagtaaaaagtaatttcgtacgaaaaactaaaatagatttctagtccacactttctttattgtccgtgaactgaaggaaggacaattgttttaaaaagcaaatctctttaacagatgttctcactgatgtggaataaagatgaatatccttaagaaccaaatttggttcatgccggagtcattatcaacttaaaaaaagtagttgaggattgagaatgaatattgaatgtagtagattagatgtagtttttctaaaattaatggcattaaaaatcgacaaattgaattgaagagttggatagtaggatttgtagtctaaaaaggtgtcaatgagtttgagtccaaaactcaccggtttcaaaataattggtagcatgtgtttgctgtcattcatgatggagtatgattctactaagaaattattacatagttggaaattactaaacaacttttatttttatgtgacacacatgagttttattaacttgtaaattgaaaaacttgattgcatgtaaagtttagtagaaatcatagacatgtgattatcctggataatggaataataattttgccttcgccgcctacccaacactggtgtttttttttggctatagaacgttttgaaacaacaccacatgtgactgagtattttgttcgttcttttgtctaatcagcgctgcaggcactggtacaactccagtgactaccacaccaaccatgggcaccactcctacaactggaactccatcaacaagcaccggcacgggcaccggcaccggcacaggcaccactccatacagcacaacacctggagtattaggaggcattggcagtggcatgggaccttcaggatccggcatgaatgacgaaagtcacggtggcattggacttgtacacagcagtagtttcttctcgatggcgctcttctctgccttcatgatgatgctctgctggggttgagaatgaaaataaatggggcttggcctgggtatatggtgcaaaatgccgtatgtcactgtattaatgtgaatgttattttctaggtgctgaacttgggacgttagtttttggggttcttataatctttttctccaccttccactagctattgggtttttgattaattaattggaattcggttacaatttggctccaacttgtttttaatcttaagctcctactctgtacaaagaagtgcataacgctgtcaattagatggatggacctggtgacaccaatgctatgtatttttcaacataattttggtatatggggttttcaatactaagcccaaaaaaaaaaaaaaaaaaaaaaaaaaaaagcggccgtntagagga

SEQ ID NO: 3461 - DNA, 1063 bp, Glycine max
  Clone ID: GLYMA-23APR03-CLUSTER3013_4
attaaaaaaacgtgttaaactaaaagtgttgagagtgtagatagcgcaacggaacaatgtcaggacctgagtgttgctcaaactcaccagttctgaacccgaatgcaggagctggccacgttgaaaaactcgctgctctcgattcctatctctctggttcccctaattccattgccattcttctcgtctccgacgtttttggatatgaagcaccaaatttaaggaacattgcagacaaggttgcagctgctgggtattatgtggttgttcctgactttttctatggtgatccctataatcctgagaatgctagcaggcctttatctgtttggttgaaagatcatggcacggacaaaggatcagaagctgcaaaatccataattgaagctttgaaaagtaaaggtgtgacagctattggggctgctggattttgttgggggggtaaagtcgtggttgaacttgcaaaatccagactaatccaagctgatgtgctattacatccagcatttgtctctgtggatgatatcaagggtgttgatattccaacagctgtgcttggagctgagattgacaaaatgtcacctccagagcttgtaaaacagtttgaacaagtcctaactgctaaacctggggttgattgttttgttaaaatatttcctaaagtttcacacggttggactgttagatacaaccctgaagatgcagaagctgtaaaggctgcagaggaggcccatcaggacatgctaaactggtttgctaaacatcttaagtagaaatcttgttatgataagagtatgtacgtgtttagacaacaaaataaaccaacatagaacttctatgtggattattgtcattttctgcggtggaggatgtaaaacttctaatcattcagtgtaggtgtagtttacaagaaaataagtgctgtattgcttgtaggacatgcaacacgttactgaaagttttatatgctaatatatgataaataaaatattatatgctaatgattaatgaattttggattttaaggggatgataagagcaataatatttaggtagtttaatt

SEQ ID NO: 3462 - DNA, 545 bp, Glycine max
  unsure (1)..(545): unsure at all n locations
  Clone ID: GLYMA-23APR03-CLUSTER30234_2
aaaaaagggtggggagtggtgagtggtgcgtttgggaaagcgtagcaatggagggcggagaagaaggantggagatgatggtggactcaaaggacttacagcaacagagcaaagcgttggacaaactcactgaccgcgtcgaggatcgccaactggattccactcgcgtcctcgaggccatggcttccatcgctgcttctgcccaagctgatcgcaatgccatgcgtattagggagaaagnaattagctgctgttaagataaatgcagcagatgttgatataattgcaaatgaactagagttggacataaaagttgctgaaagaactttgcgggagcataaaggtgatgcagttgctgccattcggcacttgcttcactagcgaggggaagtaacaagggtgaatgctttagagaattatattatgtgtatcagcttatattgtttttcatagaaattgaacctcaaatgtatactctgacctaattcattcataaaaaaaaaaaaaaaaaaaaaaaaaaaaaagcggccgctctacaggatcca

SEQ ID NO: 3463 - DNA, 938 bp, Glycine max
  unsure (1)..(938): unsure at all n locations
  Clone ID: GLYMA-23APR03-CLUSTER3054_11
gcagtctccaaagtatcnttttgtggagtcttcacctcatcgttaatcttctctgtaaattctgcttctgnctgtctctcatcttgatcactctcagcaactgtttcgttgctaatcaatgtttcatcaggtattggttgcacggatctatcttcatgcacacctttggtttctgtctttggtatctccacatcggttggttgatttgcatctgtttttttctttgctgtaatttcacatgcatccttgttctctaaattctcttttgaacgtgtgactactattgtccatccatcgacgtcaacatcaccagttaattttgtgctgctttctgatgtgatgtgtccttccagtattgtataatttgtaatgacatttgaaatgctcaattgttctgactggtggtctacttgttcttctttcaccacaccaacattgtcctttgtttcggattgttcaggttcctcaacaacagtggaccttccaccaagttcaatttctggtgtgtcgatgttctttgcaatatccatcacttctgaatcatcatcatccagtgtttgctgctgtggtatttgatcagtatcgccgtggacagaggcagcagtgggcaatgttttcttgacttcttcctctggtaaccgtgtttttgttgcttcttcaatctgttttgcatcttcttggtcaaattttccatcatcctcaatccctagtttctcctcggcctgagaggctggaatctcttcctgtttctcagtaccatttgtgtttatttctgcagtttcctccttatcattttgtggaggcttcacctcttcattaatcttctctgtaaattctgcttctggctgtctgtcatctcgactactctcagcaactgtttcgtttccaatcaatgcttcgtcaagtgttggttgcagggatttataaccacgcgtcca

SEQ ID NO: 3464 - DNA, 2085 bp, Glycine max
  Clone ID: GLYMA-23APR03-CLUSTER3054_4
ggggaagaaaaaaggatcaatattttagcttttatttttttggagttacaaattgaattggtaccacctatttagctttaataataattagtccgcatgataacatactcaatgcagcaagctaccatcgctgtcccaaataataggcaagaaataacaatagctcaaagagatgctacatatgcctaagcaaaactgataggcatcagtgtaactgatctgagtgccttttcttcttttcagcaaggaatggtttgaacaacatcaataatccaagtgcttcaactatgttcaaggcaaagaagaccatatgggtgcctgggagaaatgaagcatccattcgcttttgtgaccaagttaatctgcataccataatcatataagaaaatattggagatcatttttaatgtatcatactcgtagtcagaaactatgtggttaaaaacctctattaatgaaaaacttgtcaactgctaatggatcgaagtgaattgcgagtaatttctaccaaaaatcttactatacagggctacaggcatgcattgataggaaatgggctatctacatagttaggatccaattgtatgggacaagacttgagtttcacattaggagtttgagattctagtgtgggatttataagcacttgaactcttcaagtacaaccgctagcttttttgatgtgattctcaattggtatcaaagccttccaccatgcctctcaattgcaaatagagtagcatgagtggtgatgccattgtagtgttcgcctagaactaaccaaagggctagtgcacagccagcccatgtgggcactaaccaaagggctagtgcacagccagcccatgtgggcattggggctgcggagcatggtgtgatgctaaggtccaattgcaatggctagcttttgtggtgtgattctctaaagatttttatggtacatctttcaatctagtcaactaaaagttaggtatgaaagaaccatatcatgaaggaacttagcatgaagtttcaggcatataagaaaaaccagtacattaatatgcaggtgttacagaaaatatcatttgaaatattaatccctcgtagagatctactacattcacattttttgaactgacaaggctaacaaaagttgaagaaatagtaagaacactcacacagcaccacctgcagcagggccaatagcattgaatagagacatgcctgtcacagcaatgccattagctacccctctttggtgttgttcctattttccaaatcaacatgttatataggctacaattcaatcaataactagtctcaaccattgtataaagacaatgaaattatccaaaaatttctgcagtgtttgctgctgtggtatttgatcagtatcgccttggacaaaggcagcagtgggcaatgctgtcttgacttcttcctctggtaactgtgcttttattgcttcttcaatcccttttgcttcttcttgattgaatttgccgtcatcctcaatccctattttctctttggcctgagatgctggaacctcttcctgtttctcagtatcattggtatttatttccgtaagcgctattatagtgttcattgggtggaatattgcaaggttaaaatacgcgtgagaggacgcaagagacagcgcatgatagtccgcgtggcacacagcaccaccacccatatgataaaaagatttgtaaaaggtacaccttgtcccttactcaactctttggcttgatccactttacaacctgggcagtccttgtagtacttcctctccaacaatggttgtttgccattctcctctcccatgtttgtgacacaactcaggtccctcgttttcaaccaaagccgaaactctatacaccgttttacatgcaccattcaaacccagaaaagattatcagaaaagatgtcaaagccactttgttctggagaaaaaacaatgagttgttgaggaaacaaaaacaaacgtacacacaaccgaacaagaaactcttggactcggtcctatcctgggtttgagaatgaaaaaatgaacacgaacaacgcaaggtccccttctgtcgtcttctcgcagccgta

SEQ ID NO: 3465 - DNA, 1654 bp, Glycine max
  unsure (1)..(1654): unsure at all n locations
  Clone ID: GLYMA-23APR03-CLUSTER3054_7
gacaaagcagagtggcaatgtgtttgcttcttcctctagaactgcggtttgttgttcttcaatcccttttgcttcttcttgatctaatntgccatcattctcaatccctagtttctcctcagcgtgagatgctggatcctcttcctgtttctcagggtcattggtgtttatttctgcagtctcctcggtatcattttgtggagtcttcacctcttcgttaaacttttctgtaagttcctcttctgtctgtctctcatcttgactactctcagcaattgtttcgtttccgatcgatgcttcatcaagtgttggttgcagggaattatcttcatgcatgccttcggtttctgtctttggtatctccacatcagtcgattgatttgcatctgtttctttctctgctgtagtttctcttgtgtccttgttctctaaattctcttctgagcgtgtgtctactattgtttgttcatcggcgttgacatcaccagttaattttgtgctgctttctgatgtggcgtgtccttccggtattgtataatttgtactgacattcgaaatgctcgattgttctgattggtggtctgcttgttcttcttccaacacgccaacgttgtccttgttatttcactactgcctaacctcaacaacagtggaccttctgtcaagttcaatttctggagtgtcgattttctttgcaatatcaatcgcttctgattcatcattgtgcagtgtttgttgctgcggtatttgatcagtatcgccttggacaaaggcagcagtgggcaatgttatcttgacttcttcctctgggaactgtggttctgttgcttctttaatccctttttcttcttcttgatataattgtccctcatcctcaatccctagtttctccttggcgtgtgatgcttgatcctcttcctgtttctcagtatcattggtgtttatttctccagtctcctcggtatcattttgtggaatcttcacctcttcatttaacttttctgtgaattcctcttcttcctctctctcatcttgactactctcaacaactatttcgtttccaatagatgtttcgtcaagtgttggttggagggatttatcttcatgtacaccttcggtttctgtctttggtatctccacatcggtcaattgatttgcatctgtttctttctctgctgtaatttcgcttgcatacttgatcatcatcctgcagtgtttgctgctgtggtatttgatcagtatcgccttggacaaaggcagcagtgggcaatgctgtcttgacttcttcctctggtaactgtgcttttattgcttcttcaatcccttttgcttcttcttgattgaatttgccgtcatcctcaatccctattttctctttggcctgagatgctggaacctcttcctgtttctcagtatcattggtatttatttctgccgtctccttggtatcattttgtggagtcttcatctctaggttaatgtacgcgtgggcggacgcgtgggctgtctcgtaggctgactcgtggcaacaactgtattggctccgatcgatgcttcctcaagtgttggttgcagggatttatcttcaaaccgaccttcgatttctgattgagttgtctccacatgagttgattggtgcggatccgttgcttcc

SEQ ID NO: 3466 - DNA, 1784 bp, Glycine max
  Clone ID: GLYMA-23APR03-CLUSTER305_2
gtagagaggaagtgagaagaagcagagggagaaagaagggtttggagtgttatggcgagaggggagagagcggagacagagagtggcgtttgccctcggtgggcacggacgcgaagaagcggagagtaacgtacttctacgagccgtgcatcggcgactactactacgggcaagggcatccgatgaagcctcaccgcattcgcatggcccacaacctcatcgttcactacggcctccaccgccgcatgcaggtcaaccgccccttccccgcggcggaggccgacatcggccgcttccacgccgacgactacgtcgacttcctctccaccgtctcgccgcaaatcctctccgagaattcccactcccactaccgtcagctcaagcgcttcaacgtcggcgaggactgccccgtcttcgacggcctcttcgacttctgccgcgcctccgccggcggctccatcggcgccgccgtccgcctcaaccgcgaagacgccgacgtcgccatcaattgggccggcggcctgcaccacgccaagaaggccgaggcctccgggttttgctatgttaacgacattgttctcggcattctagaacttctcaaagttcataggcgtgtgctgtatattgatattgatgttcaccatggagatggcgttgaggaggcattttacactactgatagggtgatgacagtgtcatttcataagtttggggattttttcccaggaactgggcacattaaagacattggggtgggtgctggaaagaattattctctaaacgtcccactcaatgatggattggatgatgagactttccgtggtctgtttcgccccatcattcaaaaagtcatggatgtttatcaaccggatgcagttgttcttcaatgtggagctgactcgttgtctggtgatcggttgggttgcttcaacttgactgtgaagggccatgcagattgccttcgtttccttagatcattcaatgtccctctaatggtcttgggtgggggaggatatacggttcgcaatgttgctcgttgttggtgttatgagactgcagtggcagtaggagtggagcctagtcctaagttgccttacaatgaatattatgaatattttggcccggactataatcttcatgttgagccatccacaatggaaaacctaaacacacccagggatctggaaaaaattcggaatacattactggaacaactttccaggcttccccatgcacccagtgcaccttttcaaacaacaccatcggtcatcgaagttccagaagaggaagaggaggacatggatgtaaggccaaaacgtcgtatatggagtggtgaagattttgattcggatcatgatgatgacatggctagttcaaagaactctgatttaactgcacaaacgagcaggtctgttgcagatgacatggacgaagataaagattaaagcaggagtgcatccctcatcttaataatgatagaacagagcaagtaccagatttagcattttacaaattagtgggaagcttattgctgtttgatctattgcatattttctctagactttttatggataaagtagggagcagtgttgcctttggcttgttgggggatggtgccctagtaatggcgggtttctactttttagaacacaccaccccccgaaaataacattgccttgcatgtttgctttggcggaccggattttaaatttcaatagaaaaatatacacaattaccattttacccttttggttattttaaaaaataaattaatttctattctt

SEQ ID NO: 3467 - DNA, 909 bp, Glycine max
  Clone ID: GLYMA-23APR03-CLUSTER3115_1
tccagtccgttccgttgcctcatctcgccctctctctctcaattgagacttactgatttcgtgttgtgttgggtaaggtaagcatgttccgttcattgctccgccgcccgttttcgacgacgtcggcgagggcgttgaagcactgcgagaaccacgagtttctctctaagaactcgttcctgggaagctgggatgcgccacgggaccccaaggaggcggaggcgaagctaacgcgtcttcgaagagaatacgcattgcaagtgaaggaggttcggaaggaatacataagagagatggaggtcatgaagattgagaaggagcgcaaggacgaggctcgcagggaagcactcagagtcgccaacgaagagcgcaagaagctcaaggctcaagccgcgcagctcagagcgcaggaacgcgacatcgaacgacaacagtttcgagaaaccctattaaaagaaagagcagagaaacttgaaaactggaagatgaaagtcaaaatgcatgaagagaagaaggctgagaagaaagagtttctgcaccgacaaagttcggcgtggattgaagaaggcaatcttgagaaaaaagttgtggaagctatggttgaaataatgcatctttgagctccttgcagttctacatttgtattggttgagggctgtgttatctagttagtagaatttggtcctatgtttgaaactgcctcataaaaatagttcttgcatttagagaatcacattcctgctttagcccatagaatactttgggtgtattcactgttttgcttttgggatcaagttttttacttggcatgagaatattaaaaaagaatgatatttgaatcaaatagctaataagtgtcaattggctttatctacaaaaaaaaaaaaaaaaaaaaaaaaaaaaaaaaaa

SEQ ID NO: 3468 - DNA, 1640 bp, Glycine max
  Clone ID: GLYMA-23APR03-CLUSTER312849_1
tcagctacgtaggcccccccccctttcaatcattttcttacttgtcacttgtcattcttcagcagaagctgagctgaggagtttgctgcaatctaacctccgttccacacacggattatgagagagtgagttaccacatttcattgaggcatgtaattcttcacttcagaaccatttgaggaacggaatggtaccttctccaatagcgaagcaaaatgcattggcaccaaagaagaagctacacagaaacagaagatgggactgtgaatatgatatatacatccacttgcaagagaagaatagagtccttaaaagtgaaactgaaaagtcaaattacttccataaccttttgcaggacttcgatgttaaggatcgaaagggtgattcggagttggtgcaattcatgaatggtttttacggcaatattgtacagtctcgattgtttcatcttgatcaaaaccctaacaacatagagaacactgctgaagaaaatggcacaaatgatgatgatgatgatgatgatgtgatggtggatccccagcatatgtatttcatggatcatgtgaggtctcatggaaaatcttatgtacttgatatccctgaggatggtgtctttgtagtgtatgagcctgatcaatcatcaattcctgagaatacagctaccatcacaacggattattcaaatcatgtttcaaatgaagaggttaatgtgtgcttagatacagagatgcatgtaaatgttgatgatagcaatcgtgttgtgaagcataggggtaggaagccaaaaggtgcaaaactctctgctgctacgaatggtaatgttaaaggaagtgatgtggcttcaaaatcaaagccaaagaaacatgtatataacttgaagggtaggcgcaggagtaagaggctgaaactgaaagccccacctgagtcacctggctcaagaacattggtgattgaagacagtgatgacgaagcagaagatctaacaaggtccatgcgaggccagattgtggaacattgttggcaagaatataaatataatgaagccaatgcaagtacacttttcagagaaaaactcatggaagaacttaaggcaccttactgtgaggaagagtacaagaggcttttacatgacattactattcaaaagccgatccaacaccatagagacctgcgtggaggtatcaaaatctatgagaaacctgatcttggaaagtcttttcttggttatcatgttgatcttgctatgaagataaaaacagttcgtgatgatcatttcagagttctgaatctcatgcgtggatttttctattggttgaaaaatttatcacatgaaggggcattcccgccatggagagatccatcgtgtttgaatgtactgccacaacaattggaaggatagttgtttgcttttaattttctgtcatgatgcaactttttatttttgttttgagtgatgcaattgatttaaactttacagaacattgcttaggaggagtgctgccacatgtgatacctcgtgggatataaaaaaaaaaaaaaaaaaggaaaaaaaaaaaaaaaaaattttatttcttttatattttcggcttacctcgccttagatcgaacatgatttatattattcccacggattattttgt

SEQ ID NO: 3469 - DNA, 1845 bp, Glycine max
  Clone ID: GLYMA-23APR03-CLUSTER3128_2
ccgggccccccctcgagtcagctacgtaggcccccccccccccaagcagtgtcagaaagcaaatattgcctattccgcaatatggcggaaaatgcttcgattgagctgaacaagtttgtgttcttttgtttgttggtgctaatacaagtggcagtttctgaaatcatttttgaagagcgttttgatgatggatggcgaggtaggtgggtgaagtcagactggaaaagcagtgaaggcaaagcaggttcattcaagcacacagctggaaaatgggccagtgatccagatgataaaggtattcaaacatccagtgatgccaaacactttgccatctctgcaaaaataccagaattcacaaacaagaacagaacattggtccttcagtattctgtaaaatttgagcaagagattgaatgtggtggaggttacatcaagcttctctctggatttgttaatcaaaagaagtttggtggggatacaccatatattttaatgtttggaccagatttatgtggcacggatacaaagaagctccatgtgatactctcctaccacggtcaaaattaccccataaagaaggacctgcaatgtgaaactgacaggttaactcacttctacacattcattctcaggccagatgccacatacagtgtcctggttgacaatagagagagagattccggaagcatgtatacagattgggatattcttcctccacgaaaaatcaaagatgtcaaggccaaaaagcctaaagactgggaagaaagagaatacattgaagaccctaatgatgtcaaacctgagggatatgattcgatcccaagagaaattcctgacccaaatgctaaagagcctgaaaactgggatgaagaggaagatgggaaatggaaaccaccaaagataccaaatccagcatacaaaggaccatggaaaagaaagaaaatcaagaaccctaactacaaagggaaatggaaaactccatggatagataatccagaatttgaagacgaccctgatctttatgtgcttaagcctatcaagtatgtgggcattgaagtttggcaggttaaaggcggttcagtttttgacaatgttttgatttgtgatgaccctgattatgcaaaacaagttgttgaggaagtgtttgccaacagggagattgaaaaggaaggttttgaagaagcagagaaagtaaggaaagccaaagaggaggaggaggctcaaagagcaagagaagaaggtgaaaagcgtagacgagagagaggtcatgatcgacgataccgggacaaatatagagacaaatatagaaggcatcgccaccatgattacgatgatcatgacgagctttgatgggataaaacgtccttctcagttctcacttatttggttgacaagaatttcgagattgttatgaattatagttacgttgatagtccatctcatgttaatttccaagggaaacattttaattttaaataaaaagtagtctatttgctgccgggacaaatatagagacaaatatagaaggcatcgccaccatgattacgatgatcatgacgagctttgatgggataaaacgtccttctcagttctcacttatttggttgacaagaatttcgagattgttatgaattatagttacgttgatagtccatctcatgttaatttccaagggaaacattttaattttaaataaaaagtagtctatttgctgcatatctttgtattattcttctcttctcttctttcagttgtcatgcatttactacagactggggaatctaaacccaaacccaaacccaatttgccattgataagaagcttgcaacaagggctatagaaaaa

SEQ ID NO: 3470 - DNA, 1909 bp, Glycine max
  Clone ID: GLYMA-23APR03-CLUSTER3142_3
tcgaacatatatatagagactccacagaaagtgctctgttgttggcattccaccgcgtgaggctctgtttctagggtttgttgggtctaaaaaatcgaagcgatttcgatggcggaagagcgattcacgggcgtggtgcagtggttcaacaatggcaagggcttcggcttcatcaagcccgacgacggcggcgaggatctcttcgttcaccagtcctccatcagatccgacggctaccgcaccctcctcgagggcgaccgcgtcgagttcgccatcgccaccggcgacaacgacaagaccaaggccgtcgacgtcaccggcgtcgacggcgcccctctccagccccgcgcagccgccggcaacaacaaccgcgccgccggctctggcttcggtttcggcgccaggcgcaatggcggaggcggcgccgcgtggctaccagtgtggcgagtttggacacctcgccagggattgcaacaggagcagtaattctggtggcggcggaggcggcagcggcggtggttgtttcaattgcggtgggttcggccacctcgcgagagattgcgtgcgcggaggcggcggcagtgtaggcattggaggtggtggcggaggcggatcttgctttaggtgtggcggatttggacacatggcgagggattgcgccaccgggaagggcaacattggcggtggaggaagcggtggaggttgttttcggtgtggggaggttggtcatttggctagggattgcggcatggaaggagggagatttggtggtggtggcggaagcggcggcggcggtggaaaaagcacttgctttaattgtgggaagccagggcattttgcgagggaatgtgttgaagcttcaggttgaggtgaagaagggtttgttacattttgcgaagggagaaaaaaggtggaatagtacatattctcttttttggcacattttaacagttattaacttatgattagtctctcttattgttattattattattcatctaatttcggggaagtttatacacatggcaaaaaatggatggttttggttttattacttgctccaacccattattctccgagcacgcttctctcgacaacttggtgctcaccgacgccgatggccagggggtactttacatgaacagggagcaactcgaggagctgagggtgaagccgctctcggcctcgtcggcgtcgaagaggactctcgttccggcgcttaacatgaggctgtggtacgcgccgcacttggaattaccaactggggttgtgttgaagggtgccactcttgttgctattaggcccagcgagctatcccccaatactgcgaagaaggaggcgtcggatttgtcgtcggtctcgacggcgtttgaggagccgtataggacggctgctacaatgcttgtcaagaggaggacttattcccttgagatgaactcattctgatgcgtttgtcaggtatatacaaagcggtccccctctcctcccgctctgccattttacattcggtttccgtcaccaaaatcagtggattttccgccatttcctccgcagtttccgtccgtgtcaccagccggtgttccccccgtcactccttcagcaatatccgctcctccccctggagcaccggctccctctcaaaagggggccgctttgaacagattcactgttgctggatctgctgctgttgtggttttcgctgcggctttgctcatgtaaaaagactaaaaagggtttcgcggagttttattttttattttttttattatcatcgtttgcgaacgaacgtgaattttagtacttcatttttgggtgcttttttcatgcagggggaggattcattctttccattattttgtctattgtatttatgatgatgatgaatgatactacatttttatgatttttc

SEQ ID NO: 3471 - DNA, 1296 bp, Glycine max
  Clone ID: GLYMA-23APR03-CLUSTER31506_1
tcgagtcagctacgtaggcccccccccccatctccttttttactgttacacaatctcttagttaagagacccttggccttgtgggactgacaagcgagtaacaagagggagagagtagagtgcataaattgaattgcaagcacgagcaagtacttggttttggcttggggaaacgaaggaagaatggcgcagcaacttggagttccatttaagttatcatgcaaaccctctcacattcacgctcttaaaccctttcactctctccctccccttcgcaccttcaccaccaaaccttctcttaatgccaaatcccatcatcatcatcatcctttattaacgcttcttcgttcccaccgcactctcgcaccctgctgcaactccaacaaatcagatataatgtcacaattggagcttgggaaaccggagcaaaaggggaaaccggagaagcgagtaaatggtatattctggatcattctcctcaacattgccatattcgtcgctgaccacttttttcgggttaatgggatcaaggctttatacttgtaccacaattggccttcttggtaccagtttgtcacagctacattttgtcatgctaattggaagcatctttctagcaaccttttcttcttgtacatttttggaaagcttgttgaagaagaggaagggaactttgctttgtggctttcttacattcttactggtgtaggagccaaccttgtttcatggttggttttaccaagaaatacggtttctgttggagcttctggtgctgttttcgggttattttctatcagtgtccttgtaaagatgtcctgggattggaggaagatccttgaagtgcttatattgggtcagtttgttatagagaaggtcatggaagcagcccaagcttcaacatcattgtcaggccgaggaggctacgcattgcaaagtgtaaatcacattgcacatctttctggtgctcttgttggtgtgcttttggtttggctccttagcaaagttccttcagatccttctgaccaataatccacgcagctctacaaaacaggccaaactccttagcaaagttccttcagacccttcacaaatgtcatttgttttgctatttctgttactgttgttgatactaagcgtcaaaataacagcaatatgtcaatggtaggggtattgtcttgttaagaacttactatataggctttgttgtcataaaaacctttgtatcgagaaggattctctttaaacccaaaagtttattgaatgtctatggaattgtacaaaaaaaaaaaaaaaaaa

SEQ ID NO: 3472 - DNA, 1749 bp, Glycine max
  Clone ID: GLYMA-23APR03-CLUSTER3151_1
tcgcgtcagctacgtaggccccccccccccaattaaaccctagtttagagaaatgacattgcaacttatgattgcagccataagaataagaaccaacactgcaaccttaaaccccaaatgttcctcctcacacgccttacccgccaaaacccctcacgcgccacgctcctcacgcgccacctctcctcagccgcgtccaaactccactccaattacaccttcaaaccaccgtcttctctccctccccagccccaatgctccaatttccctccctccaagcccaaccagaaaaagcccaagcccaggtatcggcccccctcctccctcgaccaggccggccgcaagcccgtccggtccaacgacctgcccttcgacttccggttcagctacacggagagcagtgccaaggtgcgacccatcgggctcagggagcccaagtactcccccttcggaccgggccgggtcgaccgcaagtggaccggagtgtgcgcccccgcggtggaccccacggtggagagcctggagggtccggaggaccctaagttggaggaacagaggaagaagaagagagagatgattcaaggaaaaccgctttctagtgaagagagaaagacattggtttcgcaatttgagagaagcaaaactaatagacatgtcaatctcgggagggatggtctaactcacaacatgctgaatgttattcataatcattggaaatttgctgaagcagttagaatcaaatgcatgggtgttccaactatggacatgaataatatttgtacccagcttgaggacaaaacatttgggaaggtcattttcagacatgggggtacacttatattatacagaggcagaaattataatccgaaaaagaggcctgtaattcctgtcatgttgtggaagccccatgaacctgtatatcccagactgattaagacaacaattgatggcttaagtattaaggaaacaaaagaaatgcggaagagaggactatctgttcctgctttaacaaaacttgccaaaaatggttattatgcttttttggtacccatggtcagagatgctttcctctcctgcgaattggttcggatagactgcgagggacttgagaggaaagattacaagaaaataggctgcaaactcagggacatggtcccctgtattctggtgacttttgagaatgaacaaattgtggtttggagggggaaggattataagcacccgaaggatggatactttctcaaagatcgagaatcgtttgacgacgatgatgacttttgtgtgggaaaagagcaacaggctatgtaacacaccacaatcagatgtgataattaagtggaatctttgtgcaaattgctgccatgaatcagaagttcccttgagattggattgttgtgttctgtgtaaatgcagtcaatgatgaaatttgagatatttggatataacaagatatatctacactgttctttttccatgactcattgtaggcctttaaagttgtaaggaaaaatctgaatatataggatgagtttctaaccatatactggctatttaaactgcagagcttcagatattgggggtttggatttttcatattctctatgatctacaaatggtacacacagctgtttgttaggaatcacagattggaggtgtttatttagagtttttgcccattgtttttgtcacaaattcacaacagtcaattaggaatcaattcatggttttgccaaaaaaaaaaaaaaaaaa

SEQ ID NO: 3473 - DNA, 1084 bp, Glycine max
  unsure (1)..(1084): unsure at all n locations
  Clone ID: GLYMA-23APR03-CLUSTER316520_1
tcgagtagccgcgtgccccgaaaacttaaaccccaacattcaaatttttaacgttcacatgcaagcttttcagaactgcaaaccctaagcctacccatctttttcagactgaacgctgcaacccctactgcaagcctacccatctttttcagactgaacactgcaaccccacatgctagaacgtgttcgcgccaatggcggggctgcccagatgcctagtcagcatgtcccgccacgccagtttgaatggcggtatggaccctgtcccgctgctgtcaatggcggcatccatggttttgcaccctccgctgtttcacagcttttatggattttgtggtagtggattcagacaacggaaatgaagcagaacatagctgtctagaagagagtacaagtatatttgaaggagttgaagttcaagaaccatatgtgggcatggaatttgattctgaagaagatgctagggagttttatgttgattatgccagacggataggatttgttgtacgataatgcaacggcgacgttttggaattgatgggaggactcttgctcgccgacttggatgtaacaaacaaggattctcaccaaataacatgggaatattaggaccagaaaaaaagctaagacctagcgcccgagaaggttgcaaggcaacaattttggtgaagttggaaaaatcaggaaaatgggttgtcacaagatttgtaaaggatcacaaccatcctctaattgctacagctaatgggttcagcacagcggtgagttttctgcttgtttaaataattctgcacagttcactgtgcagtatgtataaacttatttcatacaagttgtaagtgataatagccatttcttttttactttttgggatctgctttgccggtgagtctgtgaattgtgcatataagacctgtggttttatctgctgataacattaatatattttgttaatatctgtcacaaaaaaaaaaaaaaaaagctgatcgacacggtccgctgccgaggcgccgccggaggcccattcggcccaatagggaggccggtttacccgcggtcccctggcccgccgtttttaaaccgn

SEQ ID NO: 3474 - DNA, 1375 bp, Glycine max
  Clone ID: GLYMA-23APR03-CLUSTER316532_1
caattgggtaccgggccccccctcgagtcagctatataggccccccccccattctcagtaccacccgcaccttgtagtgaaggtgagaatttttcaattaagttggagggaaaattgaagaaaaccaatgtttcttcagttgattacagtgaagattcaaaatctatggcaatcaatgatgggtcgtgccagatggcaagcctttgcaccaaggtgcaggattgtcctgaacaagcttgcttgggttctgttcttgcaaaagaacatgataaacgaattctgaacaagggtggtttgagtgtagaaaaatttaaacacaatattgttggccagagttcaaaatctttgattgttgatgagatggacattggtgtagatggggatgatggagttgttgaacgtaaccaccctacttcctcaagcttgacagactcatctaatggctctggctcaatgatgcatagcagttcatcaggctctcggagctttgagaaccaggatcagtccaaagtcaaatgaaccatcattgattgtgggtcgaaactaattgtcaaagctacctatagagaagacaccattcgtttcaagtttgatccatctgaaggttgtttcagactatatgaagaagttgcagcaagattcaaactacaaaatgggttatttcagctcaaatatctagatgatgaagaggaatgggtgatgttggtgaatgatgctgatttgcaagagtgtatagaaatattggatgatattggcacacgtagcgtcaggtttcttgttcgtgatatgccttccgttttaagcagttctggcagtagcaatagctacttgggaggcagctcatagcatatgggatgtggtggacgacttcaatgtgaaaattcgagtcttgctttgacaagttgatgttaatttttcacaatcttctaaaggttctgcatctggaagagtttgaatcttatccacagccacctatgccaagtgcaaagcttcttcatttctttctcaactttgtgcattgccaaattataatttctgagtagctttttggaagatagaaagacgcggttcatatgggagtacttgcatgttatgttaaatatatagttttgtatatattgaacacagcggcagcatagaaatttatagtagtagtagtcagttctgtgatgctgtaatcgcactttgtaattgtatagatagatatagatagatagattgatttcccacaagataatatagctaaaatatgattataaaaaaaaaaaaaaaaaaaaaaaaaaaaaaaaaaaaaaaaaaaaaaaaaaaaaaaggaaaaaaaaaaaaaaaaaggatagcgcggcggggggccccctttaaatggggggggaagggg

SEQ ID NO: 3475 - DNA, 1803 bp, Glycine max
  Clone ID: GLYMA-23APR03-CLUSTER3169_2
gaaaagttcatctctccctctctctcacacatcccagccatgagcctcttcggtataggcagaaaccagagaacattccgcccgaaaaaaagtactccttctggaagtaagggagctcaacttagaaaacatattgatgccacgttgggtagtggaaatctgagggaagcagtaaagctacctcctggggaggatttaaatgagtggctagctgtcaacactgttgatttcttcaaccaggtgaatctgctttatggtacccttacagagttctgtactcctgagaattgtcggacgatgtccgcaggacccaagtatggcatatttaactgactgatttccttgtttacatttcctttggaggggaaaagcatttgtatgcttttagaaattcagtcggatgatattctttcaaatatctttgcagttgaattgaatgagaaaatcactcagctccttgaaacatgtgggttgtgtatctattatcttgagttaacaggcaactaaatgactataaattttaaaacaatggtttgtgttgttaaagcttatatcactttgtcataaattgttaactccttgtgagtatcccctttggatgtcagttttttgctgttttgatggttgctatttattccatgctgtatgcttttgagaactgttgataattgggaacctaggtgcataaaaatttacaacaattagttatgtcttcatgtcttgctatatttgttttgcttaaaatttgtgcctgtttaaatctgtgcactgtgtattaacacactatttttggttaaagaaaaagatttcttttgcagaaagatgttaaagttgtcatttcttttcttcaaaaccattgttgtttggatattaatggcagttgctcattttcttgaatctagacaatatttagtaacgagttacttttgcactccctttttggatccatcttgcaagtgtgttttatataatcattcctttaatgccaatgagaattctagatccatctgtgctaaatatttatacattcgtagctcttatgttgtcttgtctttttgcacgaaaactttaggtatgaatatagatgggcagatggtgtacaaattaagaaacctattgaggtttctgctccaaaatatgtagaatacctaatggactggattgaagcacagcttgatgatgaatccatattcccacagaagcttggttcaccatttcctcccaactttaaggaagttgtgaagacaatattcaagcggttgttccgtgtatatgctcacatataccattctcactttcagaaaattgtgagcctcaaagaagaggcgcacttaaacacttgcttcaagcattttatactcttcacctgtgagttcgggctgattgacaaaaaggagcttgcgccccttcaagagcttatagaaaccattatcccatattaaatgaattgggacctaccttctgtgaaaaatctcatcctaggaagcagcataactgatgtattactactctaaataaaaactgctttttagtactatttgacttcagaaagccgccttgtatttattgtgtggatgtgcttgggaacaacaggatctaagttatccttctaaatagcttacacaaagcatcatatatatgcaatggggcatcataggttaaaaaaaagttaatttgtaatggttcatatatgccaaatgttatccttctacgctggaaggttgttgctgaaacaatgttcattattaataattaacgtgtgttgtattatgcggatttccatccgattgttcatacattttt

SEQ ID NO: 3476 - DNA, 600 bp, Glycine max
  Clone ID: GLYMA-23APR03-CLUSTER318737_1
aaattaaaccatatatatcatacatatagctttgttataggtctagataatacactacaacactcaaatgggaaaactgaggtatgatccaaattgctaccaccacaaggaagccaataccttaaagaccatgcaaaaaaatccaaagaaaacagtgaaaataacctacatatcgaatcctgtgttggtgagggcctgcgatgcttctgagttccgatcggtggttcaacaactcactggcaaggacaccaacaagaaggttgaaaccccgcgtaaggagtataattctactttgatgcaacaaagggtcatgcaacgtgaagatgcaggaaacgggttgtatcattacaatggatcaatgatgacttctctggagttggatgaagattactactggaaagaacttgcacgttctcttttaccgtcacccagctgtgtagtacttgtatgatatattaattagtatttgtgcaagtaataatcaacaaattgttgctactgcttccactggcagagctagcaaggtccatgagggaaccctatttccctccttattatataaaacttactatttcctatgcctcaaaaaaaaaaaaaaaa

SEQ ID NO: 3477 - DNA, 1348 bp, Glycine max
  unsure (1)..(1348): unsure at all n locations
  Clone ID: GLYMA-23APR03-CLUSTER31928_1
actttttctatttgcatctatataactccgtgaactttacagcatttctatataactccttgaccttcgctgcttttctaattaactcagttagactttgttccaagagaaagaccaatcaaagcatcatgactaaagttgtgtgtgcacttcttcttatttttgtcatggcttttgtgactcaagttgcttatggtggcggcgaaggatcacttacgccccaagaatgtccgggggcttgcgattatcgttgttcaaaggctgatcggactaagaaggcgtgcctgaacttctgtaacatgtgctgtgcgaaatgtctgtgcgttccatcaggaacctatggtcacaaggaagaatgtccatgttataacaattggaaaacaaagagaggaactcccaagtgcccctaattcaacttcattattgctattcatcaataaaatttaatttgtattcttgtggcatgctatggtatatgccctccgtaaataaatgtggctgtggttatcttaaaaaaaaaacatgttccatcgggaagcctatctatataactccttgaccatcgcacagtttctaattaactcagttagactttgttccaagagaaagaccaatcaaagcatcatgactaaagttgtgtgtgcacttcttcttatttttgtcatggcttttgtgactcaagttgcttatggtggcggcgaaggatcacttacgccccaagaatgtccgggggcttgcgattatcgttgttcaaaggctgatcggactaagaaggcgtgcctgaacttctgtaacatgtgctgtgcgaaatgtctgtgcgttccatcaggaacctatggtcacaaggaagaatgtccatgttataacaattggaaaacaaagagaggaacacccaagtgcccctaattcaacttcattattgatattcatcaataaaatgtgtattcttgtggcgtgctatggtatatgcatgccctccgtaaataaatgtgtctgcgcttatcttattttcaaaaaaaaaaaaaaaaaaataaaaccaccaccacccggatcgctccacgccctcccccaacacgcgcgcccgccacttgatctctcgccctccctctctcctaccccccatcctccttctcacagatgccatacgtcgcctatcaccctctcatccgtcccgcggacccccctattaccgcgcccccacccttccctgccctccccttcgacactctcacctacccccccccgcctcccacgttcttcccctatctcccaccccctccctccgtctttccccgctcaccctcccctcttcccatctcttccactcctcctcctctcccgcctcgcn

SEQ ID NO: 3478 - DNA, 1135 bp, Glycine max
  unsure (1)..(1135): unsure at all n locations
  Clone ID: GLYMA-23APR03-CLUSTER3200_4
cgcgagcganagtgacattcataaataaatttaggtgaaacggacaaaatggacaacacatttgcgaaatggacaaatcataagccaattagagacggaaagaagtacacatcaattagaccgtgggggatagaaatagagtgtggttggccatcgactatagcataaactgaggacattagcgcacctcgacgaaaaaaggtagtaatattgatcaaagcaccattaatataataataccatttagggatacatagatgatagatccaatggtctaataaagtagaacaagcatacaagatgaattatggatcaggggcgatgggggcagaaggtgaggaaatagttagctttggtgcaagtagcaatgctggtggggtcatcataggcataggagtaggccttggggcatgcggtcttgaagatcttggaatagacggtgggcttgcaggcctgtgggcttccataggagccggtgcagcagtacttgggggagttgaaagcggagcaagcgctcttgcaggcaaccacgcgcttgttgtcgcgtgagcgaacttggaggcccacggggcacatggtgttcaggtcgctcacgcagcccgcgtagctgcattttccggatcccttgaatggggtgatggagatgggcaggttgtagccgtccaccaggctcacgtcgtagaagtcctgctcgttgcccagggtcaactccgccagggtcgccggtgggcttcccccgatgccgttgcagaagagggacccgccgcagtcaccggtggcgcagcgcccgcgcccgccgacgtcgaaggcgcagccgtggcggccccagaagcgcccggaccagagggcggggagctggagggagtaggcccggtttggggcgagcttgaagcctccgcgggccagaacgggctttcctgcgctgggctggatcccgggccacactgggtgctggcacttgttgtagaaaatcactgaggatgatgctgaaaccttgagcactgtgagtgtgagaaagaagatggtggtgagaaagggtctgagactgagcagcattgagcccatcatggccatggtacaacaatgctagctagggctgggttattttatagacgcaaaaggggagggatagaat

SEQ ID NO: 3479 - DNA, 607 bp, Glycine max
  Clone ID: GLYMA-23APR03-CLUSTER3223_15
gagacactgacacagatctgtcttcctggaactmaatatggctgacttgttggaatggtcaaagcamgataagmaacgaatgcttcatgtcgtctaccgtgttggtgaccttgatcgmaccatcaaattttacacagaatgtttaggaatgaagcttttgaggcaaagagatatcccagaggagaaatatgctaatgcttttcttggatttggccctgaagaatcccattttgttgttgaattaacatataattatggggttacctcgtatgacattggcgatggctttggacattttgcaattgcaactcaggacatttataaattggttgagcacatcagggccaagggtggaaacatcacaagggaacctggtccagttcaaggtggaactactgttatcgcctttgttaaggatcctgatggttatacttttggacttatccaaagacctacagtccatgacccattttgtcaagtaatgcttcgtgttggtgatttagagcgctcaattaagttttatgaaaaggctttgggcatgaargtggtgaggaargttgataagcctgagtacaagtacactatagctatgctcgggtatggagag

SEQ ID NO: 3480 - DNA, 471 bp, Glycine max
  unsure (1)..(471): unsure at all n locations
  Clone ID: GLYMA-23APR03-CLUSTER322568_1
gcccccccccngataagagaagcatcttcttcttcgaccagaaaacccacacatatgtataggtcccccaccccaccttcatccttatcctaatcaataatcatggaggagaatccatgggggagttggtctgccgatatggaagtggatgacgaggttgtgaatgaaagtttgtgccacacgaacctttttgatgaagagttcctaagagatattctgcaacggccacaagagggtgctccaaatcttaacaactcatccatcatgtcgtctcttgtgctcaagacattaagccaactaccttatttccaaccacttacatactctctttcgacaattccgctgcattgttaccaacagaaactgatcgtgatttttcttcttccaaattgccctcatcaaattcaagggccaaccatggaatcaagaagcctggaagcgcttcggagtcactgaatcacatcatgtcag

SEQ ID NO: 3481 - DNA, 815 bp, Glycine max
  Clone ID: GLYMA-23APR03-CLUSTER322591_1
acaagctaaaccttatttctctctacccccaacaccaaaaaactcacacaaacacactgttcaactttctaacctaaaacaaaatgagaaccatccccacaacaacctcaactacaatagcacccacagccaccacgtcatcattaacaacaagtccttctcagcactcctccacatggcactctccggttccgtacctgtttggaggactggctgcgatgctcggtctcatagcctttgcgcttttgatcttagcctgctcctactggaaactttctggtcagttacagaacgaggaaaacgccgaaagggacttggaaagtgttgttggtggtgagaaacagggtgactctgcaaacaaggaatcagttacggtgtacgaggagaagattctcgtcattatggccggagatgagaaacccacattcttggccaccccgaaagcctcctcctttgtccctcatggtgtccccaaccattttgaggaaaacctcgaaaaccatgtgacttctgagaaatcagagaaaaaccatgttcaacaacctacgtctccgcaacaacagagccagccacgacaataagatgtcatttggtttgtaattctatgattctatatcgtaggatagatttgagaaacaggggagcatctttctctgtttccaagcattacctttccctcttctttcttcttcttttccttggttttcgatcttgttggtttgtattctattggtgttcggaaattgtaaatttaaacgagatgaattagaactgagatgaggggattgtgtttcaatccaaaaaaaaaaaaaaaa

SEQ ID NO: 3482 - DNA, 1542 bp, Glycine max
  unsure (1)..(1542): unsure at all n locations
  Clone ID: GLYMA-23APR03-CLUSTER3228_1
gagagtctgccaggtaggccccagccgagaagagaaaaagaagaggaaagttaaagagataaagagagagagagagagagagagggaaggggatgagagagggaggatgaggggcggtgaggagcgatcgacagggattcgaaagaagggaagcggagtgagacaatggctggtcctggacggcagaggagagacggaggtggtggaggccgggaagcacgccatcatgaggaggacgggactccccgcgcgtgacctgcgtatattggaccctctcttgtcatacccttctacccttctgggtcgtgagagggccatcgtcatcaacttggagcacatcaaggccatcatcaccgcccacgaggtcctcctcctcaactctcgcgacccctccgtcacccccttccttcaggagctccaggccaggatcctccgccaccaccaccagactctggccgatgccaaccccaaccctgacgacgccatcaagattctccccttcgagttcgtagcccttgaggcctgtctggaggccgcttgtagcgtcttggaaaacgaggctaagactttggagcaggaggctcatccggccttggacaagctcacctccaagatcagtactctcaatttggaacgcgttcgtcaaattaagagccgattagtcgccatcactggccgtgttcagaaggtcagggacgaattggagcacctgctcgacgacgacgatgatatggctgagatgtatctctctgaaaagctagccgaacaagatgacttggagaaggcggaggatacctcttctgccgacgatgttgatgatcacattgacaggaccgctcctgaaatatcgttggacaatgttgttggtagggacagccatggaactcgcgatagcgccacctacagcgccgtcaccaagcaacttgatgtcgaggagcttgagatgctcttggaggcttactttgtgcagattgatggcaccttgaacaagctctctacgctgagggagtacgttgatgacacagaggattacatcaacatcatgctggatgacaaacagaaccatctcctccaaatgggagtcatgttgaccacagcaactctggtagtgagtgcctttgttgttgtggccggtatttttggcatgaatattcacattgagctatttgatgaccagaaagctgggatgacacaattcctctggactgttggtggtagcactgcagggaccatattcttgtatgtggttgccattgcctggtgtaagcacaaacgcttgctagagtgaccaggcgtcaaatagtgtttcataaacaaatgtaatttaacttgaaaatcaccttttgttcatgtgctataaattttagtagcagacagtgcagtatcttgttgcttcttgtactcgtatgatccttcagcttcaacgatgttgctcatcttgtacattattccgtgcttaaaaacattaattttatggacacttgtctttccaataacagttttgttatttgcacaaaaaaatccatagtattcagnncctcc

SEQ ID NO: 3483 - DNA, 954 bp, Glycine max
  Clone ID: GLYMA-23APR03-CLUSTER3236_1
attcaactctgcttctctctctctcttctctctcttcatctaaattccccccgaaaaatcgaatttttacttttagggttttgaaattcctgctactgcctatcctgatctgcgattagtgattgggtggcggcccccatttccgattaagagtgatgtgctaagacatggcacttaaagttcctgctcgtaaggctgccgagattgcaattgggtccatcggccgtggttatgatatatcacttgatataaggcttaagtattgtaaaggagattccataaattcacgtttgtaaattgagatagctgaaaagcagaggcagagagagagggagcttgaagagaaagagaaacaaaggagagaagcattgttgggtagagctgctgctgaaccagctcctcctgcccgtccattggaatcgggatctgctgctcctgcggcagctgccgccgccgccgctgctccaacacctgggaaatacgtacctaagttcaggcgagagagaaccgaaagcgcaggagctgcgcctcctccagaaacagatcgctggaacagtagcagcaggccagatggtgacaggtggcgaagtgatgatcggagaaccgcatttggttctggtggaggttcaaggtcatcttctacttggtcatcttccaggaatgcccgttgaacattttgtggcctgatttattgctggcgactttttgggagttctctttgtaccgagttcttaaatttattatctttttaatacttacgaagtcctctattggattggggagcctgccaacaaaattttctatttatgattgagtggattgcatatggtattcgaagtttcgattagacgagtacttccgaacaatttttctattttttgataatgttgagccttcgtagaaaatgaagggtaaccgtatactttattttctacgaaactttttgctgcctct

SEQ ID NO: 3484 - DNA, 650 bp, Glycine max
  Clone ID: GLYMA-23APR03-CLUSTER3237_3
aaattccttaataagtgataaatgtttccaagattcttaaattggacaatatggttcataaaaaagagaacaaaaacctgcaatgtaaactaaagttctgcgtaatgatgtgcgacaaacccaggagagcacacaaacgtgctctaaataatgttcagtaattagttatagatgcatagcaattattcctagcaacaacaaaatcttgtttcaagatgaacatcatatcatagaatgtccctgcaatcccatctatgcttcctgatcttcaagtagtctgcttttggcccgaaaattaattgtagaaagaacatcaaggaatcctagagatgctagctaccttcgggaatccaagcgctcgtgcggcttgaaattgaaagcatggaattcatgagcgcagaagcagtggccgtgtggtacggcatcatcgattcaacacacgaactcaattccacggggaacctgagagtggattgggactgcgagagaggcttattggacgcgatacggaacggagaacgaaccggtttggattccgatgcgacgcgaaacgctgaccggctggcggagcatgatcggaatatcgatctggcggcggcggatgccattttcgcgatcggaatcgtttgggatcggcgtagggttttgct

SEQ ID NO: 3485 - DNA, 1237 bp, Glycine max
  unsure (1)..(1237): unsure at all n locations
  Clone ID: GLYMA-23APR03-CLUSTER32391_1
gattaattnnnnncccaccgttttgatcattcacgtggggagcttcctgggtagctcctacggtactcactgggtcgcattggtgcttacacggaaggtcaaaggtggaaatttatgtagtatttgattgacgttcctgacgttttgaatttactttttttttatatttaaagaaacttggaccatatattcaaggggtaattaaacagataatacaagcttggaccatgtgctacatacacctgagaattttcaattaaaccgtgtatctgcaccacgtgcattcctagttaattagcacaagagaggctggaccttcttcctcttcaagaattttgaagggttctgatcaggtgggtgcatgaatttgcaattaggacaagctggggaagacttgcacaacattaccaacatgtgacacctcatacaaaccgttgtaatcatctctttgtgatcatctccctctgatgatagccaccatggtggagatcgagttaaaacacacgaatcatcctttttacacttgttgctcgattcaatcatcaaatcacgttctccaaaagcactccctgtggaaccatgattctttttctcatctgtgtcataaccatcttcctttttcttcagtgacagctcaaggtctagactcatttggccaagtgatggcactttagggtcagagtttctctcaaagtcctgtgttttcatcatagtcatccctgtgttgcacaagtgtatctgccttgactgaatagtgaggtattgttgcaatttatgtgaaggcaatggtgtctcaagatgtagctctatatcaaagatggattttctcttctcatctgttggatcatgcatgaagaattcttcagtgagtgtctccccttcccactttctcttctttggtggagcttcaaattctggtggaacttctgttattgggatctctgccaaagctttgtgaaaggaaaccatagctttcaattattaagagagtgagccagatgtgtaatgagtttgaggtggttatatagtaggtggcagaactcgggaggtggaagtgtcaaaattggaggtctttaccaacttgctttccaacttggctaccctttcatagtacacattttcacatctcattcttgcgtaaggaaaaatgggttcatgcacttttttctgcttctaaagtactcttgcgaaaagttgggggtgaagatcccccttctgtcgtcttctcgcagccgta

SEQ ID NO: 3486 - DNA, 3788 bp, Glycine max
  Clone ID: GLYMA-23APR03-CLUSTER32513_1
atagattagtctttgactgaagccgaggataccttggtcaaaaaacaccctcaaacctcgtgttaaaccctaatttctgtccgttgcattagctaaggagctttgccgcatgggttgttaagttttggcctgtggccattgcaatatgcagagcgagttctccgatgcgaagaagcgcagagaggaggacaaccctcaaacactcgtttccctcgtacacgacagtgagaagaagaagagaaagagaaagagaaagaagaaaatcgaggaatcaaacgagcagccccaggttgaggtatgccctaaatccttagtagactcggttatcccaattgttgcacaaaaggaaaatgctgaaaccaccacagagaattctaacccaacccccaagaaaaagaagaagaagaagaataagaatgtgcaagatgcagagcaacttctaactagtgatccttcatttgcgattggttcggtacctgatgtttccaaatgaagttgatcactgcaagatgttaggaatgggaatcgaggtttatgccctaagcccttgttggacacaccaatcccaattgttccacaagagggaaatgctaaaacatctacacagaaccctaacccaatcccccagaaaaagaagaagaagaagaatgtgcaaggtgcagagcaacatctgacgtgtgatccttcaatcctaatagacgtggaacctgatgttacgaaggaagtaggggcacaacaaatttcagaaacagctgaaacaactacacatgaccctgttccaacccccaagaaaaacaagaataaggatgtgcaagtcgcacaacagcaacttcacacatgcgacccttcaatcccgacaagtgccgaacctgatgttatgaaggaagaagcaacaaaacaaggtgatgctgatgggaatgagggtttatgccctaaacccttactggacaaaccaatcccaatttttccacaagaagaaaatgctgaaacatctaggcagaaccctaatccaaccccccggaaaaagaagaagaagaatgttgaaggtgcagagcaagttcagacatgtgatccttcaatcctgactggtgtggaacctgatgttatgaaggaagaaggggcacaacaaggttcagacctgccagctgaaacaactagacagatccatgccccaacccccaagaaaaacaagaagaaggatgtgcaaggtgcacaacagcaacttcagacatgcgacccttcaatcatgataggtgtggaacccaatgttatgaaggaagaaggagcacaacaaggtgaagctaatgaaactgcggtctttggaataaatgaagaatgccctggacctgattcaatgcccctgaaagacactctccggaaaaagaagaatgtgcttaagtcccagggggctgaacctgaaccaaaatcaaaggagtccaataatacacatcaccctcaacaatgctactcagactcagaactgaaaatgaagatgaaaaaaggggcagaagccaatgctgagaactctgcagtgtgccctaaacctaaattggcactcccatctgacatagcaatccctaataattcacaagtgaacaaaagggcagaaccaactgaagctaaggttgaggatcaggcatgttctaaacctaaattagcatccccaatagacctgccagctccaacaaactcagaaaagaaaaaagaggtagaacctgtccaaaaccctgatgcacgtgctcaaccccctcaacctcaaccttgctatgcgccatgtgcagagcctccgggtgatccagcaactccaattgatcagagaagaagaaaacaaaaaagcaagagagaaaaagaaacaataataatatgctcagaagaggtggagaaccaagggagcccattgcatatggacataaccctcaaccaggccccagaccaggtccaacaagaccaagcaaccccaataagcctacaaccagcatccttgatggaccaaacaatcctggtggatccagcaaccccaatagacctagaactgacgatgaagaagataaagaagaagcaaaggaagaagacaacttctacagagctgccagaaatctcaattcagacatctacatgccttatagaagcatccccaatagacccagcaattccaatggacccttgccttgcaatctcaacaggccctgaacaggagatgtcaaagaaaaagaagaaaaggaagagtaagcttgaaagtgaagcggcagaactcaatgaacactacaagctgcctgaagctgctccgcctgaggcccctgttcagaaatctatataccatacagatgcaccctcaatcgacccagtgggcccatctccccctgttgacacagaaaccccaatagaccaaggtcagcagatgaccaagaaaaagaggaagaagaaaaagaggattgtgatcataattgaagggacagaaaccaatgaacacggtgtcaagccacctgaaaccctagttcaaaaatttgcatatcctacagtaacaacctcaatagacccaacaatcccagtcccagctcccccaatagatcaaggtcagaagatgaggaagaaaatgagaaagagaagtgcccttataagcaaaggagcagaacctgatgaacatgatgacaagccacctggaaccccagttcaaagatctatacatcctatagcagaaccctcaatagacccaacaattccagcaagccaaactcctccagtagacccagcaaccccagtagaccctgaaccgatgaccaagaaaaagaggaagaagaaaaggaacagtgcaaaaaatgaagggttagaatctgagaaacacaatgctgatcgaattgcagaaaccccagttcaaaaaactgaaggatccacaactgaaaattctatgggcagatgcaatgttgagccagctggtaaaaccctggttcagattactgacactctcagagtgactaaatccccctttaaacatcatggtgaaagttccttgagatgccgggcatgccgacagcctggtcatagattccaacaatgccagcggctgaaatgtctttccatggatgaggaagtttgcttcttttgtggggaaattggacattcccttggaaaatgcgatgtgtctcaagcagggggaggaaggtttgctaagtgcttactctgttatggacatggacacttcagctataactgtcctcaaaatggtcatggaattgatccaaaggtgcttgcagtcaatggggctatcaatagaacagcagtggaagctcgaagagagctcttgccgaggtttaatatgtgagcagggatggtctttcggatcactccaagtcaatttacacaagtactcgtgctcatgtatatagttctggatctcggttccttagcggcctaagttttgatgattttatatcatgtctggtagcatggtgcccaattttttttttttttttatttcaagttctcttatgtaacataaacggtaatattatttcagaccttgttgggtttttgaatccattttgtatttcttttctacgtggggactagttgggataatgcctcagtctactccttgcagaagttagaattaagatagtggagtagtaagttcaacacgggaattggcccccaaatttctgaattcagttgatgataatagttgagacaatttggtcgcagtccctcggaatatagaatggattgcctgagtaatgatgtatgaactttatttacgattttttttatcattatttttaaggtaggcggtc

SEQ ID NO: 3487 - DNA, 820 bp, Glycine max
  Clone ID: GLYMA-23APR03-CLUSTER3252_2
ggtggaccgcattcactttctcctacctcgtccttctaacccaacctcaacctgtttctccgagaatcacatccaacgcttctgtcatggaggaagttaacgttgtggaaactaaggatggaactgtctcagtagctgctgcgtttgctggtcatcaggaagccgtgcaggatagagaccacaaatttttaagaaaagctgttgaagaagcatataaaggggtagattgcaaagatggaggcccttttggtgctgttatagttcataatgatgaaatagttgctagttgtcacaacatggttctgtgtaacacagacccaactgctcatgctgaggtgacagcaataagagaggcttgtaagaagcttaagcagatagaacttgcagattgtgaaatatatgcttcttgtgaaccttgccccatgtgctttggtgcaatccacctttctcgaataaagaggttggtttatggagcgaaggctgaggcagcaattgctattgggtttgatgatttcattgcagatgcactgcgaggtactggattctatcagaaagcaacactggaaattaagagagctgatggtaatgaggccatcattgctgaagaggtttttgagaaaacaaaggaaaaattccaaatgtattagatatgtcattcttttcagaattgctttcatttaaattattgaaactgttgatagtggattgaactcatttgagtacaacaaattttacgatacaagttggatttgcctcagataatgactatctcattgttaaccaattctaatatacatcctcacacaggaggatatttgat

SEQ ID NO: 3488 - DNA, 1693 bp, Glycine max
  Clone ID: GLYMA-23APR03-CLUSTER32530_1
tctgctacgtaggccccccccccggggagtctgccccttggattcgttcacttccccatctccatttgtaacacaatgaaattgagatttcgtttgtctcacaagttctcccctcatgtaattatataacgggaaccatgcaccttattgaatggaccctttcaatgttgcgtgaagtatggtatgggcatggagtattgaaatttgacgtcttcgtgttcaacgcacttgttctcatcaattgtatgtgtagtaagtattcttttcatttcattcatcgtcttattgcgcacgtcccccatcctcggcttctccttcgtggagcactcttactccgtcacccaacacatccaggtaaggatctctctgtaattttaattcattgcaatgtctttttagaatcacagcagaaattaaaaatttgtctgaaacctgtttatgctttctgttggcaaatagtagggactaatttggaatttattagaaaggaagacaaggatgagattcatgtttgtaatttgagcttgaaactccatctcttcgtgcttaacttatttggagcttgttttaatggatttcagcattgcttgtttttaatggtttcaggtcatggatgttccactgccactggataaattggctttagatttgattgataatgagccctcccctgcaaacatgagcaacagcaggatatatgtaattctggtggcaactggaagctttaatccacctactttcatgcatttacgcatgtttgagcttgcaagagatgcattgaattcagatggctactgtgtaattggaggttacttgtctcctgtgaatgatgcatacaagaaaaagggcctaatatctgctgaacatcgaatacaattatgtcatttcgcctgcaaaagttcagattttataatggttgatccatgggaggcaagtcagagcacatatcaacgcactttaactgttctctccagagtccacaattcagtttgtgagacagggttggtatctcaagaatccctcaaggtcatgcttctttgtggttctgatctccttcattcttttagcattcctggattctggattcctgaccaggttaaaactatatgcaaagattatggagtagtctgcattcccagggaaggacaagatgttgagaagactatatttaaagatgacattctgaatgagaataaggataatatcaaagttgtgaatgaacttgttccaaatcaaatcagctcaaccagagtaagggattgcattgcaagaggactatctataaaataccttaccgcggatgaagtgattgattatatcagagagcaacaattatacttgaactaatgataaattattactactgtttttcattacattctgtagacatgggtctttgcaagaaccactgtgcatcgctatccgagccaattttctataaacagatgatttttcatttttgtgttgtaaatttgcagataaataaatattacataatttatgtaatcgaattgcaaatactactgttgaaaatgcaacctagtgcttttaagactttgggttagatgtagtatattaagtttatttgtaaagggttgatggggatctctgcaatttgtttgtgtaaaaaaaataaaaattgagccggggatattcttgattggagccctgatatattgaaatttattcaagt

SEQ ID NO: 3489 - DNA, 1244 bp, Glycine max
  Clone ID: GLYMA-23APR03-CLUSTER325316_1
aatataattaagagagaaaagggagaggaagaggaagatgaaacctgacagaagaagagaagaagcagtgtaacagaatggggagtttagtgtaccaagtgatttcctccgcagcacttttcacgcttggcatctaccacctcataaccaccacgcgcaactacctcaaatcgcccctctcctacgccgccaaacccttccaccccttcccctacccccgccgcctccctctttacttagtcataacatctctcctcctcgccatggcccaccacctcctcatctccgccgacgctgatcccttagtccgtggcgccaccgccgtccaccgcatcacctccctccaatccgccgcctcgctctttttattcctcctcctcgccctcgccctcctcttggccgacgcctcccccgccctcctccctctcccccccgacctctccttcgccctcgcctccgccctcttcctcctccacgcctccctcgcctccgcccgcgcctcgctccaaacctccgccatcgaggccaaatgcctctccgtctccgcctcgctctcccacctctccgccctcctctgcctcctcctcgccgcgctcccccggttgttccccgcggacgtcgcgctctccgccgccttctgcctccgcgggctctgggccctccagagcgggctctccctctacgccgacgccttcatccccgagggctgccaccgcctcctcgacgtcaccagcggcgtcgaaggttccacacagtgcgatctcgatgagtccaagctccgcgccgtcgcgatccttgatctggcgttcttgatccacaccatcttcgtcgtcctaatcgttctccttacttatgctctcgtctgcaggagtgtcggtggcaggaggctcggatcctatgaggcgctccccaccgcggcttcccctacggacgctaatcacagccatattcagatgaaggcctttactggcacccaggcttgaatcttttttttttcgctcattatttatttatttatttagaatttttgttatctatcgttagtatttgatcagaatgtagggacattagtattcctgtttagtgagtgagagagatgaatacgtgtgtagttccaattttgttttgttatgatatagaacttttcactgctttgcatattcctaaacacccttcatagatatgatgagttcttttttcccattgaaaaaaaaaaaaaaaaaaaaagaaaaaaaaaaaaaaaa

SEQ ID NO: 3490 - DNA, 1803 bp, Glycine max
  unsure (1)..(1803): unsure at all n locations
  Clone ID: GLYMA-23APR03-CLUSTER3260_3
gaacanaaataaatactgaatgtcttgatgattaacnaaattttaacttntggncattaggtatccggaatttaaggaaanananagggggggtagttgagtagtaattgagttacatctatgatctttntttcaaaaaagtcaaaacaaaataatcattattttcatcatcaaaagctacgagctagctaggccacagattttcatggagaaaacaaggtacatagcagttattcctggtgtaggattcagccatttagcccccattcttcagttctcaaagcaacttgttgagctgcatccacattttcatgtcacatgcatcgttccctcacttggttctctcccaagtgcctcaaaagccatcctagaaactcttccaccaaattacatcaacaccattttgcttccaccggtgaaccctaatgaccaattatcacaagaagacattcccgtactagtcaaaattcatctcacaatgagtcactccatgccatctatacacaaagccttgaagtccttaacttctaaggctacccttgtggccatggtagttgattctttcgcctttgaagcactagactttgctcaagagttcaacatgttgtcctatgtttattttccagcagcagctacaacactgtcaacactcttgcatttgcccaagttggacgaggaaatatcctgtgagtatagagatttctcagatcctatcaaagtaccaggttgtgtaccatttcgtggtggagatttctatggtccagctcaagatagaactagtccagtttacaaattcttgcttcaacgtgttaaccgaatccgtcatgttgatgggatcttcattaatagcttcttggaaatggaaacaagtcctataagagcattgaaagatgaggataaagggtaccctcctgtgtaccctgttggaccaattgtccaaagtggtgatgatgatgcaaaagggttggacttggagtgtttaacatggttggacaaacaacaagttggttcagttttgtatgtttcttttgggagtggtggaacactttcgcaagagcaaataactgagcttgcttttggtttggaattgagtaatcacaagttcttatgggttttgagagcaccgaataatgcaacatctgatgctgcttatcttggtgcacaaaatgatgttgaccctttgaaattcttgccatgtgggtttttggagagaaccaaagagaaaggtatggttgttccttcatgggcaccccaaattcaagtccttagccacagttcagttggtggattcttgactcactgtggctggaattcgatcctcgagagtgtgctgcatggtgtgccattgatcacttggccactgtatgctgagcagagaatgaatgcggttgtgctttgtgaggatctcaaagtgggattgaggccgagagttggtgaaaatggtttggtcgagagaaaagaaattgctgatgttgtgaagcgtttgatggaaggaagggaaggtggggaaatgcgaaaaagaatgaagaaactagaagttgcggctgttaatgctctcaaagaagatgggtcttctaccaagactctttcagagttggcactaatgtggaaaaatgtggcttaggaaaacaagttttttatttatgttatgcatgcagcttgtgtagtagtgcctgtaatgttcaggtatttcgtatcttagtttttatttatgtaatgtaatgcagcttgtatggtgcttgtgtttttagttataaataaataaactttggtcattacaaaatcaaaaaaaaaaaccccaaa

SEQ ID NO: 3491 - DNA, 1705 bp, Glycine max
  Clone ID: GLYMA-23APR03-CLUSTER32714_2
aaccttgacgtgattctaccaaatttcctttctttgttaaagaggggaagtgaagcaagagaactttcacgagataactttccaactagcacctgcacctgacacggaataacgcttgatccttttcaaagactttttttataactggtcgttgttatcatcctcagtgaataattgaatgctgaaaattggtgacacagagagagagagagagcatgcaaagacaaagttgtcattcgtacgaaagttgattccctaggagagtcaattcatgatctctaatgaactcccccttgacattgccaaatccatgattgcatttgagcatgaagttggtagtgctaaatctatgacatgcacacaacatggagtagttaatcttggatatggggattcataaacatcacagttaaactaaaaacaaaaaagaattaaacttaagttttcaaattattcaattaaatttcaatctcctttttctactactaccagggtgagcaagtataagtaaaactgttctatttgattttgtttttctcatttttatcctatgtttgtgcttcaattcctgaagaaactcatggaagttacatgcaggtggatatgggactctagaggagcttcttgaagtcataacctgggcacaacttggtattcatgacaagccggtaatatatactaataacaaattcatgtccctttagttagttgttttgtgcttgaagcctaataataataagccttgacattccaaaaattgtaggtgggattagtaaatgttgatggatactttaattccttgctgtcatttattgacaaagctgtggaagagggatttatcagtccaaatgctcgccacataattgtatcagcacccacagcaaaagagttggtgaagaaattggaggtaatatcattatgtccttactaaaactatacttacatcttgttttaataaaacagatgttgactcttacatacccttttgatcaacctcaaattcattttgaaaagtctagtgagcatattacacaactcctattcattttgattctcacaatttgaaggaactgtcttatttgaaatcactttctctgatttcattagagaagtcacatcaaaacaaaagtttctctgatttcgtactgcatatgtaaataggcaattgaaagatttatagatgcacacaataaaacttttcttggatatccaaggatatgcacatttatgtcatcaaagcttatcaaatcaattgtatacgtaatcaactttttctggtgcaaaactaacagcttttcggtaatatgaaagaagaaagtgaaatatttttgtgcttaattcacaggattacgttccctgtcatgagggtgttgcttccaagttgagctggcagatagaacagcagcttgcttaccctcaagattatgacatgtcaaggtagttgggttacttcacatgcacggaacatgagaccatatagaattttggagctggaacgaagttatattttcgactatcgcactattctgcttttatccttttaatttcttgtgtaaattaccaggattgaccttaattaatatgtgatactactttattagttattaccttgtgaaactttgatgctcttgaatttgtaagtaccccccgcttctgaacttactattatcattcaatgccaattaatttttaagtttaactggaa

SEQ ID NO: 3492 - DNA, 1771 bp, Glycine max
  Clone ID: GLYMA-23APR03-CLUSTER3271_4
tgcaggcagaagaaaataaactaaaactttggaacccaaatgatgtcttccgaatctgttcttcctctccccgaaaatcccatcattgtggggtttggtggggttggagtcgattttcttgcagtagtgccatcttttcctaaacccgactccaagatcagaaccactgaattcacggtccaaggtggtggaaataatggaaatactatgacatgtgctgcccgtttgggcttaaagccaagaataatttctaaggtaagactatgctggaggaactagaagctgaaggggtggatacctctttttttgtggtctcgaaggaagggacttcaccatttagctacatcatcgttgacaaccaatcgaaaacaaggacttgtatattcactccaggatatcctgaaatggtccctcaagatctttcacgagccaatttgttatctgcactggatggagcaagagtggtctattttgatgcaaggatgcctgacaatgctcttgtcatcgctcaagaggcatttcaccagaatatatctatcttaattgatgcggaaaggcctagggaaggattgaatgacctcctgagtttggctgattatgttgtatgttcagaaaaatttccacaggcctggacagaggcatcatccattccaagagcactagtttcaattattttaagattgccaagacttaaatttgcgattgtaactttgggaaaagatggctgcataatgcttgagaaatgtgtggatgatgagggttctcacatagaagaaatggatgtagacagctgttttgtatcattaacaacgagaaaggaagatagcacagccatgccaacttgcataccctcacctgttacaaaattaagagccgaagggatagaagaatctgtgtgtgggaggttatattatgggacatctgaaaagattccaccatcagagcttgttgatacaactggtgctggggatgcatttgttggagctgttttatattcaatctgtgccaacttatcactagagaaaatgttgccatttgcttcttatgtggcagctgccaattgtagagctcttggagctcgcagaggtcttccataccgcactaacccacgcctggcatcctttactgagtagagtcctaaattgttcatcaaaatttccagtgtagtatgcaagaaacaaggcttcagcatacaaattgtgctgttgaatcccagtttataattaatcactgaggccaaattcattgctgtcctatcagttggattagcaactggccagatcaagactggagctccctgccgatttgaaaggcttgccaagtacaaccagctttttaggattgaggaggaactgggttctgcggctgtttatgctggtgccaaattcagagccccagtggaaccctattgattgtttagcccaagatcattaagcaacatttgaataagattctattgatgactgcatggcgcatgtattttttgcgaaaattaaacttgactactatcaagagaacataggtttttcgagcgtggaattttgaagcgagaaaatagggcagtagccaataaatgtgtctatggtttggcttgttataacaattatcatgtgtagtacaaattttggatgaattacgtctaaattgattttcctgcaaattactaattgtgaaatcgaaggcctatgctgtcgatcatgtggtgatctaagctctgctcgttcctcctttgaagtttatgtttgtcatcaattgacgcctaacttatttg

SEQ ID NO: 3493 - DNA, 911 bp, Glycine max
  Clone ID: GLYMA-23APR03-CLUSTER32790_2
agattttggttggaggaaaatacccacccaaccatggctgcaaccattcctttctctctgcttaggaactgcgcgccattgaaactagcaacacctttcgctcgcaaagcctccatctttaatcttcttctccctcttcaaccacgcaggttggtctctagtacctgtgctgtgaacaatgaagaggctacagcaaaaacagcagctgttaattttgatagtgaagctccaacaatgtagcagccctttcacttctagcatcattttttttaatttattttatcatggttttcttcttattcatggaagtatagttattgtgtcatgattattgattaacctcaattactcaaatacaagggagtgcaaatctctttgcatgataccaattttccaaaagattccaccaatatttaacttctctgccgtccgctccctctaagaatgatgttaaagatagcattgattttaaatttaaagggttcactgggatgtgaagattttaaacctcagttctgctaggtttcccactcaaatgatgactgtgacagttaatttgaatttcagggactggtaaatataattatggagaattatggcttgaacccttttggactccatgctgtgagcaagatctgtatttcttgatagttgtacacacactgactcatacatgcacgaataatacttgttttgctggggggtggttagtcttttttgatgtctagaacattggtgggggaacagatgtatgttggggtatcatggctctgttccaaattttttcctcatgtaatttgaacctgtcttgggttactggaccatttgtctttcgggttctctaacttgaggtatgtacattgagggtatcacttatacccttagaaatacaatattttcactttgctgat

SEQ ID NO: 3494 - DNA, 717 bp, Glycine max
  Clone ID: GLYMA-23APR03-CLUSTER32850_2
ctttttcgaattcggatcctctaacgtgatacggacaattacgtgtccttaaagtggaaatttttttccttcctcagtacacaacttttgttgaaacagagactactattcggtaaagcaatgaagccctctgtgctgcgtttgtcactgcttgttttcgttcctctgcttctctccctcttctatgttgcgctcatgccaaagaaggaaacctctatgaaaacctatgaggtctttggagtgaagatagaaaagaacccatctcagtctaaacttactgatcttggagtctcaacttggcccatgtgggaaggtggtccaaccaaaattccatggtcctttaaagaagaagagactatgtatctgctggagggaaaagtgagggttactgttgaagggtctgttgaatcttttgaaattgggggtggtgatttagttgtcttcccaaaaggaatgaacattacttgggaagtgattgaagctgtgaagaaacactacagcttgaaaaaataacgtgtacttgtaagccttttctgttgttgtggcctagtgatgccatgtatgaaattgatcaagcaattacttctcactatagctatagttactaattgctggcgggatataccaaagctttcacttccattagattgtacccatgtcaatgatcctattggaaataatctctgatcaaacattaaataagtgggatccttttat

SEQ ID NO: 3495 - DNA, 1421 bp, Glycine max
  Clone ID: GLYMA-23APR03-CLUSTER3300_16
gagtcagctacgtaggcccccccccaaatttttttctggtgattctacaacctgtcctaactctcaaccctcttcctcttaattaatctattcctctttatcctcctctgaacctcaaacaccaaaacaaagcattacaattctcaatttcacataaacaccagaattgataaaaacacataacaaaaaaaaaaagtgaaaaatggcgagcgcagtggagaaggagggtggcgcgagcgaggaaactttgtctttggagcttcctgctccacctggttggaagaagcagttcattccaaagaaagctggtaccccaaagaaaaacgagattgtgttcactgcaccaacaggagaggagatcaataacaggaagcagctggaaaaatatttgaaagcacaccctggaggcccagctgtatcagaatttgactggggcactggtgagaccccaagaagatctacaagaatcagtgagaaggccaaggcagctcctccaacacagagggagcccccaaagaagcgtactaaaagatcatcagcttcacaaaaggaaatttcccaggaagaaaaagaagaggagaccaaggaagcagagatgcaagaagctgatgacaccactaagggtgataatgatatagagaaggaaaaggttgttgtaaacgaaaatcatgacaagagtgtggaagatacagatgtcaacaaatccactcgttatggagaagaagctaaagctggagaaaacgttgaggtacctattgaagaggaaaaatccaatgctgctgatggagaactacctgcattaaaagataaagctgatgacaaagtaactgagggctctgaagtttttctgagaaaggatgaagaaaagattgagcaaccacaggaagagacaaaagaatatagtggatttggggagccagagaaattggaaacatgcactactgcagacaaaacggttgaagtggaaggagtgaataaagaggatcacgtcaaaagtactcatgaatttgaagttggggaaatagaaggaacaaaagtgaacggtgaagaacatcacaagcttgatgagataaacaaggccgaagcagagttgactgtgaatggcactcacgagagctgaactggtgaggtcaaaagcctggagcagggaatagattaataagctctccgcttccctcctctcattctgacccctttagatctgtttgaaatgactgtagtttttgttaatgttatttctctgattgtttattgaaataacaatatacaattatagagcatagccgtatcatgtaccacccttgggtgtattggacagacgtgtagcttctagttgcttttgtaacattatgttgtaagatgtgatatggacctgtaatcatatatgtaaggaagtgatcctacaaaaaaaaaaaaaaaaa

SEQ ID NO: 3496 - DNA, 2526 bp, Glycine max
  unsure (1)..(2526): unsure at all n locations
  Clone ID: GLYMA-23APR03-CLUSTER330_1
aacgaatactctacaccgaaacaggtttcctataaaatcccgcacgtgccgttgcagatgagctgaaatcnaaaacaagaataataatgaatatggataagtatcagatctggagcaggagaatagcgttggcagcgtttgcgtttgctctgctgttccaatcggcctcagcagacgacgtcgttgtgctctctgaagataacttcgagaaggaagttggtcaggacagaggagctctcgttgagttctatgctccttggtaacttaccaatcttctcgatctcttcctctctgtttctatcaactattctttattccatcgttactttgatttcttgaaatcgttattagggtagggtttattattaaccgattctgatgttttcctttttagcctcgttctgatcggattgcatgtgttctttgcgtttaacggttcaacttgtcgttttaccttctgttgatttgtacttaaatgacttcttgttgtagacgatacaatacggaaaagtgaagaaaacagaccaaaaatagaaagaaagagaaataccaaaaccttggcgcatcatattctttattccctcacttggatcgttaattccgcgaacgagcttctgcccttcaaattaaccatggagaatattggtgaggagtacggctactggccggagaacgacatgcttttccaaaacgaagaccttggcagctgggcgataatggatgaggcagcgttatcagggtcagggtactatgattcaagctccccggacggtactggtgcctcttcatcggtggcatctaagaacattgtctccgagaggaatggaaggaaggaacgaaaactatacaccgaaacaggtttcctataaaatcccgcatgtgccgtagcagttgagctgaaaccgagaagaagaagatggagatgtatcagatctggagcaggagaatagcgttgggagcgttcgcgtttgttctgcttttcctatcggcctcagcagacgacgtcgttgtgctctctgaagataacttcgagaaggaagttggtcaggacagaggagctctcgttgagttctatgctccttggtgtggacactgcaaaaagcttgctccagaatatgaaaagcttggtagcagcttcaagaaagccaaatctgttttaatcggcaaggttgactgtgatgagcacaagagtttgtgcagcaaatatggagtctctgggtacccaacaattcagtggtttccaaaaggatctcttgaacccaaaaagtatgaagggccacgcactgctgattcacttgctgagtttgtaaatacggaaggaggaacaaatgtgaagattgctacagctccttccaatgtagtggtgcttacatctgaaaattttaatgaggttgtcttagatgaaaccaaagatgtcttggttgagttttatgcaccctggtgtggacattgcaaaagtcttgctcctacttacgagaaagttgccacagcatttaaattggaggaagatgtagtaattgcaaatctggatgctgataaatataaggatctggctgaaaagtatgatgtgagtggatttcctaccttgaagttcttcccaaagggcaacaaagctggtgaagagtacggaggtggaagagacttggatgactttgtggcttttatcaatgagaaatctggaacaagtcgagatgtaaaaggacaacttacttcccaagctggtatagtagaaagcttggatgtcttggttaaggagtttgtagctgccagcgatgaagagaagaaattcgtgtttacccgattggaagaggaagttgagaagctgaagggttctgcctcaaggcacgggaagatttacttgaaagctgccaagaattacttggaaaaaggttctgattatgctaagaacgaaatccagcgcctacagcgcatacttgacaagtccattagtcctgccaaggccgacgagttaactctaaagaaaaatatcttgtcgacatatgcggcttgactttttggtgcatcattaaccatctctcatggaagctcgtgatcaatcgcagctcctgatgattgtttgactttgatatcgaaaatgctgggagatattcaacgtggatacttgtagtgcttaatttgagtctgtactattgaccttatcttgcatggcgcttttggggttaaaaattccgaacttacgattcttctccccattgtagtctacctgagcggtttaaaattttgggagacgatagcttttgtctttataccatgtgtttccttcgttatttgatggatgtacgatatatttataaatatagaaataaacgcaagagtttgcaagttttcttctttttcatttcctgtatgttgatagcctctaacgttgtaagctttacgttgcctgcaattaatgaaatcgaattttcatgttaataatggtaaaaaaaaatggaagaggcatgaaaatgatgtcatgtcataacttaacttattgataacaccaccaatggatgcccgctgaga

SEQ ID NO: 3497 - DNA, 1974 bp, Glycine max
  Clone ID: GLYMA-23APR03-CLUSTER3333_17
agcacattgaagcagattgtcatttcttatgtatagggaaaccacttgcttcagcatggcttaaggaaccttgtgttgaaggaagttgcctcgtgggtttggaggaagagcttgaacaactcaggggtggaggcaacgacggttggcatggagccgaaggagagagagaataagaggccaagatcttggatagtaattaacctcactcaaactcgggatcacagaaaccaacaacagctcttgcactgaggtttcacgatgttgctggaacttgcacttggtttgtgtgtgttagcttggtttctgcacttgcgtcccacaccaagtgcaaaatcaaaagcacttcgccacctcccaaaccctccaagcccaaagcctcgtcctcccttcattgggcaccttcacctcttaaaagataaacttctccactatgcactcatcgatctctccaaaaagcatggccccttattctctctctccttcggtaccatggcaaccgtcgggggctccacccctgagttgttcaagctcttcctccaaacccacgagggaacttccttcaacacaaggttccaaacctctgccataagacgcctcacttacgacaactctgtggccatggttccattcggaccttactggaagttcgtgaggaagctcatcatgaacgaccttctcaacgccaccaccgacaacaagctcaggcctttgaggacccaacagatccgcaagttccttagggttatggcccaaagcgcagaggcccagaagccccttgacgtcaccgaggagcttctcaaatggaccaacagcaccatctccatgatgatgctcggcgaggctgagatgatcagagacatcgctcgcgaggttcttaagatcttcggcgaatacagcctcactgacttcatctggcctttgaagtatctcaaggttggaaagtatgagaagaggattgatgacatcttgaacaagttcgaccctgtcgttgaaagggtcatcaagaagcgccgtgagatcgtcagaaggagaaagaacggagaagttgttgagggcgaggccagcggcgtcttcctcgacactttgcttgaattcgctgaggacgagaccatggagatcaaaattaccaaggagcaaatcaagggccttgttgtcgactttttctctgcagggacagattccacagcggtggcaacagagtgggcattggcagagctcgtgaggaggtctacagctgttgtgggcaaagatagactcgttgacgaagttgacactcaaaaccttccttacattagggccattgtgaaggagacattccgaatgcacccaccactcccagtggtcaaaagaaagtgcacagaagagtgtgagattaatgggtatgtgatcccagagggagcattggttcttttcaatgtttggcaagtaggaagggaccccaaatactgggacagaccatcagaattccgtcccgagaggttcttagaaactggtgctgaaggggaagcagggcctcttgatcttaggggccagcatttccaactcctcccatttgggtctgggaggagaatgtgccctggcgtcaatttggctacttcaggaatggcaacacttcttgcatctcttatccaatgctttgacctgcaagtgctgggccctcaaggacaaatattgaaaggtgatgatcccaaagttagcatggaagagagagctggcctcacagttccaagggcacatagtctcgtttgtgttccacttgcaaggatcggcgttgcatctaaactcctttcttaattaagataatcatcatatacaatagtagtgtcttgccatcgcagttgctttttatgtattcataatcatcatttcaataaggtgtgactggtacttaatcaagtaattaaggttacaaacaggcacatgaatcatcccccatttgtctttgtttggtacgtaaaacaatttttttttccc

SEQ ID NO: 3498 - DNA, 899 bp, Glycine max
  unsure (1)..(899): unsure at all n locations
  Clone ID: GLYMA-23APR03-CLUSTER33649_2
gagtcttagaaattgaacatcttggaattggctttataaagtaaaagaagaggcgcagatgtccctactccagaagggcctgtgctgtgtctttgacatccgtaataatgtaaggtcactcaggctcccatcatgcagcaccagaatcagaaatttccatgccccaaacaactccaattctccactccaatcattgacacgtggtaaatcacggaggatgatttcgaaacctatatcagcggctcttcccgctccaccgccacttgacctcacagaaaacaacgtgaaacaggttttagaggacgctcgaaaggagctgggtcaaatctttgactcctctgttggtatcactggagtggtggaacttgctgacttggatgggccttttgtcaagattagcctcaagggtcggttttggcacaaacgttccactgttcttgccagagtcgctaattatctcaaacagaggatccctgagattttagaagttgacattgaagacgagaaacaattggatgacagtcctgagaatttttaagggtttgaggtcataaaatcattgtagatgaaaccatggtagatgaaatggaaatctcagtgtgagaggagaggatggagtcacacaacttcactagtctctgggaacacacagaaatcagtagtttatcgcctagtgttaataaagcttccctaatatgctttaccaaaaactgttagcgaaggttggacttaacaagaaaaggtaagcttcggctaggtactctcttgatgtattgcactanatgatttaccgcttggtaatggtgaatcctgggtgaagccatgtatcatgcattaacttaatttgtgtacgntgtaagcaatatctggctgaaaaatagtcaactacattatttaac

SEQ ID NO: 3499 - DNA, 1457 bp, Glycine max
  unsure (1)..(1457): unsure at all n locations
  Clone ID: GLYMA-23APR03-CLUSTER336539_1
ggggggcggcgccttaaaattaaaaaaagaagccgccgcgcgcgcgatgttatcttaaagacgaaccaaaatgagagagagaattattcatgatatgttttgttcttaattggaaaattgtaatgcatgcacactctcttgaagggtaagtttctgagaattttctgtcactttctcggcaaaaaattatgtcttccctctccaatcttgaacgctttctcctacgcgtcactccagatgttccgtcactcactcttcagagctgctgtagtgatctaaatgcacaatggctacctcctggcaaagacacaatcgaatatttcactctgaaagatctttgggactgctactatgaatggagtgcctttggtgctggcattcctatgatattggaaaatggtgacactctggtgcaatactatgctccatatctgtctgctacccaaatctatatcagtaaatctaggattcggaaagagtacggtgaaggagttgaagttgaatgtgattccttgagcgaggacagtgcaagtgataacctttctagatcacccagtaacaattctagcaaagcatgggatgatgcttctttggattcaggctctgaccaagtgggttcatgcacaacaaaggatatgcttggcgctctttacttacaatactctgagaactctccaccttaccagcgggttccattttctgagaagataaccgagttagctaaaagccatccaggattgatgaggttgaagagtgtggatatttcccccacaagttggatggctgtttcatggtatcccatttattccgtaccatgccacaaaaataaaagggaccaaacaagcttcctcactttccattcactttcatctttccaagactgtgcaagcaaatatgacgaaattcacacagggaataacaaaagttgtttaattgattggcgaagtattgtgggagagaaatgcaagaaaaaagagaggggttgcatgtctctctctccttttgggttagccacgtacaaaatgaggaaaaacatatggttaaatccctataacaataaccaagtggtgaccgatctatacaacgctgcagactggtggttgaagcatatcaacgctgaccaccctgacttcaacttcttcacacgccaacctaccttgtagattggtttgtgttgtgttcatcaccaccagctcaatgcccctttgctcagtttgctactctcatttcggtatcagaatttgcttagtttggtactctgaccttcaccctaggtccaactctgagaacattaataaataaaatgtaaagtttagtttaatgggttcatgtaaagtgatatttatcttagcttctttacccaaaaaaaaaaaaaaaactatcgatcggtcnaacctcgagggggggcccggaccattcgcccctaaaatgagtcgatacgcgcgttactggcgtcg

SEQ ID NO: 3500 - DNA, 904 bp, Glycine max
  Clone ID: GLYMA-23APR03-CLUSTER33786_1
acaatgttatagattatggttgagataaaaaataattatagacttcaatatccgaaatgctcaacgatggtgatgccaatcatgtctcaattgagaagtccttcagaataaaagaggatgataggttcttctcaaggctaatgtccaaggaaatctccatggctaactcttcttcaagggtcttctattatggagaaacatcaattgcagtccctttcatgtgggaggcacaacctggcacccccaaacacccttcttctgagacttctctgccaccccttacacccccaccttcatattattccaattccaagtccaaaaacaagagaagaaactcaaaggccaatatattttcatgttttatgccaaagtttatagggtcaagaaaggctcatgtgtcaccaacatcatctcgctcatcttcctcatcctcctcctcatcatggtcattggtttatccagcatactcatattccatgagggacacagatcaaggaagcatctctttctcacgctctacaactgttcgctcttttctcaaacacaaagcttcaaacggttttagaggcttctatccctttggaaacataaataatgcaattgtgagccatggagcagtctagtttgtggaggtaacataattaggacttgattttctacacggtttacatattgtggaaaatctttgaaaatgtagttgtttggttggttattgtgtgtgggctttaaaggtgttggacataataatttcctatctcatgatttaggttgagattgtatatgctttaaattagaagccttttttttaatataatatacttgagtaaaaaaaaaaaaaaaaaagcttatcgataccgtcgacctcgagggggggcccggtaccctgggaactggaggggggaaa

SEQ ID NO: 3501 - DNA, 794 bp, Glycine max
  Clone ID: GLYMA-23APR03-CLUSTER33996_1
gttttttttttttttttttttttttttttttacacaaaattgaagttcctttctttttttttaatagttcaacactacatgtaaaaaaaatagtaatgaaaaacatacattgttttccctgtatcagtgattggtaaataaaaatacaactgacagttctgaagattaatcacgaagccaagtcttgacattcttcgtcatagcaatgccgaatgccttaatgttttgtttggtccactactaatccttgactgaggtacgtagtatcttaacgtcatggatgggcctgtcgttgttatctgtttggacgctgccaagtcttttgataatttccatccccctacacactcttccaaatattgtgtgttttccatcgagagaggggcatggtgccagagtaataaagaactgactaccattggtatttgggccagcatttgccatggataagattccagctccagtgtgcttcaactctcgttttatctcatcttcaaactttgcaccatatatggattctcctccccttcctgttccagtgggatccccaccttgtactatgaagtccttgatgatcctgtggaatttaacgttgtcgtagtaacctcggcgagacagttcaatgaagttcctacaagtcctcggcgcatgcttgtagtacagctcaacggtgaaagaacccatggaagtttccagagtaacctccggagcaccaccttctgcgcttgcccacattttgattttgctctcacacacaccaaacacccccttctgtcgtcttctcgcagccgtaa

SEQ ID NO: 3502 - DNA, 1318 bp, Glycine max
  Clone ID: GLYMA-23APR03-CLUSTER34002_1
ccagctccgtactaccccccccccatcgtcatccgacaagaagaaagagccgtttctattcaatggctgctccctttaacctcaattacaccacctccaacacatcatctccttccttcaccttcttcccatacacccaaaggaaaaatcttccatctccactttcttttcaatggccactctctttaacttcaactccacccttcgcccctcttgttatcatccctcctcaccctcctcatcttatccccacttctccaagacactctccacaactttcttgggccacaccgtaaccctcaaatatgctgccacttccgcaagcatccctccccgttcactctccgctcacatgtcatgggacggtcctctctcttccgtcaaattgatcattcagggtaaaaatctcgagctcactgatgcagtgaagcagcatgtggaagacaaagtggggaaagcggttcagaagcacagtcacctagtgagagaggttgatgtgaggctttctattcgaggaggaggtgaatttgggcgaggacccagaactcgtaggtgtgaggtgactttgttcacgaaaaggcatggtgtggtgcgggctgaggaggatgctgaaagcacctatggaagtatagatttggtgtcatcgatcattcagaggaagttgaggaaaataaaggagaaggtgtcagatcatggtcgccacatgaaggggttcaataggctgaaggttagggagcccgtggagcaattacctgtcgaagaggatgaaatattatccccacaggaggaggaagaatcaattgacgaggttgttcgcacaaagtactttgacatgccaccattgactgtggctgaagcaattgagcagcttgaaaatgttgatcatgacttctatggttttcgaaatgaagaaactggggaaattaatattgtgtacaaaagaaaagaaggaggatatggactcattgtaccaaagggagatggcgaagcagagaaattggagcctgtagtgcttgaaccagctatagaatcctccctgaaagaatgataggctcccacaataaactctttttgtaagaacataagagcttgtacatgattagcggatactaatggcggtttcttggagccagaagtgcatacacaatttcaatggcgtctctgacattttaaagtgcaaaccaagttttaaagtatgatgtacgcttggatgactagtcactataaatgaaagagatgcaccatttcccaaaagaaaaaaaaaaaaaaaaaatccagaatacgccttttctctaacaattccacacactatttttca

SEQ ID NO: 3503 - DNA, 1349 bp, Glycine max
  unsure (1)..(1349): unsure at all n locations
  Clone ID: GLYMA-23APR03-CLUSTER34159_2
gactagcatttgcttgcattaccattcactactagttttcccacatgctttaactagctgcttttttttctattctattttcattatccaatggcttcttctattcctctttatcaaccaaccaacaccttattctccaacacccagttcaaaggttcgcgccgtggcttcttgtggcgacccagttactcgtttggctctcgtgctgaaaacagagcacgacccatcaaagcttcggttggtgcaccaccatttcccctgtttaagcctccccaagttgaagaaacatcttcatttgttcctcgagttggagcccgctgatcctgatttctacaagattggttatgtccgaagcatgcgagcttatggagttcagtttaaagaagggccagatggttttggtgtgtatgcttccaaagatgtagagcctcttcgccgagcaagggttgtaatggaaattcctcttgaattgatgttaaccataagcaagaagctcccgtggatgtttttccctgatataattcccttggatcatccaatatttgatattatcaactcaacaaatccagagacagattgggacctaagggtagcatgccttctcttatatgcatttgactgtgaaggcaacttttggcaattgtatggcgacttcttaccgagtgcagatgagtgcactagcttacttcttgcttcagaggaggaacttttggagctgcaggatcctgatcttgcttccactattagaaaacagcaacaacgatccttagaattctgggagaataactggcacagtgatgtaccccttaaaataaagcgtcttgcgcgtgatcctcaaaggtttgcttgggcagtaggtattgcacagtcacgatgtattaacatgcaaacgagaattggtgctctaaatcaagaagcaaatatgctgattccttatgctgatatgctgaaccattcatttgagccaaattgttttttccattggcgttttaaggacaggatgcttgaggttcttataaatgctggacagcagattaggaagggagatgagatgacagttaattacatgagtgctcagaagaatgacatgttcatgcaaagatatggattttcatcacccgtgaatccttgggacaagatcaaattctcaggcaatgcgcgtattcatttggattccttcttgtcaatcttcaatatatctggccttcctgaagagtattaccataataattgtctgtcaaaagccggagatagnttttgttgatgggagcagtcatagctgcagcacgaacattgccaacttggtagatgggggatgtgcctccaatccctagcatggaaagaaagct

SEQ ID NO: 3504 - DNA, 633 bp, Glycine max
  Clone ID: GLYMA-23APR03-CLUSTER34254_4
caccaaataagtagacatttctaaccacaagattcatttcaaggaataagtacttatattgtctgttcttggctattaatttgagtctgcagaagttgatgctataaatatttcaaatatttcttgacagtaatggatttgaccatgtcgttcttcctaataaagtttctagttgaaatgtcatgcaagccttatcctatacttgacttggggcccctcctcttttcggtaggcaatacagtgagtgagcaattgccagccacaatgatgatcgagacattctgttatcctcactttcaaacaagctgcagagtttgtggtcttgcactatggatatttgcggctcacagccttattggtagaataatggcgaaaacaacaacataaatttcactcattagctgcaatgattctcatgaatgagaggatttgaagattctaaccaaggtgtttgacttattctttaacacaattgagataaaccaagggaatatttgtaccccgtgttaattatcttattcgtttatcttgagttcttaaccaccctattattttcttatagcagccaactttgatgagaatcattgcagctaatgagtgaaatttttttttttgaaaacaacaacataaatt

SEQ ID NO: 3505 - DNA, 1691 bp, Glycine max
  Clone ID: GLYMA-23APR03-CLUSTER342591_1
tcagctacgtaggccccccccccgacgcagcatcgtcactttcctcgctctcacaattttcccatcaaactcttgcttctcgcttcgattcagtttcttaactatcaattgagtgactatttgccctaattttggagcagcatagcttcagttagtcatgttgaattgatcgggtcggtgaggagatcgaaaaggttagttttattggatgaaatcaagaagaaaatctatgagataataattaagtagcatgatgatagaaagttcaagtaaagttcatggagccaataaccaacaagagggtgatgataacaacattaaaattgagaagctctcaaaggcaccctccacttcctcctcatcaagatcatggtcagcattcagaaatccaagaattgtgagagtgtcacgttccttgggaggaaaagataggcacagcaaggtttgcaccattaggggactgagggacagaaggattagactttctgttcccacagcaattgagttatatgatcttcaagaaaagcttggactcaatcaacctagcaaggtggtagattggttgcttgaaaccaccaaatctgatattgataagcttccaccacttcaatttcctcactgttttgctcatcatcaccaacaaaccctactgccaggtacctctcagttttctcttggaggcttctatgatgctgctgctaatgggggaaatgaaaaccacctcatggcaacaaagtcaactaggtattgggatatagattcacattcactaaataatggtaaggatctagttgaaagtgtgtcaaactccctaaaaggaaagagctggatcaaaacaaatgaacaagaaaatcatcaagatggaggaattggtggtagtagtagcactcataacaatagagaggaatattcttcagctcattataagctcttccctattgggacaactactaataactcttatttacctggtttgttaaacaatggcatgacacataactcatccaaccaccattctgagccttcaagtctatctttatcccactttggaagccatggattgtttccttcatcacataatgcccatccaagcagttgcagtggtgtgccattttcatcttgtaatttttctgcagcatcatctggtccccaattgcttttctgtccacctacttctgctacaccagcatctgctttttactcagtggaaagtgatccaagacaatccaacaacaatgttcagatctttagctcaagttcccaagtcatgatgcctcatcctctcatccaatctcttcattcaaccaattcaactcttaatcgacgcattccaacatcatttagttccaaacttcttgattcagataacaacaatgatcgtagccaaccaaataagggtagtagtactactcgttcttgaagctcctcatcgtggttccttcctgatgcaaacgatgtgaataactcttaatcctggacattcttttcatcaattattcaagaggctaaagcacatgatttaaattttctcactcagccgtgaatgtgagttttgtaggtatggcaatgctatacatatacaatatttatatttgaacttttaagtaatcgctaaaaatgcagctattaattattagctagatgtcttgttgattaatcgtccgaggtataatataaaataatctggaata

SEQ ID NO: 3506 - DNA, 1175 bp, Glycine max
  Clone ID: GLYMA-23APR03-CLUSTER34671_1
acacaaacccaaaaagaagccagtagcacacacctctctctctcttcccttcaacaatgagaacccatcaacaaccaaaactcaaaacccaactattctcatgcgccttcttccgccactgcgcccaaaccctcctcagccccaccgccaccacccctcctcccttccaatgcgaatcctccacctcctcctcctccgccacttcccaaagcttcacccagtggagattctctcctccaacccccaacaccaccaccaataacaataacaacaacctcatccaaacaaacactaatcctccttctccacctccaccacctcaaatccacaacctccaagaactcttccacatttcagaattccaactatcaaccgaccccacctcagccctcaaccttctagaacgttctcttgtccccaatcctccccaagagcaaccgccgtgccctcccaacctcatgcgcgccctcaccgccaacctcgcccaggccaagcccgccaccaagatcctcttcgccctctgcctctccgacgccaaccgccgcgtcgccgtcgaggccggcgccgtctccgccgtcgtggaggccgcccccgacctcgacggcgcccccgccgagcgcgccctcgctgccctcgagctcatgtgcacgctccccgaaggcgccgaggagctccgcgcccacgccctcgccgtccccgtcatggtcaccatgatggccaagaccgccgcaaggggcaaggagtacgccatcggagccctcgccgtcgtctacggcgccgccggcgccgagaaccactacaccgcgcctcccgaagaggtggcgcgtgcggtggaactcgccctgcagggcgagtgcagcgccagggggaggaggaaagggacgcagctgctgaagacgctgcaacaactctctcaggctgagattgaagcttctgagactcacgctcacgacggcaattgaagattttaaattgcagccacagttctttgtgttttttaatatcacgagaaataatagataaaatgtaacgtttttttgccataattgcagttgcattacctctgatcggaattgggaactactgttgtttaaaacctttgtaaaacaaagtaacactgttcttttccctatgcttgcttctgttacaatattatcaaacttattgtgtattgt

SEQ ID NO: 3507 - DNA, 637 bp, Glycine max
  unsure (1)..(637): unsure at all n locations
  Clone ID: GLYMA-23APR03-CLUSTER34741_2
acaagcccttgaagactgaagtgcgaagatagcgagcgaaccaggcagctagtgaagagaagtgagttagtagcagtcaccggcggcggatagacatgaccggagaagagatttccggccccgccggccccaagctcctccgtcttgtttccttcgtcggcgccgcagtgatctgcaccgccgcaatcaacaagtatcgcgaatacgagaggaacaccatcatcaagcaacagcaacagcaagtagtagagacacataattcgtcggaatctgttgccgttcccaaaactctcaaatgaaaaggttagggttttatttattgttattgctgcaatccgcaatgtttagagacagcgattttgcaccaaatcaagtgtattatgcggttctagtttttctccttagcttttgagttttggttattatatactattaccgttgttgggattgtgaatggttttgttcgggttaggcaatggatatttgtcattgcttgctgggaaaaatggaaatgaattgtagtggaaaatgtaataagttttaaggaaattttgaattggcggatagattgtgctttgtttattattgactgagttatttagaatgtgaacatagtgctggactttattacnnanna

SEQ ID NO: 3508 - DNA, 1760 bp, Glycine max
  Clone ID: GLYMA-23APR03-CLUSTER34757_1
tcagctacgtaggcccccccccccagaaaggcctaatccagctgagaaaaaaaatggatgtagagaaagccttccacatgactggaggagttggcaaaactagctatgccaagaattcctcactacagaagaaggaatctgataaagtgaagcacataatcatacaaacagttgaggagctttaccttgcaaccactccaaagagcataggcattgctgatttgggatgttcctctggaccaaacaccctatcaatcatcaaagacatctttcaggccatccaaggcacaagccaaaggatcatgcaccactccacagagttcagggtgtacttcaatgatcttccaacaaatgacttcaattcaatcttcaaggccctcccagagagaaaagcctaatccagctgagaaaaaaaaatggatgtagagaaagccttccacatgactggaggagttggcaaaactagctatgccaagaattcctcactacagaagaaggaatctgataaagtgaagcacataatcatacaaacagttgaggagctctaccttgcaaccactccaaagagcataggcattgctgatttgggctgctcctctggaccaaacaccctatcaatcatcaaagatatctttcaggccatccaaggcataagccacaggatcatgcaccactccacagagttcagggtgtacttcaatgatcttccaacaaatgacttcaattcaatcttcaaggccatcccagagttccaaaatttgcttaggcaagacaggaaaaatgggttcccttccattttcatgggaggctaccctggctcattttatggaagactgttcccaaacagttacttgcactttgtccactcctcctacagtcttcactggctttcaagggttcctccagcactctatgatgagcacaaaaggcctttgaacaaagggtgtgtttacatttgtgaatcaagccctgaagtggtgtctcaagcatactatcaccaattccaggaagatttttccttattccttaggtcaaggtcagaagaactagtagtaggtggaagaatggtgctgatatttttggggagaaggggcccagaacatgttgacagaggcaactctttcttctgggagattctttcccgttcatttgctattctagtctcacagggagaaatagagcaagagaagtttgattcatatgatgcacatttctatgcaccatcaagggaagagatagaagaagaggtgaggaaagaagggtcattgaagatggagaggctagagatgtttgagatggacaagagtaataatgagcaagaaagtagtgagagctatggcacacaggttgctgtggcagttagggccattcaagaatcaatgatctcacaccactttggagaagggatcttggaaagtttgtttgagaattatgcgagattggtagatgaagaaatggctaaggaggatattagaccaatctcttttgttctggttctcagaaaaatatgatactagctatgattattattattattgtacaaaaatattaattatatattaatgttattaattattttggtttgcagtattgagacgtgtttaaattgcagtcatttactgcccatcactgtaatcatcatgatcagtctaatgtcaagtgttggtgtttcagtttatttccttcatgtgtgtatgtatactcttcctgtatggtgtatttaatcatatatttgaagattttcaaatatactaatattt

SEQ ID NO: 3509 - DNA, 2904 bp, Glycine max
  Clone ID: GLYMA-23APR03-CLUSTER3477_13
atggcggcttccgtcgacaaccgtcaatacggcacccacataaacgccgtcgttcgcgcttgcggcccagacttcaatacccctctcccgtcggatttcgatctggactcatccagcgacgacgaagaccaaaacgacgacgcttcgtttctcaaggagttgatacaaaaagcgaacgcggaaaccgaggcgtcgctgttggacccgcgagacgagggaaccgcggaccagtggatcccgcggaacgcctccatggtgcggttcacagggaagcaccccttcaacggggagggcccactcccccgccttatgcaccacggtttcatcaccccatcgccactccgctacgtccgcaaccacggtccagttcccaagatcaaatgggatgaatggaccgtggaagtgactgggttggtcaaacgatcaacccacttcaccatggagaaacttatgagggaattccctcaccgcgagtttcccgccacactagtgtgtgcgggaaatcggcgcaaagagcataacatggtgaagcagagcatcggcttcaactggggtgccgccgggggctccacctccgtgtggcggggggtcccgctgcgtcatgtgctcaaacgctgtgggatcctcgcccgtatgaagggcgccatgtacgtgtccttcgagggcgccgaggatctccccgggggtggtgggtccaagtatggaaccagcgtcaagagggagatggccatggatccgtcgcgtgacatcattctcgcgttcatgcaaaacggcgagccgttggcgccggatcatggatttcccgtgcgcatgattattccggggttcatcggtggaagaatggtgaaatggctcaaacgcattgtcgttactgagcatgagtgcgatagtcattatcattataaggataatagagtactcccttcccatgttgatgcagaacttgctaatgacgaaggttggtggtacaagccagaatacatcatcaacgagttgaatataaactcagtgataactacgccttgtcacgaggagatcttgcccatcaactcatggactactcagatgccttatttcatcagaggctatgcgtattccggtggtgggagaaaggtgacacgtgttgaggtaaccctggacggaggtggaacgtggcaagtgtgcacactggactgtccggagaaacccaacaaatatggaaagtactggtgttggtgtttttggtctgtggaggttgaggttttggacctgctcggagccagggagattgcggtgcgtgcttgggacgaggccctcaacacccaacctgaaaagctcatttggaatgttatgggcatgatgaacaactgctggttcagagtgaaaaccaatgtgtgcaggccccacaagggtgagataggtatagtgtttgaacaccccacccaaccaggcaaccaatccggcggatggatggcaaaagaaaaacacctagagaaatcatctgagtccaacccaaccctcaagaagagtgtctcctccccattcatgaacaccacctcaaaaacctataccatgtctgaagtcagaaggcacaacaacgccgattcggcttggatcatagtccacggtcatgtctatgattggacccgcttcctcaaagaccatcccggtggcacagacaggatcctcatcaacgccggcaccgactgcaccgaggagttcgaagccatccactccgacaaagccaagcaaatgcttgaagactaccgaatcggcgagctcaccaccacctgctacaactctgattcttcatcgtcaaacccctccgtgcatgggaggtccgacaccatccctttgacccccatcaaggaagtgattacaccaatgcgaagcgtggctcttatcccacgcgagaaaatcccatgcaagctcatctcgaaaacctccatctctcacgacgttaggcttttccgctttggcctcccctccgacggactactcatgggtttggcagttgggaagcacatattcctatgtgtcaccgttgacgagaaactatgcatgcgagcctacactccaacaagcagcgttcacgaagtgggatacttcgacctcgtcgttaaggtttacttcaaaggggtgcaccctaagttccccaacggtgggatcatgtctcaacacttggactctctccccattggttctgtcttggacgtgaaaggaccacttggacacattgaatacactggcagaggaaacttcctcgttcatgggaaaccaaggtttgccacgaggctagccatgttggctggtggcacaggaatcacacccatttaccaagtggttcaagccattctaaaggatccagaggactgcaccgagatgcatgtggtttacgcgaaccgaaccgaggatgatatattgctgaaggaagagcttgatgagtgggctaagaagtatgataggttgaaggtgtggtacgtgatacaagaaagcataagagaggggtgggaatacagtgtgggattcatcactgaaagtatcctgacggagcatattccaaatgcatctcctgataccttggcattgacttgtggaccaccacctatgattcaatttgcagtccagccgaatttggagaagttgggctacgacacccagaataacttgctcgtgttttaggggactaaactagaatacattgtatgtgtatatagtagtttattgttatatataaataatggattctattagctgcttcgtttcaagatttttttatgtttcaatttttaaataaaagtgtacatgggacagctagctagctacgcaggtttacttttcctcgtcaacttttgatgtagacaagtatgtcaattattttgactacttttgcatgtataaataaataaataaaccagtcgtgcc

SEQ ID NO: 3510 - DNA, 958 bp, Glycine max
  Clone ID: GLYMA-23APR03-CLUSTER3477_9
acccacttgccccttattaaggaaatcaccacaacaccaccaccaccaccacgcgacgtggttcttaaaacacgtgagaaaatcccatgcaagctcgtgtcgaagacttccatttcccacgatgtgaggctcttccgtttgggcttaccctcaaaagaccagctcctaggtttacccgtggggaagcatattttcctatgtgccaccatcaatgagaagctatgcatgcgagcctacactccaacaagtagtgtggacgaagtagggttcttcgatcttgccataaaggtttacttcaaaggggtgcaccccaagttcccaaggggaggactcatgtctcagcatttggactccctctccattgggtctgtgttggacgtgaaaggcccattgggccacatagagtacaccggaagaggcaacttcttggttcatggaaagcaaagattcgcaaagaggctagccatgttggctggtggaactgggatcacacccatttaccaagtggcacaagcgattctgaaggacccagaggaccccacagagatgcatgtggtctatgcaaacaaaactgaggatgatattttgttgaaggaagaaatgatgtgtggcgaagaacaatgtgaccgattcaaggtggtggtacgtgtggaaactgctagggaaggatgggaatacagtgttgggttcatcacagaaagtatcatgagggagcaccttccagaaacgtcgacggatgccttagctttgacatgtgggccaccacctatgattcaatttgcagtgcagcctaatttggagaagatgggatatgatatcaaggccgatctacttgtgttttagggcatgtttgtgtattgctattgttgtgtggttaatgtatgtgtattattattgttgcttgtgtatcaacaattattcgaatatttcatgaataaatatatatgtgaaaagacga

SEQ ID NO: 3511 - DNA, 1701 bp, Glycine max
  Clone ID: GLYMA-23APR03-CLUSTER34792_2
gagggagtgctgaggctgcagcgggaaacagtggcaattcccatgttgagggcgggaattataattatttttctttaacaaaaccattttttcatatgcaatttgctctgtcaatctcatacctgtgcttctttctggttctgaactcctcctcagtgaagagagagggggtgtttggaacctagaataaaaacattttattgaattgaatggaaagaacagaacatatgagataaatttttcctccaagagtttcgcctttacaaagaatttctcctttcacaaagttcaaaatctcaaactacagatgatacaaacaagctagaatgaatcctttccccttacatcctcttatttatttcactcattagccccctaattaatcattatcttaactgtcttaactaactctccctttcctatagtcctaataggaagagggggggagaagaggcagacaaaacaaataactaattcctatttttggcgctggaaaatcaattcttatactttctaattaaaaatgtgtctcaaattctcaatgtaaatttatggttgagattaatttaggcacacattgcaatcatgttcaacagttcaaaattaatcctatcaaaatcaattctattcaactttaacataaacatgtctgtaaataattaatttaagtacttcttagaataatccggtactacataacaatatttgtattctcacaattgcattttaagttcacatgtcagtcaaactattggttttggggggcacgacgcctcctttggacctttattgttgtccacaattatgtattctctccaggatttgtgttgtaagtatcattttaaaaatgatggtttggcttgggtgaaggacaatatatgtattacctttaatgagtcagaacttaatacaccactttccaaaggggatagtttcatgttccagttgagataagtgtggttcttctattatattttcttttactaacctctgcaggaaaacaggtatgcaatgtggagttgatacaaggagacacaattgtcatgggatccgacgggcttttcgataatgtttttgatcatgaaattgtgccaaccattgttagatacaaagatgttgcagaggctgcaaaggcattagctaacttggcaagcagtcatgcaatggattcaaattttgattctccctattcgttggaagccaggtctagggtaagaattttccagggttttgagccacccttatggaagaagattcttggaatgaagcttacaggtggaaagcttgatgatatcactgtaatagttggtcagattgtgagttcatgagatttgctaataatgaaagaagacaaagtcctgattgctgagatcactagagaagggtttgccttaagtatactgcggcaactaaattttggtgatgctctgagaaataaggatctattcattgaagtgagttctcctgctttgcctgttgtgctgcatgcattgagaaaggctgtctgagatactcattcagaaatagttttgtttgagatgctataatctaagaactgtctctgatacattggagaagcatgattgtgaataataggagaaaaaaaaatcaaccagtaacagcaaacattatcttaaaaaaacaaataatatgaaacagaaaatgaaatacttcaaaatcattaaatggaaaaaaaaaaaa

SEQ ID NO: 3512 - DNA, 1646 bp, Glycine max
  Clone ID: GLYMA-23APR03-CLUSTER35065_4
atatatatgtatgtttttatgtgtgcatatatatgcataaaaaattacataaattagaaaagtaacctctaaatctcaccagacattaaactaaattgaaaaatcagcctttttccttgacaacaaaacacatcatcgtgtagcaaactttagaacccgaagagagagggagaacaaaggagagagcattcagcctcaaacagaggagtctgagaagagaaacaaaccaaagagataggggcaagctaaaagagtgagggaagaaccagaaaaggtcaacagttagagaagaaccagagaagagtgtcaaagaatgacagcggaggagagttgagggttgcacaaacactacacaatttagggaatcaaacaaaaaaaaagctttctttctaaaggattgtatgagccaacccagatcgttcacttttgcaaactgatttttggagtgcagtaatcctatgattccacgacttggagcaatgatccaacacaagtgaaccatagaatgctttctggtgggaatacaagtcacttgggaggtcaaaacgcattggaccacacaatcctatgtgtgggaggcgattttgacaacaatgagcttagtggcaattttcaaatgagaggcacatctgcccatgccagattaattttaaaaaagaaatactcatccatttattattttgttcaacttttcatattatatataaaaaaaaaaaaaatcaggaatggagttgcaaagcttgagtgtgaaactccgctaaattgttcaacagggttctatccccattattctttccatttatagtacacattatactgaatttatatggataagcttatatgcattttttcagaaaaaaatttacacatctttaggaatccattaatatgggagctggttcatgaatcaatgatgtattaatccattgtgacattgtttttaaatttctgttttatgcagcggcaatacaatgtttgaagaggaagaggctatatgaacagcaaatagagcaacttggcaatttccagttgcgtattcatgaccagatgataatgttggaaggtgccaaggctaccactgaaactgttgatgcattgagaactggagccgctgctatgagggctatgcaaaaagaaacgaatattgatgatgttgacaagactatggacgagatcaacgaacagacagagaacatgaaacaaattcaggaagcattgtctactccaatcggagcagctgctgactttgatgaggatgaattggaagcagaacttgaagagctagagggtgctgaattggaagaacagcttcttcagcctgcaactacagctccagctgctccagtgcatgttccagctgggtggcaacccactcgccctgtgtcttcgaagcccactgccgaggaagatgaattggcagctttgcaggctgagatggcactttgagcaagtcccttttctcagctgcgacactattgatttatgctatctattcattaatctgttctagtttgttggtattgcaattaaggtggcagttgagtgaatttgtgtgtgcaccagtttcatgttaaatatcaacctttgcacagttgagttcacttgtataataatagtttggaatgaattccctaaagttgcttgtc

SEQ ID NO: 3513 - DNA, 1052 bp, Glycine max
  Clone ID: GLYMA-23APR03-CLUSTER35128_2
agtgcagggctttcattacatcgatgccatggataccctctcaaggattagattcccccccacttgttacagccttcagttaccaaaaatctctgcattatctcgtttcccaaatgctttttccaaaaccactcaccaggtttcagtgctaagagtaagagcttctcgtccgctaattggttgaaactcatttttcagtgagtaatgcagacgaggatgtcttgcaaatattttttaaggagagagcattaaatggggattttatatcaagagcttccgatttactatggagaagagatttcagaagttctggtgattatgatattagcgagctcaccaacaacacttctcaacaaactgagcagatcatagagactgacaatgatgctggttttttgaaacttacaagaacccaagagtggttaacaggtgacaattctccaccaataaacacgaaggtgactgctaaggcgttgcaggacagcagcgcaagacgcaagaaactgaacatgctcaaatatgaatctctcaagagggaattactgcttctatctgtgggtattggattggcttgtagtggatattgcttggttattttgtccgtacaggttgctataagttatgcgattggagtccttttcagttgcttgtaccttcaactcttggtatcaacatgcagacaacctatccagtggaagatgttcctcaaatattcaagaaaaagaagtcaaagaagtacaaatgaaaacttgtgctttgaatttgatctaattgtgctagttagcattctctgtagttgacattttcttatcccttgttttggtcaaacaatatttcttaaccagaattggtataagaagtgaagaccttgaagatttcttggagaggacaatcaagggtagcggtatatcactttcatctcctaggctagttattccagcaacaatatatggactttggattctgtttcatcagtattttaccaatgacatttttgatttccaggtaatccttggcagcatgtatatcaaaaaaagttatcttaagtcgct

SEQ ID NO: 3514 - DNA, 1553 bp, Glycine max
  Clone ID: GLYMA-23APR03-CLUSTER35228_1
gtgtaagaatgaatttggctgggcgtggtgggccgtgcagcgcccgtggtggcccgcgcggcgccggagagcgggtcggggtcggtggcgcggccggggggggcggcgcggcgtgcggcggcggcggcagcggcggcgccaacgacggcgcgggcgccgcgacgccgtggcctcgcggccgctccgtcgccagctgcccccccggtgcccccacaccccccggtcgctgcgacgcccacgcctattgcaggctgtctcaccacttggcacactgcagtcgtctcaatcacgagtgcgataggttccaacagcaattgaagagtgtcgtagtcctcaatttttttcccttcacgttctctcgcgaatccacgtgtcaggtttgtgtgaagcaggaaactaggtgttcattttttagcaagagaggccttcatcaagtgggaatgtggatgcatgaatgccattgtggagcatcatctacttcatttgattgtttagggttaaacaatggttgggatctcccaagtagtttatgtccctgttgtgagcctagctctccggtatcagagcagttgcattgttggagagactactataagtggagatgcatcccgctagactcgcctgttgctttgcttcttcaatggccacttacaatatatcatgctgctcgacttgttggaattacagccttgaatcctgaaatcagtgataagttgtacattcattaccttggacctgagaaagagttgctacaacttgctgtgtttggagaattactggcactcttccccggtgtacgaattcatatagaacttgttggacctgcaattcctcctcaaaggggatggtgagatgattcacatttctaagtatccttgttgcaatgaagacgaatgtgaatgcaaaataggaagtaaaaatacattcttagaaacacaatctggtatcacttccactttgacattgcaactttggcaaggattctatcatgatcgatatagagatattgttaaggattcctttcctcggctaataattgctccaaatggtggcattgctgcttattccagttggttaccaagtattgagttaattaaaaagattgatgtcccagttgtttttactgattattgtgaagaagcttgtcatcttgcagccaattgcattaagactgtaactggaagtcctcttaaattgcctgttcagttaaatcctttcaggcagcccatggccgtggaagatagcgtgctgttgcttccctgctactcgaattgttatctttttgggatgtaaagagaatactcataatatcttcagccactatatagtcagaacaactaagctaattgtatcaaaagcaaatgattgctttatcaaatatgaatgaaagaaatagttggtaaataacaatagcaagctttgcaaatatgtttccctgaaccaatacagacctgtgtgttgggtcatttgcatcacgtgctactgccgcttcaatcattctaaacatttcactctgcttaaaaaaaaaaaaaaaaaaaaaaaaaaaaaaaaaa

SEQ ID NO: 3515 - DNA, 1531 bp, Glycine max
  Clone ID: GLYMA-23APR03-CLUSTER352_2
ggtatctttcatcaacagctacactctctttctccaccgtaactcacacttccggcgacttctccgatcgttttccggcgaaacctcaccggaagccatggccagagaatgagcctccgccgatcgccatgtcggtctcctgctccaactgcttccccgacgacgacgactccttccttctctgcggcgaggactcctccggaatcatcgattcctcgccggagtgttcctctgacctcgattctcccccgccttcggaggcggaggcggaatccatagccggattcatcgaagacgagcgcaacttcgtccccggatttgaatacctcaacaggtttcaatctcgctctctcgacgcttctgccagagaagaatcggttgcatggattctcaaggtgcaggcttattacgcttttcaaccactcactgcttatctttccgtcaactacttggatcggttcttgaattctcggcagttgccgcaaacgaatgggtggccactgcaacttctctctgttgcctgtttgtctttagcagcaaagatggaggaacctctagttccgtctctgttggaccttcaggtagaaggtgccaaatacgtatttgagcccaaaacaattagaaggatggagctacttgttctgggcgtgttggattggaggctaagatcggttaccccatttagcttcctcgatttctttgcgtgcaagttagattcatctggaacttttaccgggttcctcatttcacgtgctacacaaattatcttgtctaatatccaagaggctagctttcttgcgtattggccatcatgcattgctgcagcgtccattctccatgcagcaaatgagattcctaattggtctttcgttaggcctgagcatgcagagtcatggtgtgaggggcttagaaaggagaaagttatagggtgctaccaattaatgcaagaacttgtgattaacaataaccggaggaaaccccctaaagtgttggctcagctgcgagtaacaactcggacccgaatgaggtcaagtactgtctcatcattctcatcaacatcatcatcatcctcttcaacctccttctccttgtcttgtaagaggaggaaattaaataatcgtttgtgggtagatgatgagaaaggaaactccgagtaaagaaaaaaaggaacaataataataaaagagcaagggaagaaaaaaaaaaaaagagaaagagagagaggaaataaggtgggccaagtcgtctagaaacctcaacattttttagagggattttgctattaaaatttgacttgagtgacggtgtagattataatagtattagcatatatatctctatcgtatgtactacgagagtttgatgggtttggagtaatttttatttttatgttggtgactcattaatattgagttggcataattcctctaggaggggagagggattttgcaacatgttactgtgggagagtaaatgagagaagaaaaagaagggaaacactgatacagtggtagaagaattaatgtgattt

SEQ ID NO: 3516 - DNA, 1512 bp, Glycine max
  Clone ID: GLYMA-23APR03-CLUSTER353863_1
ctactaagaatcattttagtcatagttaggttggtgggcatcttctgttggtctaagtccaatgccaaccatgtgtttgtaaaattgcctcttaggaaaaaaaggcagaagggtacttgaaagtgaggggtacgaggaagataagttgttgtcttacaaggttgtatggttatggcaaatagtagcatcaactcggtgcttcatcaggggtcaatgttgccccatgaatttcctttagcttctctacagagacctgcaagctttcattcgttttcttcaacttgggctattactaatggagcccttcatgtctcaccaaaaaggtggaactgcagtgcttcttcttgttgcttccgtttcagggaatgcagatgcaggtggaaacgaattgtcagaagctgctccaccagtgagtttgttatttccaatgatgaaaactatagcaacaagcaagttgttagtctcactccccgcctttatgactatgtcctaaaaaatgttcgagaaccagagattctaaggcaattgcgacaggagaccgcctctatgcgtggaagtcagatgcaggtgtcccctgatcaggcacagctgctcgcaatgcttgtgcagattcttggagcagaacggtgtattgaagttggtgtttatactggatactcttcactagccatagcattagttctgccagaatcaggtcatttagttgcctgtgaaagagatgccaaatctcttgatgttgccaagaagtattatcagctagctggtgtttcacataaggtggatgtaaaacttggacttgcaatggattccctagaatctttaattctgaatggtgaagcaggaagctatgattttgcgtttattgatgctgagaaaaaaatgaacgagaaatattttgaactgctactacagctggtgagggttggaggtcttattgtaattgataatgtcctttggcatggaaaagtctctgacccgctggtaaatgaccctaaaactatcagcattagaaattttaatgaaaagttaatggaagacaagcgtgtaagcatcagtatggtacctattggagatgggatgacaatctgtcgaaaaagatgaccatttttgaataatttttttggtaagttctatgcaattgaacttacttcctccctttaggaataatgcttcttgaggcctgaggaaaccaaagttgtataattagcaaaagatcattggatgttcttagaacttgtgattttgcaaggtccattctcttaggctcctttcggggaagcatctgtaaactagatttgtgtgatctttgtctaccacaaattttgtacgcactataggcagcacttttagcaaccactatgttagcctgatactcagtgccctattacttttagaggcagatgtattgtactgagagaaatactagtactacattatttaacagattctttcaatacgttttattattggttgaaatttaaaggaaattatagagcaaaaaaaaaaaaaaaa

SEQ ID NO: 3517 - DNA, 732 bp, Glycine max
  Clone ID: GLYMA-23APR03-CLUSTER35590_2
gaagacaccgagcgacaaagatcgacgatgacggacgaaaccgaagaattggaaccgttgtttgattacagccgggttcagcctctgaaccccatcgacctcgatgatgattttgatgattacgaggatgtgatttgcgttgatagtaaaaagaggaagaattcccaggctgttgggaatgagaagactaatgggaaaggagtaacagtggtggacattgaggatgatgattggttgcctcctccaccaaagatcgcaagtaatgcacagaagaccacggacgaggactcaactttgaaaaaattgagattaaagaagcaggaacttgcctggtttgctgaatcagcaaaagaattgttaaaagatgttgaagagtcatcaaaattggaaattaataattcgttgcagtcttctgtggttggtgtagatgagaaaagtacagagcattctgaaagagcaaagatggtcatttccgttcaggacaaggatggaacaaagcagattcgtatgttcatggatgacaattgcttcagcaaatatgtttacattgtgaaatgtactatttatattttgggacgttgataatgttattgttcaggtaaaatctagttgtaattttttggaatatactcttacattgtgaatgtactgttttttttctttcttcaaaactgcatttctttttataggtcattggacattttttcaaatcagagacaatttttagtttaa

SEQ ID NO: 3518 - DNA, 1305 bp, Glycine max
  Clone ID: GLYMA-23APR03-CLUSTER35884_1
aaaacaagttttctagtgttttacaccttgctcttgggacacgtggcttgtcgagtcccttgagagaagctcctaacaaataaaacgaaaccatacttccgaagtttcgcagtcggaatctccgtatttgaatccaaggacgcatacatcaattcaattctgaatctgaagcttcccatatgtcaacggaagcgcccaagcgcgaccaatggcagtgggagaacgccaccgccggcgccgccgctggattcgccaccgtcgccgtcatgcatcccctcgatgttgtccgaactaggttccaagttaacgatggtcgagtctctaattttcccagttacaagaacaccgctcacgccgttttcactatcgctccgttccgagggattaagagggttatatgcaggcttccttcctggggttcttgggtcaactatttcatggagtttatatttcttcttctatgacagagccaaacagagatatgcaaggaacagggaggggaagttgagcccaggtctgcatcttgcctcagcagctgaagcaggagctatagtttccttcttcacaaatccagtatggctggtaaagacaagattgcagcttcaaactcctcttcatcagacacgaccatactctggggtttatgatgcatttaggaccataatgagggaagaaggatttagtgcactttacagaggaattgttcctggtctatttctgcaggtctctcatggtgctattcagtttacagcatatgaggagctacgcaaagttattgttgattttaagagtaagggaagtacagtgcataatcaaaaccctgataaattgctgaattctgttgattatgccgttcttggagcaacatcaaaactggctgcagtacttctaacctatccatttcaggttatacgggctcgattgcagacccagtggtgatggggttccaagatatatggacacgttgcatgttgtgaaagaaactgcacgatttgaaggtatccgaggtttttacaaaggaattaccgcaaacctcttgaagaatgctcccgcttcttcaataacatttattgtttatgaaaatgtcctaaaattgcttaaaccagcaagaaggaatgactgagtatttcattttccttcatgattctttcctttctccttgtgtttaatctcctttcttatttgatattttttgtagcattgaaaaattgctcatttttcccatcactttttaatgatgggattctacacaatctaacaacgtggatgcagcaatttctggagataaaaatcatggtttttttt

SEQ ID NO: 3519 - DNA, 631 bp, Glycine max
  Clone ID: GLYMA-23APR03-CLUSTER358995_1
aataattcaaagctccttggtcatcttatcatgactagatttgaagtggttttcatcgctaccccagccctcggcaaccttgttccaattgtggaattcgcggatctcctaaccaaacacaaccctcaattatctgcaaccgttctcactgtcaccacgccgcaacgacccctcataagcacctacgtccaatcccgcgcctcctcagccactaatctcaaactcctccacctccctacagtggatccacccacacccgaccagtaccaatccttcatcgccttcgtctccctccacatccaaaatcacaaacaccaggtcaagaacgcgctcctcaacctaaaaaaaaacgagtcaaactcgtttgactcggttcgactcgtcgctctcttcgtcgacatgttctccaccacgctcatcgacgtcgccgccgagctcgccgtcccgtgctacctcttcttcgcgtcaccggcgagcttcctcggcttcacgctccacctcgaccgagtcgacccggtcgagtcggaatccgagttggcggttccgagttttgaaaaccccttgccacggtccgttttgcccaacctcgtgttggacgccaacgacgcgttttcttgggtggcataccacg

SEQ ID NO: 3520 - DNA, 824 bp, Glycine max
  Clone ID: GLYMA-23APR03-CLUSTER35923_1
aattattccaacaacttatcaaagaaccaatctttctctcattaccagccatgactactcaattcgtcattctctcccttctcgtctcttgtaataccctcatttacgccaatgccgaagacacgggtttcgtgggctcactagatcacaaggcattgggtttaaagaagaaagacaaggttagccatttccggttctacttccacgagaccttcaccggaagcaacgccaccacggtcttcgtggttccgccgctcccccagtacagctccaccagctccttcggggcaatcggggtcatggacaacgtcttgacggcgggaccggagcgtacctcgaaggtggtggggagagtggaggccttggccgctgccacgtctcaaacggagtttaatttattgatattttttaacttcatattaacccaagggaagtacaatgggagcaccatcaccgtgttggggaggaaccgcatctccctaaaggttagggagattcctgtggttggaggcactggggtgtttaggtttgcaactgggtatgctgaaactaacaccatcttttttgatccacaaactaggtctaccattgagtacaacatctatgtttctcattattaatgagttaaagcccaataaagagactttcatcatcaaaggtgcaagctaaggggtgccttgcccatatacaaaaagaataagaaagcatctaaaggttatacccttctacatttgtattgatacgtatgctttgtacttagtatgctatgatgtcaacaagtttaaaaaaaaaaaaaaaaaaaaaaaataaaaaaaaaaaaaaaa

SEQ ID NO: 3521 - DNA, 1038 bp, Glycine max
  Clone ID: GLYMA-23APR03-CLUSTER360333_1
aactaataactcttcatatacaacttggtttgatgtgtggacattgcaccccaaaaccacattgccataccgttaaaagggtgtgttagagtttcacaatttgttccattcttttcacccttttaccactctttcatcataaattggagtctcctatagtttcttatatactacaatatatagagagagaaaaaagaaagaaaggaagatgaatacatttagttcagaaatatgcagtagtgggtgtgagtctggttggactctatacctggagcaatctttccttaaccagaaggctggtggaactgaggggtcttatgaggaggaacacaaagacaaaagattcaaagatgaggaggaggaggacttgtccatggtttctgatgcttcttctggacctccacatttcccagattatgatgaggctaattacttcaatgaagaagtcaatggttgcttttattcagcatccaagaaggcagtgatgcaggccaagagtggtacaaagaagaagaaaattaaagaaaatcaacaacaccttgaagatcagcagcatctgccttcttttctttatgacactgctagctctcctgtctttgacttttccactaacaatgttaatgtggccaaccaacaaatttccatagggagtatgctagattattctcaaggtttttctgcaacttattttgagggaagatcatcattccaaggagaacactttggtttcttacaatcaggaaatgagcttcaaggcaaaaaatggtatggagggaaagggatggggataaggtgaagatatatgagttttgctatggatggagaatcatggtgttgatggaatttagtattgaaagggaccctgtacctttctcttcttttctcttgttaatgtagtgggaaacaacctgaaaagacaagttagatttctttttttttgctgtagaaatttaattttgttgtcaatgaatgatgattacaaggtaaaaaaaaaaaaaaaaaagcttatcgatcccgtcgaccctcgagggggggccc

SEQ ID NO: 3522 - DNA, 1893 bp, Glycine max
  Clone ID: GLYMA-23APR03-CLUSTER36118_1
cttgcactttttgtttcaggtcattcgcatcgacacctcatctctgccattcgattcaacaacagcagccccgactacgcaaatcccgagatattattgtcctctttggatgatctgaaagaagcgctgcggtgaaggggtcccgatagtcttcgcgccaagaaagttcttcttcaattattaggtcaaatcggtgtctcttccttcacggtggaggacagacggcgatgcagcagacggtgctatcgaaaccgcgaaacttcatttcttcggtgccacactgcagctccgggggagtgctccacctttccccccactctcgggtcccccagtgcatcatctcatcgcgcctctggctctgttcggactgccatgtccctcccgggtttacgatgtgaaaggattgaggaagacgcctgtgaaattgtgccgcgactgtccttctctccccagttgctgctcttgatttatcagtgcgtcggcaataatttttggctatggtttctgctttgaatttgtatgtatgtatgttctttaacataattcatttaaggcaaaaattctttatcaaatttattttcaatgaagagaacaattagagtactattataatgttttattttacttttcattctctaatatcatgactatttcactttattgaggaaatgaaaactttagctccgatgcactatagctcgatatagatctgatggtttgttcaagaacatgataacaattctgtcaatatcgatgttaattgattgaattgccctatgcttgagggaacatgtttgtggggttaatatgtaaaagtaattttttggaagacttcatctcgcgagtgattgcaacgatgttgagtttcttgtgtagactctaggtgagtgttgctcctatggttcttgtgcaactaataggtgtgttgaatgtgggaagagttctattgcgggtgtgctttctacaattaaagggccttgggctatcatctactagcaggtaacaccaagtggatagttcgaggactctttggtttggctgagatgcatttggtaggcgaagcctccttgttcactagccgacagtagataactcaacctttctgctttcttttgtgtcacctatttcaccagttcaacaggcctctggctcaattcaacctgaaattccaatgccagctcatattttttctaaatgctttaaaggaatctgtgttatagcgcacttcaatgtatactatttatcagactgtgaatacaagtggtagagctccatttcatcacactgactcaagtcgttgacttcaattttcttctcatagctcgtccaagcaaattgaaggtatcaggctactagatttatcgtcaaagaagctgatagatgctggatttatgtacaagtatgaacttaatgaaatgcttcatggttcaatcaaatgctgcaaagaaaaagggtttcctgtgaggtagtggtttacccttttatatatcaaaggatgaggatggttatccatacaataagagaatagttatctgtgctaaaacattattgttcaagctagcatttggacttgaatgtttttgggattggactgcacaggaaatagaaaccactgttattaccagtgtaatatggtttgtattaaataaatcttgtaacatgtagtgtattgattgtgacaaatgtacatatatttcaccaaagtaattaagctgttagagttttcacagacttttagaaatacttttataggaatatgcatttcaatttcaccagttagttagtacttaattaattagtacctatatagaggctagaggagtcactttttgtactcaccccttctcattattagtataatccattttcagttagttacaaaaaaaaaaaaaa

SEQ ID NO: 3523 - DNA, 712 bp, Glycine max
  unsure (1)..(712): unsure at all n locations
  Clone ID: GLYMA-23APR03-CLUSTER36319_3
cgaaaaaccatcgtcttcgttgctaattcgattctcatctccatggcgctgcagaggttgttgaagaggaaaggaggcgtcgatgaactcaacgacgatgtccctctcgcttcgccagccaccaagattcgccgtctcgacgctgagttgccgccaattgtggaagaggacaaaccattactgttacctaacgaggagagagctctcgtgctcttcaagcctctcgttcattcccattcctctttgctctctcactctcgatcctgaccttantgaatggaattaggaacaatcaatatctgtggtccaaagaatgtgagcgcgtgacagagttagaatcacgtgaaaaggaaaatgatgaattggctcttgtgccttgggtaccttcaccttcttaccactaccagttctcccctgttgatgattctgacaacacaaatgcggagttgatggaagctgatgaaacgggatccatgatgatggatattgaacaagaacatgacactgacattgacgctaaaatttcaacatcaagcattcactatccaacgacacacggtggaataacagaggggttccagcaacactgcttgttaccacagcttcctcacaacacctcaacccccatcacatggacccgctgaaattttggtgggcttttttttttttttttgatatagtgtttaagtatatcctactattttttttttac

SEQ ID NO: 3524 - DNA, 2020 bp, Glycine max
  Clone ID: GLYMA-23APR03-CLUSTER36337_1
tccgcgacgtagacccttcccccggattttctcgaaaagattgcaagggtcccccctttgtgagacacacaatggttctctctcttccaaaccctcctcatggatcccgcttcatatgtccaaactattgcaggaatcttagcattgttaattgcatacattttgtttaggtccgttaaatctcctaatggatctaaacaaagaaagggtaaccaagtacccgaacctcgtggtgctttacctttcataggtcatctccatcttctcaatgctagaaaaccgtatttcaggaccttttcggccattgctgagaaatatggtccaattttcattctcaaattgggttgccaccccaccttagtcgtgaatagcagggaaattgccaaggagtgcctcacaactaatgacaaagtttttgcctcaaggcctatcacatcagcagggaaaatcttaggttacaacaatgcagtttttggtttttccccttatgggaagtattggcgcgaaattagaaaaatggccatccttgagatcctctcaagctataagcttgaaaagctaaagcatgtgagagacactgaaacattgtctcttgtcaaagacctgtactcatcaatatcatgtccaaagaacgtgaatggctcaacaactcacgtgcctataagcaatttattggagcacatgtccttcaatataattgtgaggatgatagttgggaagagatttggaggggacacagttaatcaagaagacaatgaggcatggaggctaagaaacgctatcaaaaatgccacatatctatgtggtgtttttgtggcagctgatgctattccatcccttagttggattgatttccaagggtatgtgagtttcatgaagaggactaataaggaaatagaccttattcttgagaagtggctggaagaacatctaagaaagagaggtgaggagaaggacggtaaatgtgaaagcgacttcatggatgtgatgatatctgctttccaagaggaagaagagatttgtggttataagcgggagatggttatcaaagcaacatcagtgcttcttatccttactgcctcaggaagcacagccataacactaacatgggcactctccttgctcctaaaccatccaaaggtcctaaaagcagcccaaaaagaactggacacccatttaggaaaagaaagatgggtccaagaatctgacatagaaaacctcacttatctacaagccattatcaaagagacccttcgtttgtaccctccagcacctttaactgggataagggaagttatggaggattgttgtgtggccgggtaccatgtcccaaagggaacacgtttgcttattaacctatggaacttgcaaagggatccaaaagtttggcccaaccctaataagtttgaacccgagaggttcctcaccactcatcatgacattaactttatgagtcaaaacttcgagttgatcccatttagcattggaagaaggtcatgtcctggaatgacatttgggttgcaagtcttgcacttgactctggctcgattgcttcaagggtttgatatttgcacaaaggatggagctgaggttgatatgactgaagggttaggagtagctttgcctaaggaacacggacttcaagttatgctccaaccacgtcttccattggggctttatgaacgactttgaataaagtttgtgaaagttaaatgtaatatttttattctcatatattgcatccctcaataatttgactgtactttgggttgtgatgtcttattttaccagtcgtttatgtagttcaattgtaacaattagtagtacgtattggaatattaaaaaattgataaaaaaaaaaaaaaaaaaaaaaaaaaaaaaaagaaaaaaaaaaaaaaaaacccggcgccccgggggaccactttttttttaaaggcccccccccccgggggaaccccccctttttcgcccctttagggggggttatttttcagttgtgggaaaaactaggggaaaaggt

SEQ ID NO: 3525 - DNA, 1556 bp, Glycine max
  Clone ID: GLYMA-23APR03-CLUSTER36586_1
aaaaaatctccttctggttctggcgcgcgtccccacagttaccactttttttcttcttcccatcaaaaaagaaataacctttttacatggtcatggtcacagactccaaacccatcattccccgccgcggcctcgtcgtcggcaactactgccatgacgtcctccaccgcgacggcgaggccgtcgccgagaccctcggcggcgctgcctccttcatctccgtcatcctcgacgccctcaccctccccttccacaccgtctccagggtgggccccgacttcgcctacgccgccgccacttccaaccatccccccttgataatcccaacctcccaaaccatgctcttccacgcccacttcggttcggtctacccggaccgcctcctgaaccgcgtccgatcctgcgattcaatcctaccctccgacctaccggaccagactcgattcgggttcggactcgcggtcggggtcggcggtgagattctcccggagacactggaaaaaatgctatctatctgcgaccacgtgttcgtcgacatccaggctctgattcgcaggttcgacaacatcaacggtcgcgtgagccacgtagcgctgagagacagcgggttcttccacctcttgccgcgcgtcgcgtttctgaaggcttccgcggatgaagccgtttttattgacgtggaggaggtgaggaagttgtgttgcgtggtcgtcacgcacgggaaggatggctgcgaggttttttgtccaaacggtgcgtttaaggtggcgccgttcgtggctgatcaggttgatcccaccggcgccggggactgctttctcggcgggtttgcggcggggattgtcaggggtttggccgtgcccgatgctgctctgttggggaacttctttgggtccattgctgtggcgcaattgggaccgcccaagcttgacttcaacttgattcagatcgttaaggatgagatgcacaaaaggaagctgcagggtattcccttcttagaaagaagagatgagtctccagggtttcggaagccacctgaacaagatcaattctatgcatctcttgttactgccaaagccataattatgtgccagattcaagaatctggacggaatctactaagctctcctaaagtgttggagcaaaacaacgctaagacgatactttcactgacttctgtgcacgaggaaccaattccaagcgttgatggtaaaccctaatatgggatggttgaagttccaaaactcactgtaattctccagttcacttccttttcatatcaaatagagatctattagcttccaggattctttcattttatggggccttttctacaccgagggtgtacggatagattttttaatccaaggatcatacaaggggaaaaaataatcccaaagtttattcaaagcatcaaaaaatctgttaatttatggtgccttttccacacctagtctcacgtgcagcctaatttatagttctacttgtaccaaattactaataaattattcttaaaaagaaaatcgagattgaaattccattcaaaaaaaaaaaaaaaa

SEQ ID NO: 3526 - DNA, 2913 bp, Glycine max
  Clone ID: GLYMA-23APR03-CLUSTER3667_1
tcgagtcagctacgtaggcccttccccccgatttagttattgaatcgaattgccaacaacctctgctaccttacattccatggactctgaaattggaatgcttcacctgatgaggaagaaccagaacttctgtctgagaatcaagtttatgaagcacagatggtaactcaactgaaaatatcagatgtaccacagccagcaatgataagatccccaatttctcaaggatggcctatcagtgaagagagagtatcagaatggctttggaccttgcataggatagttgttgatgttgtgaggactgatagtcatcttgaattctacgaggacacgagaaatttagctaggatgtcagatattcttgctgtctatgcatgggttgatccttcaacagggtattgccaaggtatgagtgatttgctgtctccctttgttgtaatctttgaggataatgcagatgcattttggtgttttgagatgcttttaaggagaatgagagaaaattttcaaatggaaggcccaactagagtgatgaatcagttgcgagcattatggcatattcttgaactgttagacaaagaaatgtttgcccacctgtcaaaaattggtgctgaaagccttcattttgcatttcgtatgttgctagttctctttcgaagagagttgtctttcaatgaggctctttcaatgtgggagatgatgtgggcagctgactttgatgaatccatggcttatgatttagaagagaactgtctggaagcattggagttacaacttcctagagactcaagcaatgatatgagagaagaaattgcagatagtgatggtggtagtgtgaagagtggttcacggtcaaatcataatgaaaatgacaacacaaaagccagcccacagtcaaatcatgaaagagctgatcactcagtatatgacagcaaattgaagtcgctctcatcccataccttttgtggcttggcaaggaatatctggcctagaaatcatcaagttcaaatgagcagtatttccttaacaaggaaaggaaataatgagttggccatattttgtgttgcagcaattcttgttttaaaccgtcagaagatcattcgagaaactcattcctttgatgatatgataaaggcaggtaatcaagaaaatgaactatgttgcagagaaaggggactaaggtaatatcattgccattatacttgagacagaagcactgagtatcacttatatggctctgcatttccaaattggagtttgggtgttaagactttagtcattacttatccactttggatgggagactttgcagcttaaagtggttttgctttcagaggttcatccagctgctgtatgtccattgtcttcattactcttttttacgagtgaaaagattgacaaggggatttttcatcactctggttgctcccaggtttgatcaatttgcagtcttggatacctggcacaggttacgcaaacaattctctttctttgaacttttggttcagctcatttctggagaaagtcgtacaaaatttatttctacccagaggatttggagttcggaaaaagcacacgcatacaagtagaaatagagggtgaatatgtcacgggattgttgtaagatatggaaacaatgtagtcaatttttgtgggtgtttgaattgactgaggataggatttatgttttatacatacatactacatcaagaagattttttagtgacttgaattgctggaactcataaattacaaaggataaagagggtattattcataattcatgtattattctttaccttaaaaacacaaaacaaatctgtttaaactggggatatcggagtccactcaaaacatctgatttcgcctcctacttatttgggttgcccttatttgtgtatcggcaatatcggcgtatctctccttggttgcctgttaaaaccctgtaattccccatcttgtacattgatgtagcaaaagatttccgaaaatcttcaaatccaacagcgaactcctcggagatctgtttagtgtcatcactatatagtaattgttgatcaactccaaggacagcttcgtgggataggacccttctgtagtatgattctgtgaagttgtaacttgaccctgattctgggtttaggtgtaccagagggtctgcttgtcccttctttcttggcgggcaaagttttctcaacgactctagtgaagtaacactcatgcttgggtcgggttttccggaaccattgtagttgtagagccgatcaacaataaagctacaatgtgttctgcccattgtgtgtgctcctaaaagtgtggtcatgtctagttcattcaagttcctggatttgaaatattccaggactttctgcagcgagacggatggtgatggcaggtctactgatgcagcatctgatttcatgccatcctttctacctgttaaaactgggtaacctgctccacctgccagtttaacagcatccctggtggcgaggtggagtatatcagcacaagacacagttccagggcatcgtgattccagaacagcttttatcttgtcaatgaccgcaaatcctccaagcccccggttttgtgctgcttttttctctggatttgctccttcgtcaagcagaattgatgcatcacatccagtgacaaaacagtcagcataaaccaagcggagaagctttgctgtaatgcttctgtcattcttccaaaacaggttcacttggtgccggacatactcctctgcgtcgtgacatctattcgtcaccttataataatgccaccgcaaatttggtgttttcacctctgcatctgccaatccataacacatgctcaccactacgagagctaccagtggaaaacccacacacataactctccccatttaggtgtttttgtttgtttcac

SEQ ID NO: 3527 - DNA, 2219 bp, Glycine max
  Clone ID: GLYMA-23APR03-CLUSTER3686_24
ctggggttctgtttgttttattcaattttatctttttcgttcatagttcaaaaagtttaaacggtcttagatttaggagtattcttctaggaaaatactaaatcccaattcccatttcccacaacaacctctctctgtctctctctcttttcggcgcaggtccccttgttgtgtgtgacgctctcgcttgcatcagaacctactatataaacacagcgcgcgctcgaaaccttcttcaactcaaaaaaaaaaaaaaccaaaatcactcaataagaagaaggaacgaacactcgctctgcaaaagtgtgtgaacgaaccctaattaataaaaatggagaagaaggagaacggaccgagcgagaaggcttccaatggcggaatagatggacccacaaaccctatggtcacgcctctgctcaatgatctctaccaattcaccatggcttacgcttactggaaagctggcaagcagcaagaacgtgctgtgttcgatttgtattttcggaagaatccgtttggtggggaatatactgtcttcgctggcttggaagagtgcataaggttcatagctaatttcaagctcactgaggaggagatcgattttgttaggcaatgtttatcttcctcttgtgaggatggattccttgactacctaagaggactcgactgctctgatgttgaggtgtatgctattcctgagggaacagttgtttttcccaaggttcccctgatgagagttgaaggcccagttgctgttgttcaattgctggaaacaccttttgtgaatctaattaattatgcatctttagtttctactaatgctgcaaggcatcgtaatgttgctggaaaatccaaaactctacttgagtttggattacgaagggctcaggggcctgatggtggagtaggagcatccaagtactgctatattggtggatttgatgcaacaagcaatgttgcagcaggaaagttattcgggataccccttcgtggtactcattcccatgcctttgttagttcatacatgagccttgatgagattacagacaggtcacttaacagaaaagatggttcaagtacgtgtgatgattttgtcagtctcgttcaaacatggttgaacaaaattcagttatcaaatggtgtttttggtgagaccaatcaaagtgagttggctgcattcacatcatatgctttggcatttcctgatggttttcttgccctcgtagatacatatgatgttatgagaagtggaatccctaatttctgtgcagttgcattagctctcagtgatttaggatacaaagcagttggcattagattggactctggtgaccttgcatacttgtcttgtgaggtcaggaagttcttttactctattgagaatgaatttggagtgcctggatttgggaagttgcaaatcactgctagtaatgatcttaatgaggaaacattagatgctttaaacaaacagggacatgaggttgatgcctttggaattggtacatatctagttacatgttatgctcaagctgctttaggtgttgtcttcaagctggttgaaataaataatcagcctcgtatcaaactttctgaagatgtatcaaaggtctctattccatgtaaaaagtgctgctatagattgtatgggaaagaaggttatcccctggtggacataatgactggagaaaatgagccctctccaaaggtgggagaaagaatcctgtgccgtcatcccttccaagaatccaagagagcatatgtggtgccacagcgtgttgaggagcttctgaggtgttactggtctgggagtacagatattaagaaagatactttaccagctctaagagatattagagagcgatgcatcaatcaacttgagcaaatgcgacctgaccacatgaggagacttaacccaactccatataaggttagtgttagtgcaaaattatacgacttcattcatttcctgtggctcaatgaggcaccagttggggagctacagtaaggcaaatgtgctttcggagttcagaacccaatgggttgggaaaaaaaaagttcagttcagcggaaatttttccatacagtatttttttatcagcatttctccatacagtatagatgcattcaatgtgttttgattgtttttcaaaataaatgattctgtatattggtgttggtggaaccattattctttgagcatccttaccctttatcacatt

SEQ ID NO: 3528 - DNA, 752 bp, Glycine max
  Clone ID: GLYMA-23APR03-CLUSTER36875_1
aaagttttgattagattccagatagcgcgaacactcaacgatggctatccgaatcaactccttgactctctcttccgctttacctaagatggagttaagaggtggaatttcgggcctctgggttggctcgcagatgatgccccaaatgcgaaaggaggctcgtggacgacgagtttggaggcgaagaaaattgataaaaaaggatgaatatatgcaccccaaaatggagcgcattcctttcatggaggagcaggtaaggatggtaagggaacagggaaagctcttgacgatggacatagagaggttaatgttgtcagaagataatcggtttgattttgtgaatgagatagcagctgaggccaattcttatgttgagaacaacagggatgagtatggaggtgagaagaaggccattcttcatgttttgagcaatcgaatgaatgatactggaatttacaggccagaggcatattatgagcctgatcccttcaagcccggacctcattatttgagagaagaatttacataaaatgttatgctggcatcttaaactagtgacaagaatttacatctttgcttcacttagcttaattgattttcttcttaattagctgctgttgtttgtatgtatgcaaatcaaagccatcttcgaaccggaaataaattacaattaagaggtattattttccaaaaaaaaaaaaaaggtagtattttctactcattctaaggatgttaaaaaaaaaaaaaaaaaa

SEQ ID NO: 3529 - DNA, 839 bp, Glycine max
  Clone ID: GLYMA-23APR03-CLUSTER36985_2
tcactctgcttctgtgttctgtttctcaattcaactttccaacaagccaacggcaatgccagagctgcaatcgaagcccgaaactgccctagctccggctccggttgcggctgaggtgccatctaacgacgctgttgcaaagaaagcttctgaaacagaggaatccaaggctactgttgttgcatcagagaagacaccagttcctgaaaacaaacaaagctcaagaggatccattgatagagatatcgctctggcagaagtagagaaagagaaaaagctgtcctatgtgaaggcatgggaagaaagtgaaaaggccaaagcagagaacagagctcaaaaacaactctcagctattgctgcttgggaaaacagcaagaaggcaactcttgaagctgagctgaaaaaaattgaggagcaactggagaaaaagaaagcagaacatggtgaaagaatgaagaacaaggtggccttagttcacaaggaagcaggggagaagagggcaatgatcgaagccaatcgttgtgaagaggttctcaagacagaggaagtggcggcaaaataccgagcaacagggaaccactccaaagaagaccatagggtgcttttgatttttttgcattttgtgtctgatttccaaaataatttgtaattgcccattttgtccgtggtttctaatgttttgttctcaatgttttctatgtctaagaaatagtccaaataaaacaaaattttgtaaatgtcttttgttttgatcatctagcttgggcgaaatgttctatgcaaaggtggtttttcctaagagtactactctaatatcaactaattgagtttctctttat

SEQ ID NO: 3530 - DNA, 1159 bp, Glycine max
  Clone ID: GLYMA-23APR03-CLUSTER3703_3
gcgtcgcgcatttagcgttgctttgaagctctctctctccttcgctttcaaactccgttcgtcgcctcgctcgtcgttacgcaatctctagtgaagaagggatgggtttgtcgttcacgaagctgttcagcaggttgtttgcgaagaaggaaatgaggattctgatggtaggtctcgatgctgctggtaagacaaccatcttgtacaagctcaagcttggagaaatcgtcaccactatccccaccatcggatttaatgttgagactgtggagtacaagaacatcagcttcactgtgtgggatgttggtggtcaggacaagatccgtccactgtggaggcattatttccagaacactcagggtctcatttttgtggttgatagcaatgatagagatcgagtggttgaggcaagggatgagctgcacagaatgttgaatgaggatgaacttagagatgctgttttgcttgtttttgccaacaagcaagatcttcctaatgcaatgaatgctgcagaaataactgacaagcttggacttcattcactccgtcaacgccactggtatatccaaagcacttgtgcaacttctggagagggtctctatgagggtttggactggctttctaacaacattgccagcaaggcatgagacatttgaaaatttttggtcttgtctggtgatttcctgctgagtatggcggttcttggagaaagatgcttatcctttcttgtcaatgttgtaatagcagaatgcttgctagaagtattctcttcttttgtgtaacttgggtttgtatgattgcttaaattagctaatacttttagctataattggaactcttggaccctcttgtgcgtgccttgtttgtgttcattttgttagtttgatttttggttgaatatttccgtgcgttttgttcttggagtgcttgttggtgatgatagttgaatgaggattagaaaattgcgccagtttttgctcttgggccaagagtcacctgttcaaatattgtctttgcgaaattccagttcagatagacttggtacctgtttgttttaaagttgagcagacctaattttgatagaattggttaattatttattgtgattcagatgtgtgtctaaattaattatagtaataaagtttatattgaaccatgc

SEQ ID NO: 3531 - DNA, 1376 bp, Glycine max
  Clone ID: GLYMA-23APR03-CLUSTER371820_1
ataaaccctgcaccttccaacaatcacttctctcctccttccttctcacttctcacttctcaccaattacgttaccttgcactattattctatacaactgtaaacatccttaattgcaaaccctctctctctctccttaaataattctcataaaaaaataaaataaaaattaaaactaacaaagaaaccattttgcacaaacccaattgagagtttgagacccagatgatgatgatgaacaatactattattccatggtcaaccattggcgttgtgattgcatggtacacttccaacataggggttcttcttctgaacaagtacttgctaagcaactacggctttaggttccccgtgttcctcaccacgtgtcacatgctggtgtgctcgctcttcagctacgttattgtttccgttacggaagctgttccgctgcagcgcgtgcggtccaggagccagttttggaggatcgtggcgctcggcgtcgttttctgcttctccgtcgtttgcgggaacgtgtcgctcaggtacattccggtgtcgtttaatcaggccatcggcgccaccacgccgttcttcaccgccgttttcgcttatgctgtcagcgccaagagggaggcttgggttacgtacgccacgctcttgcccgttgttgcgggcgtcgtcatagctagtgggggtgaaccaagttttcatctgtttggatttataatctgtgtttcatcgactggtgccagagcatttaaatcagtgcttcaagatattttgttgtcctcagagggagaaaagttgaattctatgaacctgctgctttatatggctccaatagcagtgatggtcttacttcctacaatattgttgatggagggaaatgtgattcagatcactatggatcttgccagaaaggatataagaattttttggtatctgcttctcagttcttctcttgcatattttgtgaacctcactaattttttggtgaccaaacatacaagtgcacttacccttcaggttttaggaaatgcaaagggggcagttgctgtggtggtctcaattttgatattcaaaaaccccatttcaatgataggaatgcttggctatgcactcactatcattggagttatcttgtacagtgaaaccaagaagaggtatagcaaaaattagtaaaattaacaagattaccaatcaaagcagggtgtgatttaccacaagcgagagggccaacaagttatacttatgcatacaaaattatgagcttgcagcaaccacttttgttacacgtgaacaagaatatttcccccctaactatttcattcattgcaagcgttttgggagtagtcacactccccataaaccctttaaaaaaaaaaaaaaaa

SEQ ID NO: 3532 - DNA, 2133 bp, Glycine max
  Clone ID: GLYMA-23APR03-CLUSTER37261_1
tcagctcagctacgtaggcccccccccccccaagttttaccttcacaagtttcctctactgtcaaagagcaaccgactacaaaaactggtatcaaaagctaatgaagagaattctgatgatatttacttggatgatttccctggaggaccaaagacctttgaaatatgtgcaaaattctgttatggaatgactgttactcttaatgcttacaatgttgtagctgctcgttgtgcagctgagttccttgagatgactgaggatgttgacagaggaaacctggtttcaaagattgaggtgtttcttaactcgagtatctttcgtcgctggaaggattctataattgttctccaaacttctaaatctcttctgccatggtccgaggatctaaagatcgttggaagatgcatagattccatagcttctaaaactagtgtggacccagcatacatcacttggtcttacacttgtaataggaaattaaccgaacctgataaaattgtagaggacaagatgacatttctagagaaaattgagtctgttcctaaggattggtgggttgaagacatatgtgagctggacattgatctttacaaacgagtaatggttgctgtgagatcaaaggggagaatggatggtgttgttattggggaggcactaaaaacctacgcattaagatggatacctgattcggttgatacattggtttctgatgccaacacctcaaggaccaaatctgtggtagaaacaattgtctgtttactgccatatgataatggcatcagttgttcgtgtagtttcttgctgaagctattgagagtggccatattagtcggagtaaatgagtcatcaagagaggaattgatgaagagcattagcctcaaattgcatgaagcttgtgtcaaggatttactgattccagcaaggtctccccagactaccacatatgatgttcatttggtacaaggtattttaaatcatcatatgaatcacgaaaagggaatctgcggtatggaggttgctgaggagaaacatggaggagaagataaatatactttagcacgtaggtctttattgaatgttggcaagttggtggatggttatcttggagaaattgcacatgatcctaatcttggtctctctagttttgttgatttgtcacaatccattccagattttgctagaccagatcatgatggtctgtacagagcaatagacatctacttgaagcaacacttgaatttgacaaaagctgaaaggaagaagctatgtggactgatggatgtccggaaattgacagcaggtgcttctgtacacgcagcacagaacgaacgccttcctcttcgacttgtagtgcaggttctcttctttgatcaggtcaggtcttctatcagctttcgaacacccggcagcaatagcacacgtgaccctttatgctctccactgtaccgagatgagggatgtgtgacaacagcaggagatagctgtcaacccctcaagaatcagatgagtcatttgaggatcaaggatgaagagttaggcaagaagaatagaaaaaacagcaaaagtggcattcagttgctgccatcacggtcgtggagaatctttgacaagttatggagtatgagaaaaaggcatggagagaataggagctcagagacttcagggagttgtagtagcccaacttctataggccagggagataccaaatcatatggcttatctttgagacaccataggcattctatctcttaggaagttagtagattattgctgtttaagtgtagagtggtaggatgttatagcattgcattaaaatgtaatgtagtattgtagtttatcttcctctcaagtgtaagaccttccatcgtacacaatgctcactgggttagggatacgtagcattgcttctagcttgaatgtttaaaaaaaaaaaaaaaaaaggtcccacttttaaaatagctatcaaaatgttatggcattatattgtgtcttaatccgtgtatcatttggccagtgtattattgtcttcaatccttagaagtctttcattggggttagggatctttaggttttattcagtactacccttttgtatagaatcaccatccttaattacaggagctgatttgtgg

SEQ ID NO: 3533 - DNA, 1065 bp, Glycine max
  Clone ID: GLYMA-23APR03-CLUSTER37346_2
attgttttatctaagcaaaaataatttgctttcagccaatgaaggttgcaaacgtagaaataaacagagcctagttgttccgtcaaagaaggttgatctttgtcattttggtcttgagttagtgatgtgacacctgccacagaaaagttctattgtatgtatatattaatattactactagtatatccacttgggatggttttgtagacaaggcttgttgaattttcaaacatgcacttttttcattaaatgttgcattgatatttagtgaccgtaattatatctggtactagtagactagaaactggtaagtttcatcttttaacctcaaaatttggtgttaacagatacttgcaaacatagtacttttttcatatcactttacttgttgcattgctctcatataatctcatggatttgatgttctccacaggtggactattcatgcactcctgaagaagtgcaacagcattttcagtcttgtggaacagtaaacagagtcaccattcgaactgataagtttggccaacccaagggttatgcctatgttgagttccttgaggtggaggctgttcaggaggcccttttgctgaatgaatctgaacttcatgggcgccaattaaaggtaacggctaaaaggaccaacataccagggatgaaacagtatcgtccccgtcggaccatcaatccttacatgggggggtttcgaggcagaaccccatatgcacctccctttatctactctccatatggatatggaaaggttccaaggttcagaatggcaatgcgctacagcccctactattgaaagtccaattctggtaggatggactgaatgacgcctttcttcccccctagtagtatatcatggtcggagttttggccattgaatatgagggagggaaaatccaaccagttctgtgaggattaagcgttgacttatcagcaaaccttgtaaaattgtggtgtttgcccctgctttgctttattatcggtatattaaattaagttcttgtacaagtatccttcgtaagtgtggttaatacatgggttttgggtttatct

SEQ ID NO: 3534 - DNA, 903 bp, Glycine max
  Clone ID: GLYMA-23APR03-CLUSTER3761_22
ctattgggccgtaccctcttctttagtttccaacagcctttctctctctgcttttgctagtggtactgtcttagctttgattctctgttctctgttttgttctgtttcgcgtattgtcttcatacaggaacttgaacaatgaagaatgcaaagggcaagagagcagcaagggcttcaaaagaatcactgaagcccgttgatgaccgaaaggttggaaagcggaaggcttccggtaagcctgggagaagtagtgcaccaaagaaggagaagaaggccaagaaagaccccaacaagcctaaaagaccacccagtgctttctttgtgttcccttgaggagttcaggaagacctttaaggctgagaatcctaatgtgaaggctgtatcagttgttgggaaagctggaggagagaaatggaaatccttgtccagtgctgagaaagctccatatgaagccaaggctgcgaaaaggaaagctgagtatgaaaaacttatcaaagcttatgataaaaagcaggcaagctccgcagatgatgaagaatcagacaagtccaaatytgaagtgaatgatgaagatgatgccagtggagaggaggaggaagaggatgatgaggaggaagaggacgatgaagatgatgactgagattgatgtccaaaaccttggttatgatgttttgtttgtgaaggaggctattatatattctgattgtgcatactaggctacttttttatatttgtgctggtagaaaagaatttcttcttttgttggcatgatatactctaccaactacttgagcttccctcacttagctatcgtacctgaatcactctttgtgcattgtagccttacatgggttgctttaagtaatataatttctttctgaccaaaaaaaaaaaaaaaaggag

SEQ ID NO: 3535 - DNA, 1280 bp, Glycine max
  unsure (1)..(1280): unsure at all n locations
  Clone ID: GLYMA-23APR03-CLUSTER3764_7
ataaaaattgcttttagattttgttttagattcttacttacagaggaatcaattcgtggtttctctaccgaaaggacgtacaattntaagcggttttggaagctctgaacctcgaaggacctgctggaagctgacatcctcgaaggacctgccctaggctaatcttgctttacctgtgcgccgtgtttcgtggttgcctgtttcgcggttggcttcgaagcattgtgcgccgtgcgccccgccgtgccctaggtttttcttctgtccaagttagatcctgaaaccgttctatgaactaatcaagagtgaaacaacgatgatgagaactgcttctcagaaatggggctacattcggatcatggctggtacaatctttggaggcatccttggattctatgtcatgcaccgccttgaaactaactacaaggagaaaatgaatgaaaggctgagagattatgaggctgaattgaagaggaagaaggatgagagattgaatgagttagaggactcctccaggttttgaatcattgttttttttactttttgatgtagtcctccaagttagaggatttntacatttgattaataaagttaattggagacaattgtttctagtgtcattgacagtgatttctgtataatagaagatttttcctttaacaatgagtaatttgccgctttagtgttctaaattaggcttaaccaagtctattggtgtgagcaattttggagcaaaaagctttcagaacttctgcagaatgcaactattacccctgctcttaattagattgaaatgaacgtagcatggcaacagggaaatctgagaaaattctgccaagagaaagggattcatgtgagtgcatggtcccctttgggagctaatggtgcttcatggggttctcttgctgtgatagatagtccagtcctaaaagacattgcaattgcaacaggcaagagtgtggcacagattgcattgagatggatatttgaacaaggggtcactccagttgtgaagagtttcaacaaagtaagaatgaatgaaaatcttccaatatttgattggaatctgagttaggctgatttggagaagatcaagcaaattccacaatttagggccgtcttagcaagagcccccccacctgaagatggacccttcaaatccttggaagatctttgggatggggaaggtgtgatttccgacggatatatgatttgtctaaatgccaaaaaccgattaaaataacagaaatctaaggtgtgctgtgctagcttgccatttg

SEQ ID NO: 3536 - DNA, 1050 bp, Glycine max
  Clone ID: GLYMA-23APR03-CLUSTER37675_3
atatcatctgtcctctttcttctctctggatttttctccatcatttcagggctttctttcttctcttttgcctcccatattccattctcctcaaaatatctctacattttcctctctaccccaacaaaattccaaaaatttcccctcctatctccttttcacgtcacttaccacaactgggatgctccactttcttaaggattatttgttaactgagtcctaagtgtaattgagatggacggtgatatatttggagaattaggcaattcaactcaagtagatagcaggcttctacaggtatttcaaaagagcttattgcaagctcaagatattttgaatcagaatcggttgctgatcaatgagataaaccaaaaccatgagtccaagatgcctgataatctgagtagaaatgtgggtttgattagagagctcaatagcaatatcagaagggtggttgatctctatgctgatctctctaattcctttaccaagtccagagaagcttcttctgaaggtgactcctctgggactctgaagtctgatggaaaagtcaaccagaagagaattagatccagctgatttattgaatttgagctttcgggcacgcaatcaagaagtttattctgaatctggaaggaatttgtttggtgagactgtgtaacttcctccaaagttatttttgtgccaagtcttccatattggtgtttatgtttagagggccagagatttagttaatcatctgatctataaaagtagcttcaatttgaggactatacaattgtgattttgtgtaactatgtttaaattcatgaaatggagcatgttcacggaccatttagtcaagttttcaagcttgaccttcttagatccaattgatgtttggtggttaagttctagatagttattcatttgttctgcttgtttgatcatttgattggttgttgttagttgcttcccctttggttctgtatttggatatttgatgcctgagatccaataactaatttactgcttaataaatgtcatcatatattgctgaacttttattac

SEQ ID NO: 3537 - DNA, 771 bp, Glycine max
  Clone ID: GLYMA-23APR03-CLUSTER3779_3
atcacaactacatttgcaaaacaaaagccatagtttgttacttctcttcgccttttgctttgcaattgtcaccaaacaattcttgcttagctctcacaagcaagcattatcaacaatgaaggatcaagcgaaaagctatgaagacagcatctggcctttcgggggttcaatcagtttctgttgacattaatgacaagaaaatgaccttattgggggatgttgatccagtgagtgcagtgtcaaagctacgaaagtggtgtcacactgaaatagtctcagttggaccagcaaaagaggaaaaggagaaagagaaagtggagccagcaaaagaacctgttcctctcaagctctatgatgcctatcccttttattatcatatgacaccaccactgtatctgtatagttaaaattaataggttagatgttttgaagagaatcttatatagtggctgtgtcatctactaaattttagaatattattaggattattattcgcagagggtggtgtaacttttttgataaattcagacaagtttctagctacttgggtttttgatatatagtataatgtatacctttgtaatttcattggcttttccagcaacacacatcttgttagtatagtttgttggaagtaagagcatattaaggaatgtgaatgagtatgacacaagtttaatctacttctagctgccatcacgttttataatacttttttttcctgttaaatactacaataatataattatcgtagtcttaggaactagttta

SEQ ID NO: 3538 - DNA, 1390 bp, Glycine max
  Clone ID: GLYMA-23APR03-CLUSTER378154_1
tcagctacgtaggccccccccccccccccccgatgacgaaactgaaagagctgatagggataatgaaggacaaagcctcgcagggcaaagccgcgatcctctccaagcgcgccactctctctctcctccgcgccaccagccacgactcctacgcccctcccacgtgcgaccacatctccatgctcctctcctccggcgacggctcacgcgccacttcctccgccgccgtccaccttctcacccaccgcctccagaccacccagagctccgccgtggcgctgaagtgcctgatcgtggtgcaccacgtgatcaagcgcggcagcttcatcatgagggaccagcttccgtacagcggcggcggcaggaactaccttaacctctccaaattcagagacaagagcaaccccgtgtgctgggaactctcttcttgggtacgatggtacgctaaacacgtggaacagcttctctgggcttccagaattgtcgggttcttaccgacggaaaaagagagagtttcgggtctcaccaacggggagttattgagagagacggaggctttgttaacggttcttgaagggattgggaacatacccgacgctgcatccatggaagagaataaattagtttctgaaatagcgactttggtggaagaagatggggttgcaacgttgagtgaggtttttgttagagttaacgagtttagagagagattggccatggggtgtctcggttttggagaagtggtggaattggtttacgtgttgaatagattggacaggtgtaaagagatattggtgatggtggtgatcacggagaagcagagattgtgggatttagtgagagaactgaaggtgaaggtagagaagatggaggtgtacagggaagaagggaaaagaacgctgacaacacacagggcaacaaagtcagacaggtttgctctcacgtttgtcaattccgttgatttgggacggtttccctctgcaaggttcttgtgatattttgtaagtatcttaccactgtttttaaaatattgattgaggaagtaaaagaaaaaaaatatttattagtaaattatatgaaagtgtaaatttttttataaataatataatttttttcaataaaaatattttttttaaattcttaatcaatatccttagaatatatatttattagcatttaccattttgtaaataaatattaatcataaattttttggttaaattgtttatttatttgatgcctgtgtatatctttcttttatcttttaataattagttcctgtaagttgaaattgtaaatttttggttctcagaaatgtataaaaagttgggtttgtttactttgttcgtcctattgataatataccagagacaaaaaaaaaaaaaaaaaa

SEQ ID NO: 3539 - DNA, 710 bp, Glycine max
  Clone ID: GLYMA-23APR03-CLUSTER378503_1
attattcaacaatctataatttggattggattccttaatttgcagcagcaataatgtccaaggttcgtcttttgaatttctcccatggcctaatcctctcaacactcttcatccactactctctagctgatgttggcactgctgcccaatatggccctccctttttgccgaccacatgtttcggcagagacgcatcgcagtttccgtcaagtaacatgtttgctgcggccggggagggtatatgggacaatggtgccgcgtgtgggaggcagtatcaggtgcgctgcatcagcgctgcggcacccaggacttgtgttcctggccagacgattcagatcaagattgttgatcgagcgcaatcatcggtttctaggccttccctaggtggaacttccatggtcctctccgtcactgccttccaggccatcgccaatgtttctgcgtcattcattaacattgaattccagcaggtttgaaaacgggaagtagctcttggatgcatcatgcaaaagcaaagggaataaggagccgggcaaatttgttactctagaaaagtgtctgtgaagattgttacagtcaatatgtacatgaacttgcatttttattttaataactagtttaatatccatgtggacccacaagtaagtaaggttaaacatttttatgtttattttaataatggtctgtatcggctaaaaaaaaaaaaaaaa

SEQ ID NO: 3540 - DNA, 1562 bp, Glycine max
  unsure (1)..(1562): unsure at all n locations
  Clone ID: GLYMA-23APR03-CLUSTER3786_3
gttcctgtgtgattgcgtttcaaaaaaacgtgtctctctattttgaatctggatccagcgccttctattcagcattcacccaaaccctatttctctctctctttcttccctgtttggtatcagcgagcacaatgaggagaggagctaagagaaagacgaagcaggaccaagaagccaaacacgtcgcagccgaagataacaagaccgaagctcagcctcgagctaaacgggccaaaacctccaagcctcaatccgaacctgagtacttcgaagataagcgcaacttggaagattngtggaaggaaacattccccgttggaactgagtgggaccaattggatactgtctatcaatacaagtgggatttctcgaatctagaaaatgcgtttgaagaggatggcgtgttgtatgggaaaaaggtttatctctttggttgcactgagcctcagctggtcatgtttaaaggggaaagcaaagttgtcttgatacctgctgtagtagctgttgtatcacctttcccaccatctgataaaattgggataaactcagttcaaagagaggctgaagagatagttccgatgaagcaaatgaaaatggactgggttccatatattcccttggaggacagagatagccaagttgatagactaaaatcccaaatatttatcttgagttgtacccaaagaaggtctgctttaaaacatctgaagttggatagattaaagaaatatgagtactgcttgccttatttctatcagccgtttaaggaagatgaacttgaacagagcactgaagttcaaataatatatccagctgagccaaagccggtcttctgtgaatttgattgggaattagatgaacttgaggagtttactgataagctcacagaggaggaggagttatccgaagatcaaaaggatgccttcaaggaatttgtcaagggaaaggttcgtgaagctaagaaagctaatagagaggcaagggaagctcgaaaaaaagccattgaagaaatgagtgaggaaaccaaagctgcgtttgagagtatgagattttataagttctaccctgttcaatctccagatgcacctgatgtatcaaatgttaagtctccattcattaacaggtattacggaaaggctcatgaggttctgtgattggctccaagacaataatgacaatttttctggtttgttttgcccaacacgagatgttttgttattatgaactatgtagttcaggaggcaaccccctgatgtcccatcaaattgtctttgccagtgtagttgtctaaagtgacatataccatgtaaaactgtaggtcagagatcctagagaagtgaactagatgttgggaggaatttagacatgtttctggcttccttgttgaagagaatttctgaggttctggagctgcaatttgcgtggctcttgcattcttggttttctcttaagattattctttttcccttcaaaatagatgtacgacagttttgactatgagctaaatgaaatcaattcattattgtttcgttttaaaaaaaaaaaccaaaaaaaaaaaacaa

SEQ ID NO: 3541 - DNA, 1030 bp, Glycine max
  Clone ID: GLYMA-23APR03-CLUSTER379_8
atctgttaaatgtaactgctccaatcagatgctatcatatctgtgagattatatacagataagcttccacaatgaattgaagggctagctattccgttttcataaagtagggaaagagatcgatcttcttcttcatctttcttctccttttctattcttggtttcttcttttagaaatgaacgtgaagggtatcatggatggtaaaattgaagctgggaacaccaattgtattgttaaggaggatgtgaatgatgattcgatatccattggatcagtatcagaagattcaatgaactctgtgtgttcatcttcttcatcagaattggctgaggatgcatcatcctcttcagcatcttatttgtcaacctcatcatcgcattcaaacggccctttgtttgaactatcagagctaatgagtcaactccctatcaagagaggcttgtctatgttttatcaagggaaggctcagtctttcagttctctagcaagcgtggagagcataggggatcttcctaagaagaaagagagattttacaggaagaaaatgaaatcatgcaaaagcttcgcgggaggcttggatagcagccacagaatatcgttcgctccaaaggctacaatatcaaagaaatcttcgagagcaacttttgtatccgtgctaactaaaagagggagtttccttggaggctccagaacttccttttctgtacagaagaacttttgatatccaaccttgttaattagagcttagttaatatttcatgcacaaaatagggaaaattttgagtccctcaccttcagcttttctcacacgaagaagtcatgtcatattgtttattggtaaataattaatatacatatgattcattaattagtataccattactgctttgtttttcatgataacaggatcctgcgctggcctatgtttcattattactagcatgatatgagtgctaattagcacatatatatgcaaggatttttaggtagttgctcgtgataattgagagataggctagctgtggaata

SEQ ID NO: 3542 - DNA, 1253 bp, Glycine max
  Clone ID: GLYMA-23APR03-CLUSTER380441_1
aacattcataccacatagtatcaaatcaaattgattcaaagggaaagacacaaaaaaatggctagtggccgcaatttgaagaacgctgtgattgcattcttggttcctcttccctccatcttcttctacctctcattcctcaaccactacgactcagcaaaatccccatctttttggtcaactctatggtcatggtgctatcaccaccctcttctattagccaacgctctcttcttcctcaacgtcaatgtcctcttctggctcataggcctaatacaatccagccactggatgatcgacccctattggactgtgatacctgtgatgcttgttcactactatgccactcatcctttggctccctatgatttgtggaggtccaagatcgtgattttattgacttgggtgtggagtgttaggctcactcacaactatttcaggagagagaggtggcagtggggtgccagggaagattggcgtttcactgagatgagtcaacagtatggaaagcaatggtggtgggtttcattctttgctgtctatgtctcacaacagatgtttttgattgcactgtcacttcccttgtatgctgtccatactgtcaatcagcctttgaacatgtgggacttggtggctactgttgtctgtttatgtggcattgttatagcatattttgctgatacacagctctatgagtttgtgagtagaaacaacaagctgaaggggcttggtaaacccgtggtttcggtccttgacagtggcttgtggtattactgccgacatccgaattactttggcgagcagctgtggtggtgggggctggttgtgtttgcatggagcctgggagtgggatggaccttcattggagcttttgttaatactatgtgtttggcttatgtgactaggcttgtggaggaccgaatgttgaaacaagaaagtagagcagaagcatttagggtgtatcagaatacaacttctgtgtggataccttggttcaagtcctctccttcaggggttaaaaataagaatgcttgatgtttttcttggtgcaatggttgattttgtaaaactatcatcttggtatgttataaattttgcgttgttcttatttatttaatgaaatcatgaattgtatgtgttctatatatatagtttgctgtaatgttgtataaaatcttaatgaatctgctacatttggagttatacttcttgaatgcggctttttagcttctaaatgatccctgatgactaga

SEQ ID NO: 3543 - DNA, 620 bp, Glycine max
  Clone ID: GLYMA-23APR03-CLUSTER38152_1
tatttcccagtgaccagaaaaaggagaaagaagttgcgtctgcttcatatgtcaaccatggcctcatgaagacaacactttctcagtgccatgaagaagaggccagagctccaacaacaccaagactttgaagttctgaaagctgttgcacaggcatggtacagccactccggcacttgcaagcccatgagcgaatttgaagctcacagaagaaacttcagaggcaagccttcaaggtttaagcttgaagcattgaacaagccacaagcttcttcttctagttctagggacacttctacttactgggattttcagcagtcactttgggactcctatgagcttgtcacagtgtccagaaggattgagactgggttaactttggataacccttttgatgaattgtgtggttcccctccaatccaacaaaagcgcaagcctgagagtaagaatagcctcaggaacctgttcaatcttatgtcttctaggagatttaatgcccccaaaaatattccacaccaaaaatgatacatgacttttatttccttttaatataacacccactttgatttactcttttttaatatgcatccttatattctggctcaaaaaaaaaaaaaaaa

SEQ ID NO: 3544 - DNA, 799 bp, Glycine max
  unsure (1)..(799): unsure at all n locations
  Clone ID: GLYMA-23APR03-CLUSTER3815_2
taacaaatagcattaaggcagcccaaagaggctgcaactaagacggattggggtgactgcaattaagatgactttccaataaaaagagaagaagcaaaacataataattgtgttggttgtttgccccatcttgtatggtgctgctgttgaatctttacgtatgtggagtttcagttagcatcttgttagtgctatttgttaaatcaggctacttgttgatgctattttatcacttgaatagttttgcttcatcttgcattgtcctggaggagttaaatatttgtatgggaataataacttgctttggtgcttcttttgttcattttttttctcccgtgtttcatcatccttttgggccaaatagattattgtttgtttgtttcttctgaacatttctacgatgttttctaatttgatggcttgtgtatcaaaacatatgaatgtccatatatgctgctttttctaatgatttcgaggtgggtctcctggttgatttcgacttgaagtacttcggccaacactgcattgctgtagtcattgaggttgtggacttttgaatgccatttttgtttccaaatgttcgttgaaggaggcaagctatttctttaatcgtagttcaaagtgagacaattacttgtaatacttttgtaatgaaatacaaatgtcgtcttaggataagtgtatgtgacagatggttttgatataatatattgcgcttcatttattttacgaggttnnnnnnnnnnnnnnnnnnnnnnnnnnnnnnnnnnnnnnnnnnnnnnnnnnnnnnnnnnnnnnn

SEQ ID NO: 3545 - DNA, 1839 bp, Glycine max
  unsure (1)..(1839): unsure at all n locations
  Clone ID: GLYMA-23APR03-CLUSTER3820_1
tcgagtcagctacgtaggcccccccccctttttcatttctaataaatattctctattttaatagttttttaaaatgatagataggcataatcttgatgccctaatatataacacttaatttaagataatttattctccttcttttccttttctgccaaaacctcactctcaaacataacctaaggcatggtcttcgtccctagaagcacattcttgagggcccaagaagaagctttaggagggagaattagttataggagagagacaaaaacattagagtgtgtattcacattgagcttggtgctaaaggatttctcattggctaggagcttgtgcccttactatttgctgcatcttcttacattttctcaacaacagtacagtccttcttctactatttctgttttgtgcacaatctgtatttggattgaatttttcacctatcataaacatcgatatcacaaaattctgtttcttaatatgcttctactaagtagcaggaaaaagaatctttggggttgggctacatgataatcctaaaggagaaatttatggttcattattttctttttatgatggatccatagatagttagttaggttagttggttgaagaaataaggcatgttgcttataaatgagagggtaggtgaagtgagaggttatctcatatgtgagagaaatggggcctttgggcattgggaggtgcagacattgaagttctgcaaactaagcattatattcaggggagaaatgccttttatttttagtaagatactgggtttctaacagtatttggataaaaaggaaatgttttaagttctcatttgatcattctcatctatcttattttatgtcaaatatatcaatgagtcctgtctgagtnttttgacttctataaataaatctaagtctgtttcacaaatataaattatgtttattttgctgacttttttccatataactctttgcttcagatatcttgcacatcttttcattcttgcccagggatctaaatttcattgagcatacaagtaatattggttggaaagagcatcaaagagctaggcctatcattatagatccaggcttatatcattcaaagaaatctggtgtttactgggctaaagagaagagatctgttccatcttcgttcaagttattcacagggtctgcatgggttgtcctgacaaaatcatttcttgagttttgtgtttggggttgggataatcttcctcgaactctccttatgtattacacaaattttctttcatcccctgagggttacttccatacggtcatttgcaatcataaggactatcaaaacacaaccattaatcatgatttacgttacataaggtgggacaacccgccaaagcagcatccagtcttcttgaaattggagcattttgatgacatggtccatagtggtgcaccttttgctcgaaagtttaccaaggatgatccagttctcaacaaaattgataaggaacttttgagaagatcagatggtcactttacaccgggaggttggtgtattggcaatcctcttttgggaaaagatccttgtgctgtttatggaaatccaattgtagttaaacctaccttacaatcaaagaagctagaaaaactaatagtgaaactattagattctgaaaattttaggccgaaacaatgtaaatagtagtcactctgcaacgtgaaatttttatacacaattctattggcatttttaatgcgtcgtctgttcaaatttaacattatgaattgttatgaaacatctttctagtatgtgaacttgagtaggtcttgtcatttcatgctacggatgggatttttt

SEQ ID NO: 3546 - DNA, 814 bp, Glycine max
  unsure (1)..(814): unsure at all n locations
  Clone ID: GLYMA-23APR03-CLUSTER3827_2
gtgtgagcgtcaacaatggcttcttcgtcttcagaatcggcggtgtcggagcgaagaggaataccaggggctcagttcgtagaggatgtccaaacttacctcactcaatcgggtctcgatgttggttcagccctggcttttctccaagagagacttcagcagtacaaggtagtagaaatgaagcttcttgctcagcaaagggatcttcaggcaaagataccagatattgaaaagtgcttagacgttgttgctacattgaaagctaagaagggtactggtgaggaacttattgctgattttgaggtatcagaaggcatctattcacgagcacgcatagaagaaaccaattccgtgtgtttatggctgggagctaatgttatgctggaatattcattagaagaggttacaattgctcgtgtgtataattgggatgttcatcaacggagagttcaacaagctgttgctacaactgctcaagactagttaaaaaggagagtttattcaaacctagatccaaaattgaaaactcataccttttgcttagagtatgatttttatctcttgccaatttctgatttagataaattgtgggttgctccctttctctagttccggttttaccacagtagacactagtaggagctttttcgtatatttatgttattattgtcttggtctcttgtaaaatgcccatatgttaggttgatgggaaagttttggtttggtgtgtgatcatatggatatattctactctgtaaaaaaaaaaaaaaaaaaaaaatatnnntagcgcccgctctaggagataaggttaatt

SEQ ID NO: 3547 - DNA, 1553 bp, Glycine max
  Clone ID: GLYMA-23APR03-CLUSTER38296_3
atcataaattcaaacaggaaaaatataaaattctgagggtattggtggtggaattttttatccgagtatggtggtgggagaagggaagggaatgagaacggttgaatatttaaatagattcacgtgcatttgtcaacctgtgtttgtcggtcaatctttatacccacaaaggcaaagggaagaagaagaaccgagaacagcacaaataaaaagcccagtgttcctcttcttgttgcctcctcttttaagaacaaacacaacaagaagaaagaagagggtatttctgcagcaccaccaccatcaactaccgaatgtgctctttctcctttctcctttcaacaaacaacaaccaccaccaccctctgtcgccacatatttaacaacaattactacaacttgactaaacaaaactgtttttctttttttctttttttttttaccatggaactggctttgagtttgggagacacgtccaagtcttttacctttctcgacaaggccgcggtgaatttacccaccaacaaggacccacctgggttgttcagcttggcgccgagtttcgccgccaccgccgccgccgccgataaaagaagcgatgctgctgagaggaggggtttttcttcagatccaccggttcagctcgaccttcttcctttctctccggttctcagaccccaacaacaacctccctctcaacttcggatcccttggctcaccgaagcatgcggggcggcgagggtgctagacgtgaacctattccgggcggcgaccgcggaggatggcgacgacggcacgtcgttgtcgtcgtcgccaaacagcgcggtgtcgccgtttcagatggatttctgcaccaggaactgtaatgcagagttcggaggcagaaacaagagagagcagcaagaggctgagggtagagcgagtgatgacgatgaaaatggctccacgaggaagaaactcaggctctctaaggaacaatcagcttttcttgaagaaagtttcaaagaacacaccactctcaatcccaagcaaaaacttgctttggcaaaacagttaaatcttcgtcctcgtcaagtggaggtttggtttcagaacagaagggcaaggacaaagttgaagcaaacagaagtggattgtgagtatttgaagagatgctgtgagaccctaacggaagagaatagaaggttgcagaaggagcttcaagaactcagagccctaaaaacttcacaacctttctacatgcaacttccagccaccacactcaccatgtgtccctcttgtgaaagggttgccacaaattccaccacaactaaccaaactaccaccgttaacaacaatgcttctcaaatcccagtggaattgtctctcagcaagcccagaatattgcccttccccaatggacaggcccaagctcatcaaatagcttcttcatgatttgtcatcagaagacattttttttggctggttttttaattacatatgatataatgtaaccttatattatagttatatcatagaggataaagacaaaggaattccggttcccctatttatat

SEQ ID NO: 3548 - DNA, 1666 bp, Glycine max
  Clone ID: GLYMA-23APR03-CLUSTER3838_6
gcgcaggtttggtaattggaaataacccgaaccaaacggtcacacatgaccgaagaaacaaataggcagagtgatctgatataataagctatttttcacgcaccatttaaccactctctaaaacccccttctccgatttaagctctttccggtcccaattttgcagattcgaccgatctcgcaacagtaggtaagcaagttcacactccaaattccatttcgaaacttcaccagcttcaacgctcgacactttttttctctctctctctctctctctctctctcaatcattcgctgttatgtgagattgaaaaaaagacagtgagttttgagcgcaatgcaactctaaatgacatcttccagcagcgtttcaccaaaacccccactctcgtcaatggcttttccaacctctacgccatggaggtggatcctactgttgagcatgaggacatgggtggcgctgatgggatggactccttgttctccgagctcgccggcgcgattcccaggattgatgaggccatgagctttgctgagatgttgaaggctattgcaatggaaggaacagaaaacagagtctcattactgactatccactcaaatcaggacactgcattttgatacctgtggaactgcaaagagtacttggataaggcagttcacattatcctgacaactgataatgatccactgggtcaagctttagcagaatagctggcacggcgccttgggcgagaaaggttgtatatcctgtcatttattttccatgttaaacagtctgtaagtaccaaatatatcctgtcaataatcaaggttcaagacacatattcatggtacctcaactacttaatgtattattaggttcatgcatgcaaaggtgtccatatctaactgataaatcaaaatgtgaaccaaatttggcactctaataatggttcagaaagtttattggatctaagggatctaaggataggttatgcattctgttattttccaacacttgaggcttgtgaaataataaatgttcacttttgctttactttttcaattgtgtcatgtactttgcatttgtctacttatttgtctacttattgtagtgccagctgaattcagaaatactgatgagtgattatttactttatgtgctgacgggctgcttgcattttatttagggaataggggctgcaaggtagttggaatctgaaggcatacagacacatttaacctttgtctacatgtagttgttttaaaaaaatattttacagcaagctcttgagcttaatacatgaaggattctgattaatggggtactgagattccacttgtaccatctaaagggtactcagattattgttgtaaaaagttgtttgtgacataaatgggtttcattttcttttgtgcctacctgccttatttagtccacgattttataggctagcctgtgaaccaagaataaacaataaaatgtaaaaactaataataagtaaactaaaaatttgaaaattttataacttatatttttatttttaattgattaaatttcaatatacagtaaatatatcaatgaaacacaagtctgtttagtgggtgtggtaaaggaaaaatagaaaaagaatgttatgtaggacaactctggttggaagtgtcaatgagaaaaatattggaac

SEQ ID NO: 3549 - DNA, 1169 bp, Glycine max
  unsure (1)..(1169): unsure at all n locations
  Clone ID: GLYMA-23APR03-CLUSTER384300_1
ttttttttttttttttggtcaaaatgtaggaaaatattccgtgattccataaaatttatcaaatattttagcatcttgaaagaattactcaaatgattgcttataacttctttgatttcatgaccctactagacctgttagatgctccaaaattatagcctgtgcttgacaatcccaattatcacaaaacttttatgggaggagaaaggaaggagaatggtccctccaaacaagttataattgtatttgtcaagactcaaattgcttgccttcaaaagattgtccaaagctccaatccttgggagcaacattgtaagatgtaagagttatcccatcactacttgtaacctcaaaggaaagaggttggttctgtagcaatgcattaatatgccaattctgaccccaattcctacccattggaagccaaccagttcttgaacccttaaccttcacagcancaatgtctccaattccagccacattactaatcagtaccgataatgaatattccagaaccagtaattgtaaaccggattcccccttcccttgcacactttatcctgcgatactccacgggcatgttgccagtgccagttttccagattgcgattttctcgaacgcttcaatggggagaaccaagtgctgcttcggagggttgcagtgtccggcgacgctctccgcgtcggaaccgtagttcggggcgcagaaattggtggcggtgacggcgaccgtcgtgccggagatgcaccaccgccggtcgaagtcggaatcctcctcgcggcaccggacctcgaagcaggcgccgcagatctggccgcgcccgaagagagcttcgctgagagcggcggtggccatgccataaccgccgttaaggaggtcgccgtaaccacacgcgccgccgaccgcgtcggtggcggcgtagtgagttgcgtgggcgggtaaccattcttcggcgcgtggttcagggtcggtgtggggggtagattcggaaaatggcgcggtagggggtgatggagaagagtataagcaagtggctggtgaagaagtaagactgaggagtgtgaatagaagaatggttagtgtttgttgtgacattgtttggcctttgttgttgtttctacaagcaacgaaggaaggagaaaggcaaactagatatggtagttagtgg

SEQ ID NO: 3550 - DNA, 2176 bp, Glycine max
  Clone ID: GLYMA-23APR03-CLUSTER384574_1
tcagctacgtaggcccccccccccaatgccaatgccatccatggtcacattcacatcatcttattaacgtgaaattggaacgtggatggaattttgatcccttcttcttcttcttcttcttccaaaaatcgcttttcagtcacttttctcaaaatggacgaagattcgctcaagcgctacaccgattgcgtttatttcttggcctctcccctcacttgcaagaagggggctgaatgtgagtatcggcataatgagattgcgaggcttaaccctagggattgctggtactggctatctggccaatgccttaatccaacctgtgcatttagacaccctccattggatgggcatactggagcgccagtgccatctgaacctactcaaacttcattacctgcaaacaagacactggttccctgttattttttcttcaatggattctgcaacaaaggtgacagatgctcatttttgcatgggcctgatgatagcatttttaatataaaaccggtgaagaatgagaatggaagcactgatgcactcaacctagaaaataaagcaccatctggaaatagaacaggtgtaacgtcaacaccaactgatcgatctgtagctgcaccaaagaatttgtctgatcttaaacatcagcctaaggaagatcatcagctggaattacccaaaaatgttaagcagcaaggtgattacctagagttatctgcttcagaatataaagaagctgctgtgagtaggtcagactcttcaattccagatgatggctttgttcataatgtacctcatttatgcactgggcagagctcagaggagcaagtaaatagtcacatagagcccgaggagtggtgggaatcatcccctcattcccctggatttgatgttcttgttcatgatgaagtggagaacttgggttatgaggaagattctgaatatttaccagtggttgatagggatgagcaagagctgaatgaccagtacttcaggtatgaatttatagatccagttgagtatgatactatttgcccggaagctgatattctgtatgaacaagaaacatatgatggttacagatgtttagaatagagatctcattcatgttaatggaagaacagttcatgcttatgccacagatgcattcttagatcctatattgtccaggaaaaggattcggacatcagctgagatggctgcttatgacaagaatttagatcttcgtgaccatctgaggagacgtagagaagttaatggtcctcctgttacaggtttcttaagaagacaagaatcatctcctttgatggttcaaaaccaggaaaggcatctgaggcatggcattgagcagcggccaagtagaagactgacatcacaactgggatatagtgctatagattcaactggagaggttgaaactctgtcaattggtaacaagcgcaggttattcaggcagtcccaggcccagcaacatagaccaaggaagaattatatagaaaaactaccaaaacggcagtttgtttcatctaaaatatccaggaaaccagtttttaaacaaaggggacttattcacgagtcttctacattttcaggacctaagactcttgcagaaattaaagaagagaagatgaagaagaatgctgaaggaagtttacattggaaaagcacatcaactgattttcaggatcccaaacctctgagtgaaattctcaaggtcaaaaggaccatggatcagtgagattggcaaaacctgcaacaattgaattatgagattaaaatgactaatgatttcaagagactaatatttttaccgaagataaaggataagttggctggagacgggtgctatcttagcatcctttaccatgctaggatattgccactggtagatggtgataagtttttgttcgagttagtggaaggttatgagggcccgaggcggataggatagagatattagatcaccagtgtttgactaaaaaagttatcttccatagttagttcaatatgttgatttagacagtgacgtcttaatctagagagtggtatgctgatttacatgaattttatgtgtgattttggcctacttgtttttcctgcacagagctgcattgactcgctactctgtcttggacagtgtttttagtatatgataattgtccccattctggatttttac

SEQ ID NO: 3551 - DNA, 559 bp, Glycine max
  Clone ID: GLYMA-23APR03-CLUSTER3846_2
attgcaggctcgtagttgtagtgcgaggggacgagttgtttgttcgttaacagttagttaggatggcgagcggtggaaaggtttcgttcaaagtaaccctcacctccgatccaaagcttcccttcaaagtgttcagcgttccagaggctgcacctttcactgccgttctgaaatttgcagcagaagaattcaaagtgcctccccagaccagcgccatcatcaccaatgatggtgttgggataaatcctcagcaaagtgcaggtaatgtcttccttaagcatggttcagagctacgtctgattcctcgtgatagggtcggtgcatatgagatgtttcgagatatctgattagtggctaattaccttcttcattatttatctcgaggagtgtagcttaataaacaccagtattacactattactgatatcatgtagtaattgatttatcggtgtccctatgagataaattttatgtgaataatgaatacatatttgggaaaatgatatatatgtagtcttccctcctttgaacttttaatttatttctgatttttgtcggt

SEQ ID NO: 3552 - DNA, 1521 bp, Glycine max
  unsure (1)..(1521): unsure at all n locations
  Clone ID: GLYMA-23APR03-CLUSTER38518_1
ntgaaatacattattctatgtgctaacatgtgaaatggtttatataactggtttcaaatttcagttttagttgaaaatgttttctggtatgacagttttagttgaaacatacatctggcaggtgatttagctattgtgggtatgcttggtttttatgattgatggcttcattttttttccattttaacttttaataaattctctatttttatcttgaagtagattctttgtgtgtttaggtcatgccgccactatggtgcaggattgataggctatggtatccccatcctggtattttggaagggtccatgactagacaaccttttctctgtcctttggaccacgtatttgaggtgaatgtcatgttgaaaaagctccctgaagaagagtttggtcctcaaatagattttagagagtactcaatacttgataatccttctctgccgtcagaggtaaaaaagtcatggcttgatgttcagctctgtaaagatggaacccaagattgtgatgcatcagcatcaaatgataccaatgttggaggaggagtacttaaatttcctaagcacagcaatgaagaaacgtttatgaaagtattctcatcattcaaggatgtaaaagttatcaagttctcttcagtgcaagaggcattcacaggtttcactgacaaggaaagggaagataaattcagaaaccgtgttaagcggtatgtgggcatatggtgttgtgtgccggatcacactcctggtcacatatattatgatatgtactgggatgagaaaccaggatggaaagcagttcctcctcaaacttctgaggatgatcatccaccttattgaaatcaccttagatttgtgttagttaaaacactgatgaatggggaaataagacacacaaatccaaaggagatttagtttctaactaattgtcaacaagattctatacttacacaagtgaagaatctgtatccatattgaaaatgtaagatattcttagagattagacaattagttcttgtgtaacaattaagaatttattttgttttgtatcatgttaccaatatattgcaaccaagagaaatggaggccctaaatttcttagagggtgcactttttggtctttgatgtcttggtagatattgtattgactgtaattaaatactggagacattcaattgtatcactcttttcttccatattttaatataaacttaaaaaaatgtcacgcctgatcttcctttatccataatgaggtcgtggcttgttcttcggctctggacagttggatcccaagattgtgatgcatcagcatcaaatgattccactggtgggggcgtcttattgcccccacgcggcatggaggccgggttttgcttgagtcgcgcccccttgtggtcttgggtctctctgtagatcttttatttgactgtaattaaatactggagacattcaattctgtcacgctttgcctccggcgggncnaacnacctgctnttttttantnncnggtnaaccgatgaactnt

SEQ ID NO: 3553 - DNA, 1617 bp, Glycine max
  unsure (1)..(1617): unsure at all n locations
  Clone ID: GLYMA-23APR03-CLUSTER388_2
attctcctaaaatcctccaaaaaccctaagactctcccattctcagtttctcactcttatgattaatggaagaccgcgcgcatgctgcacttcctcccggttaccggttctacccttccgaagaggttctcgtcggttattacttaaccaagaagaacgagaaccgggaggagggtttctacggttctgatttgatcagagaacttgacctctacgatcacgaccccttcgaattaccggacgctgcgtgcttttcgtacggttacaaagggaggaagaagcattggttttgttacgctaaagagacgaaacgcagaaacagaaaaagaaaggtgaaaagcgggttctggctccgaaagggaagggttcgggatatttgcgacaaccgcgacgacgtcgttttggccacgatgacgcgtttcgtcttctacgtcggcaattccctgaaaaacgctgccagaaccgattggattttgtacgaatatgcattagttgaccgcgttctggcttcattcgtgctttgccgtgtggtgagtaagcctcctcatcagaatagtccgtcggagattggtctgagttgttgtgctgaggagagcgttggggtggcggtgcgtcaggttggtgttcagtgtgatggatgtgccgaaagtgatgttgttgaagctaaggtgtgcgatgatggctttgttaatagagagaatgagattgctgagaatccaattaggtgtggtggtgagcatggtgatccagctgcacctgtttcagttgctcctggaagtcagccggaaaggctttctggacttcccagtggcagtgcattgtttgtagaagctatgacatctcagcaacttatgctttccattcaagaggaggatttcatagaattgaatgatattgcatgaattgattggctttaagagataatgtgaattctaatactgctctgaggaatatttatcacctgaaacaattgtattcagaatggattattgacccagctaatggggagaaagatttatgataatgagtagctattattctactcaaatgaagaaacatactgtcggatggggttgaggcaaatgtcatggaatggtcacttcacatgttaaggtagttactatagatctttgtatgttactctcttgagccctacttgaggaaatattcagcagatcttctttgttttgggaatgcagattttctcctgtgcctactgcagggcaattggctccagagggatagagttagagttaaatattggtattggtaattggaatatgcgatttactctagtattctatgagcaacttcaccgtacttcatgctttcattgttcccttgatcgacctattcatgtttaaattttattagccttcctgggatcatcaaaatttcctatttgccccttagtagcaagacctatttgttactgtctgtgctactttttttttcctatattgttcaaaaggagaatcagatgaattccaaattgtaagtgttacaacataatgatagtttatgaattgacttaacctttatacttttgaggttatgctgcctaaaaaaaaaaaaaannnnnnnnnnnnnnnnnnnnnnnnnnnnnnnnnnnnnnnn

SEQ ID NO: 3554 - DNA, 1286 bp, Glycine max
  Clone ID: GLYMA-23APR03-CLUSTER3903_16
ttttttttttttttttttataaaagttcaccagagtttttattagcggaaactatatgtgcaagcattaacaaatggtattgaaggagatgcttttgatgattaaactgagcaatgaagatgagaccgctcaatctttcactaataactgcaagagtaaattaaaactctcgcaaaacattgatatcgttacaaccactgatccaagtgacccttattttagaatacagttacacgcacaagtgcacaacacaagaccataggtaaaaacataaatggcatgaacaatgagtcaaagcaatggcagaacaataatattaacgccaccaccacttgtaacagtgcactcagttcctctgcagtagcagagaaattagacatagcccctgctcttcaaactctccactgcatccttgatgatttgctcaacaggagtgaattctagacctaaatcaatcagcttctttgatgcatcctttccacttgctctcaacaaccctggttgggtatcctttggcaacttagccacatcgtattcagggtataactcagcaaccttgtccacaagatcactaaagtgacgaatagattccacacacaagtgccttcctgctgctttcttgttctcaagtgccaaaatatgtgccaatgctatgtctttgaagtgagccgttcccataaagaagtcctcgtaggtctctttgccccctttgagaacactaacaagcacagccatgcttgaattgattcttggaggaagcagagggcccaatgctgtaccagggtttatcatgacaacatcaaaacctgtctccttcgcaaagtcccaacccgctttctctgctagagtctttgcaatgggataatacaactcgggatcttcgacttgaccaatgatgttaggacatgcaaggtggattacgccggaacaaccctttatggcagcggcaatggagtcgatgtcaagaagatccatttcaaaaaaatggagatgactctttgctccttccatttcctccaaatgtttcgtctcattttcatccttgatatcttggacggtggcatggacggtgtaaccacgctggaggaggagtaggaccacccatgatccgatggcgccgctggctccggtgacacaaaccaccttcgacatagggttgctttgttagttcagtgatgctcttcttttaacttgtttagtgtgatgaaggaagacacaatcctactatataaagaagctcgtgcagggaataaattggaaagacttcagagaaatccatgtatttg

SEQ ID NO: 3555 - DNA, 1482 bp, Glycine max
  Clone ID: GLYMA-23APR03-CLUSTER39223_2
tttatcgagtaccaccacgcgctagtcattaacttctgtgtttttctcaaaattatcagttttaattatgaatatgttagtgagagtgcatgcacacacacattaagacgttgataattatatgaataaattttgtaatagcagtcatcccactatcggataaccagcagtgaccttgattaggggagggtgatccgtgccaatgtctgggattgtcaactaggctgcgaacattattttaccacaccagccaagtcctgtgaggcggttcagtggtttaatttttattttcaccttgggaagctttttcacggtatttgctttttgcaggtgatatcagccttgttgaagttttcaatatataggtgtatagttgatgttttgtttttttatttgtccctaattaatgagcctgcctaacaggtcaatgctgaatcattgggtcggttgaatgaacttgaggagatgcgtcagaaattggaatcaaagaaaatgttgatggagaatatgtctatatgttctaggctggcaaaggaggaagctagcaagcaggaggagcagcttagtggtgcagtgcaatctcttttggtgtcagggggtgctctttctgtaaccagcagaaatctccaggtgagtttatgtcatattgtagttgattgttgatataatatcctttttttttcctggacataattaaatgtaaaatgttcagtagttatagggggaatgcattgttgtattgattaaaaaaattgattcattttattgatgctgaagtatgtgttgcaaattgacatttggagtattgttcttttttgcttttgactgaatttatattcaattgaatagagtataccttccttgttccacttgtacctgtccttcagaaatgaacttcttgttttctttcaaatgtcctcattttttaaaagcttccttttctctattagtccgtgtgagaaatgatattgatgaatttatttagctgaacctaaataagttatcattatttcttgtttttggggaaaaggggttattgtttgtattttactggtgttattgtagctagaaggctgatgatgcttttattataggaatcaagtagattactgtctgaagaaaatggttatgttcatctgagaaaattgcaaaagatgctcaggaagaggcaacaatatatgacatctcaaatttcaatgctctatcctgttaagatcttggttgggccagcacaagagcaagagcttgaagcatatcctttaggtagcctggcaggtaacgattagctcaataatagtcttttttctatgtggatagtgcccctaaggtaaaaaaaatagcttaggtcatgcaaaataagaaacttgcaatttaaataaattaagaaacttgagatactggatggttcaatcactatcccttaatttcttactggcaccttggatatagttcttccttgggggggggggcctacgtagctga

SEQ ID NO: 3556 - DNA, 976 bp, Glycine max
  Clone ID: GLYMA-23APR03-CLUSTER3947_2
tttttcacaaaccccaagaagaatggaacagggaagaagaagaagaagctcttttggtcctatgtcctcaactattccttgtcttctcctccttttgttctgtctctcaggatctgctgaggcctacaagaattacacagttggcgactctttaggatggtttgacaatactgagaaatccaatgtcaattaccagaagtgggctgacagtaaagaattcagcttaggagatttcctcattttcaacacggatactaaccactcagtggttcaaacatacaatttcaccacatataaagaatgtgactatgacgatgcacaagataaggacacaacccaatggtcagcagctgatccatccaacacccaaacacatcctgtgacagtgtcagttcctttggtgaaggaagggatgacatacttcttctcaggtgattatgatggtgaccaatgcaagagtggacaacacttcaaaataaatgtgacttatggacaagggttgccaaagagtcttaaatccccagaagatgcaccatctcctgctagtcctgttgctggagatgatgaatcagcaccagacactattgttccttctaatttcagtcaccccaaagaagaaagtgatgatgacaaagctagtgatagtgacaaacagaaatcatctagttctatttcaatctcaatgtatgcacaacttcacattgtcttactagggatactacttttcttgttttaaagagtggagatttattttatattattttttaattatagatatatgctactattattttatctatttttttattgggtgtgagtgagacagtggggttttgagttgaattgtgagctaggatataccacatgttattgttgtaaactaaaataatgtaacaattaattacaatcctttattgctaatttgctatatgagtttcaatttaattagatcatatataatattgcttgtcccttt

SEQ ID NO: 3557 - DNA, 1466 bp, Glycine max
  unsure (1)..(1466): unsure at all n locations
  Clone ID: GLYMA-23APR03-CLUSTER40031_1
gaatctttctgtgtgtttcccggtggttaagttcgtgcgatcaaggaactggtctgcgacgaaaaacctcacgtgcatagggctgtagctttttgtttatcttcttgtttccattatctgagccatgtattcaaaagggcaggcacattgccgtggttataatattagtgactccttgttgacttgagaggtcagttccatcctttattagttaccttaactttggcctttcctaacataagtaacacctgttcttggccatgaactgttaaaagtactctaccatgaacgcccatcgctgctcctagcctcaactaattcttaacatcctcttttctctaacattcatcccatgaaacttacttatacaaccccccctctccctccttctctctttaagagatcttttctccttatctctgcatgatgctgtgtctaacttgagaggttgtctttcacttttccgctacacttcaacttttacctttttacaacttttcaaaattataaaacaagtcatagagaccgtaatatcctctctcgatcctgtatgaacaaatccactttttgagatttgaaggcaaaagggcattgttctaatgttcttaaggtgataatgatataagggttactttgtttgctctattagctacccttgctttggcctttgctaaagtaagtacctccctttcttctcccaaaactgtttttagtatctaatcattaaccttcatcttccgtgctttcccaaaactgttcttagcatcatctaatcattaaccttcatcttattctaaaaataaaaaaattcttatacatccccccctctgtctctcctcgtctctgctttctctcctcttgaacaaagtggtgtctcccttgagagctacacttgcacttttccacttgaaaaaaaatttcaactttttccaacaagtgacaataaaaacaatggccctagaggccgtggttttcccacaagatccattcacttacggttgcaacaacaaagacttcttgtactcgttagtaggaggtgatggtggtggtggaggaggaagccacgagtacggtttccaagcatcatcagaagacaaaccccatgtgggaatcattatcaacaacaacaacatagaccacaccctgcatgcaaattgggattcatcttctccttcggtgttgcaaagtgtcaaagaacaatgggattcacactcctcccctgaagcttgcactgttgatcaatccctccccagagccttccctcttcctccttcttcttcatcccccgaagccgccgccaccggccgccgcaaacgacgtcgtaccaagagcgccaagaacaaggaggagatcgagaaccagaggatgacccacattgcagttgagcgcaatagaaggaagcagatgaacgagtaccttgccgtgcttagatccttgatgcctncttctatgtacaaaggggtgat

SEQ ID NO: 3558 - DNA, 2021 bp, Glycine max
  unsure (1)..(2021): unsure at all n locations
  Clone ID: GLYMA-23APR03-CLUSTER4005_3
ggtcaatgaaacaatattgtttctaagattctaantgtggtcgcggtcgcgatttcatggcgaccctttaatcacaactgtggttgcaatgcggtcgcgactgaaatcatggttgctaatcaattttttaaaacacagtgtcactatgtttttgaaggggtgtttttgattttcctaggaatttcaaaaactagtccttcatctgttccttccaacttatctattctgtcatatagtgaagcaagtgatttctcaaatcttccaacaccaaggtctgagggcgaaatcttgtcttccccaaatcttaaggcctttaccttcaatgagctaaagaatgccaccaggaactttcgcccggacagtcttcttggtgaagggggatttggttatgtttacaaggggtggattgatgaacacacatttacagcttcaaaacctggatcaggaatggttgttgctgttaagaaactcaaacctgaagggttacaaggtcataaggagtggttgactgaagtggactaccttggacaactacaccatcagaatctggtaaaattgattggatactgtgcagatggagagaaccggttgntggtatacgagtttatgtccaaagggagcttanagaatcatctgtttagaagaggaccacaacctctttcttggtcagtgaggatnaaagtggccattggtgctgctagaggactttcttttcttcataatgccnaatcacaagtcatataccgtgattttaaagcatccaatatcctactagacgcagagttcaatgctannctctctgattttggcttagcaaaggctgggcctacgggtgatagaactcatgtctccactcaagtcatgggaactcaaggatatgcagcacctgaatatgttgcaacaggtcggctgacggctaaaagtgatgtatacagctttggagttgtgttgcttgaactattgtccggtagacgagccgttgacagatcaaaagccggtgtagagcagaatctagtagaatgggcaaaaccatatttgggtgacaaaagaagactatttcggatcatggacaccaaattgggaggccaatacccacaaaaaggagcctatatggcggccactcttgctctaaaatgccttaatcgtgaagccaagggaaggcctccgattacagaggttttacaaactcttgaacagattgcagcctcaaaaactgcaggaagaaactcccaattagaacaaaagagagtccatgctcctgtcagaaagtctagtgtgcaaaaggggtcccatttgaatcatactcctactgcattcccataatctgcttgtgtactctgaattttgaacatctgtatatacattccttatttttataaggttggttttgacaaggagaaatgctagggaacacactattttgaacacttcctctcttgtttgttgaaatttattgaagatgacaaaattttgttggtcctacatgatgtttaatgatcttttctcttgattttgttgtttttaatcaattttaaccaattagagataatgcatttgaaggagtgtggtagaaagtgtgttcctagcactcctctttgacaagatataatgtggcatgtacatgtacttagatgaaatttcaactgaatattagcacattatttccccagcatgggttaaggcatgtgtcttaaatccaattttgggtcaagcacggtaagttagttacccccatttatccaaatgctatgcaagttattgcagagcagtattctgcatatatatctcctgttaccaatgtcttgttgataataacaacatgacacattgcttcccttctattatgggtgtccctttatttggttttggcctaaaacaattccaaaacatggagagagagagagggttgttgtatatacttaacatcttgtgtgcaaaatttgttgaattagtttttaataccttcttatcatttggatttggattttgagtttcattaaactatattattttgtttgagt

SEQ ID NO: 3559 - DNA, 859 bp, Glycine max
  Clone ID: GLYMA-23APR03-CLUSTER403318_1
gttttttttttttttttgggctcaaagaaaaatctaaagaaacacttctttctcatagtcaacaacagaactaatccatttccgtttcctcccaaaccctcactaacctcggcaggaattcaagcatcgctatcgtcgctgtcgctatcttcgtcgtcaatgcccgcggccacggcagcagcagcattccccgagtcaccggcaatgtgcactccggaactcaccgtccgcccccgagtcctggacggcagaatgttattcaaatcgacctccgtgagcgagtcgttagagaaatcgcttccgtcgtcgtcgctagcactatcctcgtcggaatcatcgtcgtcgtcgtcttcttcttctacaatcattttccctttgcccttgtcgtcacgcataatcccctttccctttcggttatcctcctgctcctcctcgtcgtcgtcgttgtcgtcgtcatcttcatcgtcgttttggaggtcgttgtcgtttgcagtgggtagtgtttctttgaggtcgagcttggggattttggaagggaggtcttggaggtcgggatcggacatgcgcttggagggcaatgtgggttcttggggtgggtcgttgtgttcagccatgaatatgatttggtgaatagaagaaattagggttttggggagaagaagaagaaggaggaggaggaggagaattaataccggcggcaacagtctctcgagtctcagggactgtcacaccgaatgaatggcttgccttagtacaaaacccagctgtgtggaacctagctatttcttacactaaataggttttttttcgattaggatgtacccacattgccctccaagcgcatgtccgatcccgacct

SEQ ID NO: 3560 - DNA, 586 bp, Glycine max
  Clone ID: GLYMA-23APR03-CLUSTER404163_1
tcgatcagctacgtaggcccccccccctgaattctcagataccaaattgcgtatgtgagttctaccatttctcttgcttccacctccatgtgctgcttcagtatctgcatctccaagtggcagaatgtgggaggcaacccagtactaggtagtacgccaatgacatgttggagtggccacggaggcgcatttaaaaaattactgcacagactcggattgcaagtagttgcactcaattatagctactcaactagctcatagtcgtcaagggatttccatggggaggattacctatcaagagggtgcatggaggatgcaaatctcaactatgctgagtccaacagagtctccatattaacagtggacaaattttcaagaaggatggttcttcagtttctgggatttaatcacgtgatatgttatgcttctcctgctttggctgcacctattatgccagacattaaggaacctgaagtcatacggtttgtctgtcttttatccaattttataattacctaatcttatttttgtagaaggggaaggaccagaagcacacgatggagatttggttacattcaattgtgta

SEQ ID NO: 3561 - DNA, 1973 bp, Glycine max
  unsure (1)..(1973): unsure at all n locations
  Clone ID: GLYMA-23APR03-CLUSTER4044_2
atgcatttacgttcttagttctccacgccaaatatagcataagtgctgattggccatatagctattggcatattcaattacctttttaaaagcaaagtccaatggccaaatagactagtgttgtttatcaatataccagcaaatcacaagtttggggtgagaattttgatcataagaaccttgtaataacaacagcagctgataatggaaagaaggagagtaatggagcacctaaagacatatcctgcgtttcccgggtggtatgctgatgtttcctggccaggagaagcacacatatataaaatggaaaagatcctattccacgggaaatcagaattccaagagcttcttgtattcgaggtaccatgttcattgttagcatattccatactcttaaaatcatttgatttgttcatagatttttgttattatttgattttattgtaacttttcctaatcctttttttcctcatttagtcgctacagtgtatgggttacaatataggcacaatctcttgtacctgagcatgtatgttatcacattagaatttatatcacattaatgcatattgctaagttagtgtacctcttataatattgtcatttgttcaagaaatggaggaggatctaagtctgtctgctaaattactttattatacttttccctgtttcttacgaataaaatattgatgacatcccagagtgatgtgaattgtgcagacatctagacatggcaaggttgcaattccggatgggtatatccagctgacagaaaacgatgaatttgcttaccaagagatgctcattcaccttgcactctgttccattccaaatccaaagaagggtttttgttcattctttctattcctcgcttgcacatgaactatcctatctaatgaaaaaagaaacttttgtttaaacattacaggttctgcttgttggagggggagatggtggaattcttagggaaatatcacgccactcttctggtgagcatattgatatatgtgaaatagacaaaatggtcattcatgtttataagaagtttttcccagatatagctgttggttacgaggatccccgaatgcatgttcatatcagagatggnnttgcgttcatcaattctgttcctgagggcacttacgatgtcgttatactggatgcttttccagcaatgggacatagtgcagatgttcttgctgataaatgcttcttagaatcaatagcaaaggctcttcgaccccgtggagtgctgttgtggcatacgaactctgaggttgcagataccatagctaattgcaagatattcaaaggctccgttaattatgcctgggcaacagttcctgcatattggggcgattggattcatgctttgctccacggagggtcccccagtgaacttcaaacatccaataaataaattgaatccagagaaaaatggggtagcaaagggacctcctaagttttataactcagagatccatgctactgccttcttttgtggacaaggttggttgatccaacaagatattcataaataattcggtagtattaaggaattgttgttagttaccctttgtactgtctcgttctgcctatttatgggtaatatgttgcacgtgcgaaactatctcaattttatttgtattggagtattgtaagagctgcaattattcaactgcagtagtctcgggtagctagctttactctagttagtcattagagagttagtttctgagttagttagttagttagtgacagttgttgtaaccaacagaatagtctataaatactaaactgtactcagagtttggtggttaatgaaactgagttgctttccctttcttttgctgtgtcgctctgcatatttatgatattatccttttattatgacatttagttgtattctatattccctaaaatattagatgttacacacgtgtatgattcatctaatgtaaggtttgcaccta

SEQ ID NO: 3562 - DNA, 897 bp, Glycine max
  unsure (1)..(897): unsure at all n locations
  Clone ID: GLYMA-23APR03-CLUSTER40491_3
aaaaccctttgaaacggaatttgtgtaagaagagaaagagaacgctgcaaagccgaagcagagtttcaattcaattcaatagcgatttagagtttccgaaaagaaattgatttcacgcatttttagtcagtatcagatggatcactttgcagcacatgaagagcaacttgcttcacagagaatgaggcagaaacttgaagaagtaaatgtggctgctcaaactaatcttgcccctgtccaagactatgtcaattacacgctccaggagaggttgaatagatctctgatggtgtgtcaagataagtacgaggcggctaggctacagaagaaaaatgatgctatgaatgatttggtttcctgtgctgaccagtcaatccaggaaagcatcaagacgctgccacatcttgccaacaagttgaaagcttcctttggaatcagtgacaatggctcctagtagcacgtttttctagtgggaaaagactatcattgtcgttattggttcattgtagcttttttcttcttccatacatttaatttaacccacaagaaaatacttgcattgcaaacagatcattgatcataagggtgttttctcaacatgtgagagttttagtcaacgatggacgttgtaatttgcaagaaagtttagccgcacaattcctatcttgactatagttgcatatggttaacattcgaatacaggggacatcaaatgaaggatatgtataaacctagaatgcttaaaaagaaacaaacatattttttttaaagacagggtaaaagacacaagtctgttcaacgtgaaagcattaatttatttggttatctcgtctggattgattatttatgaaaatttgaagaatggattccatccttaaaaaaaaaaaaaaaaantta

SEQ ID NO: 3563 - DNA, 915 bp, Glycine max
  unsure (1)..(915): unsure at all n locations
  Clone ID: GLYMA-23APR03-CLUSTER405_29
cggaattggtaccgggccccccctcgaagttaagntaaggtagccccccccccatttgaagaaacccccccaaagttccaaatnttggtttggaatagatagagtgatacgcgtcacatnttcataataataaaaaaatggcagcggcggcggcagtgacggtgctactcccacctaggattccgaccaccaccaaccgttacccgctgctctgctttgccttctctccctcctcgcgtctcaaaacaccaaaaccactttgttctcaccttccctcaacaactnttcagtgtcccgaaaatcttctctgcttcagaccagagcttcttcagaggaatcatcctcagtagatgccantgaggtgttcacagatttgaaggaaaagtgggatgctcttgaaaacaagtccacagtacttctttatggtggaggggcaatagttgctatttggcnatcgtcaattcttgtgagcgccatcaactcagttcccttgcttccaaagattatggagttggtagggcttggatacactggatggtttgtctaccgataccttctgtttaagtctagcaggaaggagctagctacagacattgaatcactgaagaagaaaattactggaactgaatagagtggtgttagcaggtatcaagtcaagtttatcttctgagcaccatttgtttttgttgtgctgttatcccctgtataagagtcatatgtatcccttggagtagaatagaattcctctcaacctgtattgcccctgtaatgaacccatttcattgttaaaaataatgtagcaaattttatgtatatggctctgaatggaaaccattatcctttcacttcctcactgtataagaaatttaagtcatatatgagtatagaacacggaaatatcatatatcggaccaa

SEQ ID NO: 3564 - DNA, 837 bp, Glycine max
  Clone ID: GLYMA-23APR03-CLUSTER405_35
ccaattttttggtttggggatagatagagtgatacacatcacattttctcaaagtaatttattaattaataaataaatggcggcggcggcggcagtgacggtgctactcccacctaggattccgaccgccaccaacgttacccgctgctctgctttgccttctctgcctcctcgcggcaccaacactaaaaccactttgctcttatcttccctcaaccacttctcagtgtcccgaaaatcttctctgcttcagaccagagcttcttcagaggaatcatcctcagtagatgccaatgaggtgttcacagatttgaaggaaaagtgggatgctcttgaaaacaagtccacagtacttttttatggtggtggggctttagttgcatttaggagagccggaaatgaagagaagaaagctttcaaattcctctttttgcatcaaagaataaaactagtaggtttaaatatgaagcatatatactcaatgaagcgactgtctcatttgcatggctgttctctatgctatagaaacgcaaggcctttagcatgtggtgcctcgtatgggaggagcttcaaaagcaaagcacaaacaaggttcacttctggatgatattcttattctttacttttcttttttcaatcttgtttcggcaaagtgatgatattagtcacttgtgggttatataatattttatagaggacatttagcttgcactgtgttgaatggtttataccacttttgtagacatttgtattataagcactccctgaaggaggagcagctattgtaagttatcagaatgtgaaatatatcgatgttaagcaaaaaaaaaaaaaaaa

SEQ ID NO: 3565 - DNA, 1562 bp, Glycine max
  unsure (1)..(1562): unsure at all n locations
  Clone ID: GLYMA-23APR03-CLUSTER4064_2
ccgggccccccctcgagtcagctacgtaggccccccccccccaaaccaagagggacacttgaataaacatttttgacctctgggtagtagatgtagactgccatcactaaccaaattggatgtgaataactgcttgaatgtgtcagtgcgtgtgcatgcattcactcaaaacactcaaacaattataagaacttcaattttaataattcttaacctcatttgattatcttatttagattattaacacaaattgctgctcttcttctattaactgcattatgaactttaacatttaaggtcttatctgctgatggaatcgacttcgttgacatctgctaccaatatcatgttactgtcttttatgataccatcaaatccatggcataaaagtgaggcatagaaacgagtaaggatggagtagcttaacaggacaatcatttagtagaacttctgtgttataagaacacaagaaattttggttcagtaacaatttttgtggtgatataaaaaataggatggaatggaactaaacctaatggaatgcattttattcattccatccaatgccttgttatctatctatggacaatgaaatggtaactttattctatttcatttcattttattccgcacatcattagatatccaaaaatagtcttctttatctaacttgttatagacaacatcactttaatagttttttaaaatctaggcttgaattcttctgagaaccaatttctgggttttatttcagaagcaatcaggttttttttatttatttaattcatacttgactgatgtgtcattggcttcgatgtcagagtactgtgaaaagtatgctaaacctgaagacataggggaagccacagaagagaaatccagcgatgaggagatgagtgaagatgaatatgactctagtgatgaacaggttgttggtaaagcagacccctagctttgcatgcatgtcctgttcttaactttgtattttatctgtacatgatgttcttcttctagttctgttaattcatctcaccacatgtgaacttatcatggataaggggggaaattccccttccttctagtttcccagtcgctgtaaataaagtaccattgattttcctgatgcaatcatatttcatgtttagcactttcaagtgattgtgctgtttagccatggtaatttaatcaacaatgctagcatacagtgtataaataacactctttgtattgggtgattcaaaaaaaaaaaaaanaaaaaaaaaaanaaaaaaaaaaaaaaaaaaaaaattnnnnaaataaaaaaaaaaaaaaattaaaaaaaaaaaaaaaaaagatttnnnggcnccccggggaaccccaaanttnaaaagggnnccccccnngggggaaccccccttttttttccccttaagggggggtaatttccaagttggggaaaaccggggcaaaagttgttcccggggaaaaattttttcccccccaaaatcccccaaaaaaaaaaacccgaaaaaaaaaagggaaaacccggggggcccaaagggggggccaaccccccttaattg

SEQ ID NO: 3566 - DNA, 1965 bp, Glycine max
  Clone ID: GLYMA-23APR03-CLUSTER4068_1
ctgttccgctccaggagaatggggaccacagtcttttggagtcctacttcaattctttcccaccactttctccccacaccatcatcttcttcttcacttcttcaacataacaaaaaacaacaactcagctaatgactctcacgttccacattgttgggcacccttttcgtagatccaactccaaaaaaataacaactttccttcttttcagttgaaaaaaactacttcatttttcttatttctttttttatattccaagaaaaggtctttcttttttggtttttgttttttgttttttgttttagtttttcagtggcagcaatgacggaggtgcttcatttctcatcctcttcgtcgccagccacttcttcttccgatggcattctccaagaaccaccaccaccttcttctgtgagcgtggtggtggatgggttttctacggtcaccgactgtgacgcgcgcagggtcacggtcaccgacagaacgcaccaagagctttctcttctggcaattcttgtgacccttttgaggaaatcgctgattgcttgcaacaagagcgacgagggacagggcgccatggagattgggtggcccactaacgtgcgccacgtggcgcatgtcaccttcgacaggttcaatggcttcttgggcttgcctcgtgagttcgagcccgaagtctccacaaggcctcccagtgctagtgcaactgtttttggagtttcaacagaatccatgcagttatcgtatgacacgagagggaacagtgtgccaaccatactgctactaatgcaaaggcacttgtatgctctcggagggttgcaggcagaggggattttcagaattaatgcagataatagtcaagaggagtatgttagggatcaattaaataggggattggtcccagaagatgttgatatacattgtttggcaggacaaattaaggcttggtttagggaactgcctactggtgttctggattctttatcaccagagcatgtaatgcaatgccagactgaagaggattgcgctgaactggccagccagctacctcacaccgaagcttcccttttggactgggctattaatttaatggctgatgttgcccaagaggaacacttgaataagatgaatgcacggaacatcgccatggtttttgcaccaaatatgactcatatggcagatcctttgactgcattgatgtatgcagttcaagtgatgaacttcctaaagaatcttatattaaggacactgcgagagagaaaggattgtgtggtagaatcgtctcctggattttgtttagagccttctgatgagaacggggacagcagtcttccggagtcctgccagcaagatgatgatgttgctgctgaaaatgaagaggccggggaaacctttgtttctgagaaaactgaattagaatgttcgcctgagtccctccaaagcaaatattcaactgaaggaggatgtggcagtttgataggctctcctgagaatctggtttgtgaggaggacttgtattgtgagtttccatccaaaggaaacatcgggaagagtaagagtgttcaatcaagtaattccagttctaaaaaggggtcccaaaaaaccagaggcatgctccaacctgtgatccatgcaacagtggctgctgataaaaagggtattagcaatcagccgcatagattcgagatcagagcggatagaagcctggcggtgaaagaagaatcactgtgatggagtgtagtttgattctgattgtgcattgtagttgtaagtttgtttcaaggacaagtttgtgaagtggttcagatttttttcattttcctcagtttgtttaacatgtctgatttctagaatgacactatgataaacactactgaaataacatttcccaaaaaaaaaaaaaaaagttctcaactactcataattattcctgaatgacaggccattcacctgtcaatgttgcaa

SEQ ID NO: 3567 - DNA, 1707 bp, Glycine max
  Clone ID: GLYMA-23APR03-CLUSTER4075_4
gtccatggccaaaatgcgaccagcattgccccttctgctcctcctcctcctcttcctgttctctccctccgcggcggagataaagtcgctgacgataaactccgacagccgccccatgatcctcttggagaaattcgggttcacgcacaagggccacgtgtccatcgccgtctcctctgtctccgtgggcgtgctctcctcctcggtgcaaccagaatcctctcgcctgggtttcttcctcctgaacgaagaagccctcctccaggtcctgatggagatccagcagaacccctctttctgcgtcttggactcccactacatcctcctcctcttcaccttccgcgacctctcccctcccccctttgcctccttcaaccgctcctaccccgtcacctcccccaacgaatactccctcttcttcgccaactgcgcacccgaaacctccgtcaccatgtccctccacactgaagcctacaatctcgacgctgacggttcacgcgactacctctccgccggccaaaccctcctcccttccctctactttctcttctttttaacctacctctccttcttctccttctggctctacatctgctacaccaacaaactctccgttcaccgcattcacctcttaatgtctctccttcttctcatgaaggctttgaatctaatctgcgccgctgaggataagcattacgtcaaggtcaccggaactccccatggctgggatgtcctcttctacatcttccagttcttccgcgtcgtcctcctcttcaccgtcatcgttctcgtcggcaccggctggtccttcctcaaacccttcctccaggagcgcgaaaagaaggtcctcatgatcgtcatccctttacaagtcctcgctaatgtggcttccgtcgtcatcggcgaaacggggcccttcatcaaggattgggttacttggaatcaggttttcttgctcgtcgacattatttgctgctgcgccatcattttccctattgtctggtccatcagatctctcagggaaacctccaagaccgatgggaaggccgcgagaaacctcgccaagttgaccctcttcaggcaattctacattgttgtcattgggtacttgtacttcacccgcattgtggtctttgctttgaagaccattgccgcttataagtaccagtgggtgagtaatctagctgaggaggccgccagcctcgcgttttatgtcgtcatgttttatatgtttaggcctgtggagaggaatgagtactttgtgctcgatgaggaggaagaagaggccgcggagatcgcgctcagggatgaagaatttgagctttgaaagaatgaaatagtttcgctttaccgaatttcagtgcaatatggtttcattcgcggatgacttggagaattgatgtttagagcaagtgaagcatgcaattgaacagagtgctgcctggatccatttttcttttactaaaagagtaccttgaagcatagcaaggattgattgatgatgggcaagtgggtggttatgtagttaactatatctcctaactgtttacatgttaaatgtatgtatgttttatttgctcctggtttatacttgttcatttttgtgaaagatctgctagaaatgttgttgattttagcgtttaaaaaataaactgtgcagagtcatataaaatggatagtttatgaagagttcccccttggagcccc

SEQ ID NO: 3568 - DNA, 1465 bp, Glycine max
  Clone ID: GLYMA-23APR03-CLUSTER407692_1
gaagcaaagtccaaaaccaaagttttttcatggcaagcctcagcatgctacgttttctgtttttagcaactttgtttgtcataaccgccacaagttccacaaatgacgtaaaagctatatactggctcgaacaaccacttttccctccttcagccataaacacatcactcttcacccacgtctactacgcattccttgcacccaacaatgtcacctacaaactccacgtttcaaactccacagccacaaacctcgcaaagttcaccaccacccttggctccaccgtcgccaccctcatctccatcggcggcgccaactccaacgccactctcttctctctcatcgccgcaaattccgccgcgcgcgccaccttcatcaactccaccatcaccctcgcacgcaccttcgggttccacggcgttgacctagattgggagttccctcgaaccgcgagcgagatgaaaaacctcggcctgctgttcaaaaagtggcgcgccgcaatagccgccgaggccgccgccacgggccgggaaccgcttcttctcaccgccgcagtgtacttctccgtcgattacttcttatccgaaacgtcgtcgttgaggtacccggtgggttccattaacgagaatttagattgggtcaacgttatgagctacgatctaaatgggccctggagtaaccatactgggcctcctgctgggctttttaacccgaaaagtaatgcgagtgtgggttacgggttagggtcgtggatccggggcggggttattccgaagaaggtggtgatgggtttgccgctatatgggaggacgtggcagttacgtgaccggagtgtgcatggaatcggagctccgactattggaccggttcctgggtcggatggtgtcatggcgttatttcaagtgttgcagtttaacaaagaaacaggtgcgaaagttgtatatgacagggaaacggcgtcggtttattcgtatagtgggagttactggatcgggtacgatgacccgatctcggtggcggttaaggttgggtttgctcaagctttttcgcttcgtggctatttcttttgggctgctggcctcgacactagcgattggaaaatctcaacacaagctctgaatgcctggatgctttgcattaaagagaccggaagaatgaactaaatgttgactttcatcccttcacgtttgtgctatcattttcatcacgcagggaagatttgatttctatttcaacatcaagtaattgaatttattgaatatacaatgcacaagtgtagatggcaatgccttcattcagcatatgaattctttttcacgtagatcccgtgtagaacataacatgaaagggggggaaaaatctcatccttttgcgtaacagtctctcaatttactggattgagagttataagtattgccaatgtggaaaactttataaaggttaaaatgcaaaaaaaaaaaaaaaa

SEQ ID NO: 3569 - DNA, 674 bp, Glycine max
  unsure (1)..(674): unsure at all n locations
  Clone ID: GLYMA-23APR03-CLUSTER409599_1
gcacgagagtgcatctaccattttcacttcacatttcacaaccttttaggccctttaccaaaacttttggcagctcaaacagataagcagatatatatcaagctatctctatctattacttcacatttcacaaccttttaggccctttaccaaaacttttggcagctcaaacagataagcagatatatatcaagctatctctatctattaatgaagatgctgctggatgcagcaatgaaaatgatggatatcatgacaacatctatgctgagaacaggagaaagaagcaaggggccaaagtggatgaagaagaaagcgatgattcaatggcttcggacgcttcctccggtccgattcattatcaccatgcctatgctcacagccaaggtagtcacggcaccgcagcctctaagaaagataaacaagatcatggaagcaagtgttcttctaagaagaatgcaaacaaacaggagaagaaacgtgttgacagcagaagtaaaaaatgatgaaattgtccattgtatatgatgctgggatttttgtaaccatgcatcttcataatttgaatttgttgatttgtactcacacctcttctatccaaaggaaatatccatagtcattctttgaggnaatggaatcacaagttttatgcnttttcaaaaaaaaaaaaaaaa

SEQ ID NO: 3570 - DNA, 1212 bp, Glycine max
  Clone ID: GLYMA-23APR03-CLUSTER4099_2
cagctacgtaggccccccccccattttaatttgcactatctaatctcaacttatttcaatgcagtttactctcaattagccacttgcactctacctctctcaaccacaaataggtttttctctgttcgtgaactcaagttctcagtcacaaacaggtaacatgcctgagaatccactgcaggccttgtttcataacatcgaacaagtctcaagctttgttcaacaccatctctctaatttcataggcattcatttccagccatcaggaccccatagtggctctctcttatcaatctcttcctctaccaaagccccacttgcaaaaactgcatcttctgtacaactcggtgatactgctgtcaagggaaagtctgctgccccagttactaaggaagagcttggaagggctacgactttttaatgaccaagttctcttttcagtacccggataatcctacaagacaacagaagaaggatgtaaaagaactggtacagatgttacctcgaatatacccttgcagggaatgtcgagatcactttaaagaagttcttagagcaaatcctgtactgactggatcacatgctgaattttctcagtggctatgtcatgtgcataatgttgttaatagaagccttgccaaaccgatattcccctgtgaacgagttgatgcaaggtggggcaaactggactgtgaacagaatgcatgtgaaattattggaagtacatcaatttttgggaggatatggcagaaatctacgtaaaaatgattgacatacatactatgtgagaggtgttaaattttgaccttttgataattgttttagataggccaagggttatttgttggttatacaccagagtacgtgaatacattttatctccaatattcataactcggtttattatagtaaatgaaaatttaagcccggattatattgaggcaaaagaactcacagagatacatttacacaaagaaagaacgcgtttactgtttagagaccaaaccccatcttttgtaccactcaatgaatcattagtctcatactcaaactctgaaagcgagtgtttttttagagctgagacaaatagtatatatttgagtttgggtgattggagaagaaactgaacaagagagattgcataatgagagtgtgctgtcttgagtgagtgagcattcttgtcaaatgaggtttacctttccgaggtgattt

SEQ ID NO: 3571 - DNA, 912 bp, Glycine max
  Clone ID: GLYMA-23APR03-CLUSTER40_21
gaattcggcaccaggtttcggaggagaagaaaatagtcgttcgagatggcccgtacgaagcaaactgctcgtaagtccacaggaggaaaggctcctaggaagcagcttgcaaccaaggctgcacgtaagtctgcaccaactactggtggtgtgaagaagccacatcgttaccgtcctggtaccgttgctcttcgtgagattaggaaataccagaagagtaccgagcttttgatcaggaagctccccttccagaggctggttcgtgaaattgctcaggacttcaagactgatctgcgtttccagagccacgccgtgcttgcattgcaagaagctgctgaggcataccttgttgggctctttgaggacactaacctgtgtgccattcacgctaagcgggtaaccattatgcccaaggatatccagctggcaagaaggattcgcggtgaacgtgcttgaggtggtggttgtgaagatgaagatgaagatgggttgctgcgggtggtgtttttgttgttcaaattcctttttttttttttttttcaatggatagggttgttagggagtgtaggtgttttacggtattacccattaattgtgatacaggcaaatactgccaagtgtccgtgactgtgttttcctccttttagaaaattggcttgtaattgatttttggacatgtgtgtcataatgtttctgtttttagtttttacctacgggatgtagtcactttggaattgtattggacaacattcagttgccatctaatctcgtttaagctaagtttgttgtgctaattaaactgacctcccttcttggttttgaaatgagaggatttgaatatagtattacagaactggcaaaaaaaaaaaaaaaaaaagaaaaaaaaaaaaaaaaaactcgagactagttctc

SEQ ID NO: 3572 - DNA, 1130 bp, Glycine max
  Clone ID: GLYMA-23APR03-CLUSTER4106_1
agcattgtatacgttcactgttgacacagtgcaacgctaacacctttcctcgctatcaaacgacatgtacctcttcccatgcaagcctcctcccaagtgttcatcaccctctccacgtgtcaccaccttcctcttccttaaattctcatcaccacccctctctcgctttccataccccacaatccctcttacacatacatagctagcttcaattcctcccatggcagacccacagcaacaagacaactacatgaagcgaaagccttccaattccaatgttctcgtcctcgccgccctcgtgcctttcggcgtctctcttctcatcctcgtcggcctcaccctctccgccaccgtcatcagcctcaccgtcgtcaccccactcttcgtcattttcagccccgtcttgctccccgcggccctattcatcgctctcgccgtcgccggcttcctcacatccggagtcttcggcatcacctccatctcttcctttgcttggttagccaccaatctccgccgctcacactcaccggaacacccgcaacgtcctcgggacgacgcggaccgcgtggcccagaaaaccgatgaagccgtgcgtcaggcccaggaaacagtccatcaggcccaaaaagagaccgcaaccaaggcccagaaagacattagtgaaacaagaaaagcccacaaagaaagcgtagcaacctcgtgagtgagtttgttcggttatgctatggccacgaaggagtcatgttcatgagggaggcttttgcttaatgcactcccaaattgtttcctgcacttcctatttcattatgaaaagttcattctgaaatgcaactcctattttggaataagcttttcataatacaacaggaagtgcagggagtaacaataggagtgcggaaagttttaacccatgaaggaaaagagggtttccttagtgtaactattctaaagcctgctttactgtggattgtgatgtcaaagtgttggtattagtatgtagtaaacctaaacctagtgtgttgtatgcaatagagtttaaatgcaatgcaatgcttatgctttccaattactgttacttaatttgtaaagtgtactacacttcaatttcaattttagttgattgggatcaa

SEQ ID NO: 3573 - DNA, 1160 bp, Glycine max
  Clone ID: GLYMA-23APR03-CLUSTER411749_1
ataacacaacactgatcactctcacacacactatttgtaaaattttctatctaaacctgcccccttaaggacacaacaaaaaaaatgtttagcccttcgcatctcaaaaccttgtaccctcttcaacaagccttctcagtaaaaccatcttcaaccataagctccatgaagctaaagagaatcgtgcacaccctcatagtctcccacttgtgccgaatcattcgtgcactctccaaagtcaaagatgtaatggttgagattcttaaagaaaactcaaccaccatccacttccctcacaaaaaacattgcaatagacgcaagaagatcatcctaggctccttcaggctccactacaactggtgctcctccaaatcctcgcacgtgttgccggtccccgaaccgatttatgccacgtgccgcgacgacgacgacgaagattgcccctacctaaggtggcttgaggagaagaaggttgaaggtgaaggtggtggtgatagtaataataagggtgcaagtgcaacacgtaatgagcatgttgaaatgaacgagattgatgtgttagcagaaatgttcattgccaattgccacgagaagttcaggttggaaaagcaagagtctgataggaggttccatgaaatgctggctagaagcatgtgaaacaaaaaagctcaacacatgttttggtctttcttttgaaagttggtttcccacgttcgaattcgaacttcttgttgactatttgggaaaagcttgtccatcatcatcgcatatcatatcaaatgtgtccagggttttatttattgtttacgggtcatatatattaatttgcctttttctttttatccaaacttttcaaaagactaaggggggtttgaactttgaagagttgtacattatatagggaatatgggattgggaattgtgcaattcttctgtctgttgatacggtcacggtagctttaacttttaatttgcagaccttattatgacaataattgagaagtgctgtttgaaaaaaaaaaaaaaaaaccttatagaaaaactacatgacctctctgcttagaagttgttttccattttcatatccatgtaaggtttgataataataagccgttttttctttttttaggaaaaaaaaaaaaaaaacagggcgcgccgct

SEQ ID NO: 3574 - DNA, 947 bp, Glycine max
  Clone ID: GLYMA-23APR03-CLUSTER411_6
atacattctcttgtcacagttttctgtgtcaccggaactcgtttctttcaaaacacttcaaacatctcaaacgctctctttccggcaactaggttaaagttcatcaatggcaggtcgcggcaaaaccctaggatctagcgccgccaagaaggctacctcaaggagcagcaaagccggcctccaattccccgtcggccgtatcgcccgtttcctcaaggccggaaaatacgctgagcgtgtcggcgccggcgcccctgtctacctcgccgccgtactcgaatatctcgcggctgaggtaattgccgcaattagtcgttcatttcgaattcgattttgaaattatctccctatgtgattagatctagggtytcgtaatttcgattagattcatttgccctaattgaatggtttgaacattgttttaggttttggaattggctggaaacgctgcgagagacaacaagaagactcgaattgtgccgcgccacattcaattggcggtgaggaacgacgaggagttgagcaagctactcggtgacgtcaccatcgctaacggtggcgtcatgcctaacattcacaatcttctccttcccaagaaggctggtggatcatccaaggctgctgctgcagacgatgactcttaaataggggttttttttccgagaaaagttatcgaatttattctctttggattctctctgtttttgtagtttttcagtttttgataattgtgttctgtagatgtagttaggttttcagtcactgatgtgaatagagaacgctctttttcttcaagaaagattgttggaaatttaaatcgattttaattggtaacctttcagtcttgatctaacatttgaatcctaattgcaatctatgacgctggattgcaacaaattcgagataagttaaacttttgtttcctattgccaaaaaaaaaaaaaaaa

SEQ ID NO: 3575 - DNA, 943 bp, Glycine max
  Clone ID: GLYMA-23APR03-CLUSTER4134_2
aacaacctacgaggatctttcttctctccaccatcgttgtgtagtgcgtgtctctccgtaaattgccttcgactgtgacaacacaccgatcgccatgaacatcttcaccaagaaacccacggccaaagaggctctccgtgatagtaaacgacaaatgacaaacgccactagaggaatagaaaaggaaattggagctctacaattggaagaaaaaaagcttgttgctgagataaagagaactgctaagacgggaaatgaggcagcaactaaaattctagctcgccagttgatcaggcttagacaacaaattgctaatcttcaaggtagtcgagctcagatgagaggcatagcaactcacacacaggccatgcatgcacattcttctgttgctgttggcttgaaaggtgctactaaggcaatggtagctatgaataagcaaatggaaccagcaaagcaagctaaaattatacaagacttccagaaacaatcagcacagatggatatgactactgaaatgatgtcagatgccatagatgatgccttggataatgatgaagctaaagaggagactgaagagctgacaaaccaggtgctcgatgaaattggtgtagatgttgcctcacagttatcagcagctcccaaagggagagtcgcaacaaagaatgctgaaaatgttagcagctcgggcattgacgaacttgagaagcgtttggcagctcttagaaacccataaattttgcatgggattgtgattctggaactcaaaagttttaaactgaaattctttcctgaagtatgttttcttgggatttcacaagttgagtgtgtatatacaatcttgaaattattatgtatgaataatgatatattaaaatttttgagatggctatttacttgtagaagttgtcgttggggatataaggaaaaacgttagtttgactct

SEQ ID NO: 3576 - DNA, 1375 bp, Glycine max
  Clone ID: GLYMA-23APR03-CLUSTER4154_2
gtgtggccataagatgtgtttagcacccgtttgattggcgttgaacacattattgataatattttattttgtatatgccactatggcatatactactacgggaagaagaagaagaaatacattgagttagggaccccataattgataagaagaaaacgaaggaatgtgtctataggaacttattctagttattggcaatgaaatcaatggtggacaggccagccaagaagatgttgtggtatgtcttttctgttgggtgaattgaatcccagaatacatactttgatggatcaaggcacacatttgaaagcttattacacaaaattgatgcttcaatgtacccacttccacaacagccactatcaacctcatcaaagccaaatctttttcgcgcttgaatcatatcggctatgggtttatatgtgtcaacataatagatcttagcatctggagtagacatattgagctgcaattgcattccgtgtaattcatgttgaaggagtagattgtaatctcttgcaatggaggaatatttgtcaatacaaccacgctggaaaaaggcattaggggaattcaaggtgatcatcaacggtaggcatcccattggaggtactccagttattgcaatttttcgagcaccttctaccaacaaatcctgtataaattgtttcacgtgttggattaagaactgttggtacgccaggatactgtggctctttcttcgtactggtagagcaaaataattaagaacgaagtcattcgtaccggcactgatgaagaacgctgcattcttcacatgattttcaattcttcgctttcccaatgcatcctccatcctctttctgcattctctgaaatactccaactgtttttctattggaattacgttagtcatgcttggtgtaagtgggtcaaagccagaaccagcggaggcaaaactaactcctgtcatcagctcctcaattctgaggtttgggtccaaataaggtggaagaacatctttcttgagacctacgtgtgaagcaatgtaatcagtggcaagcctcccatttgtaaatctccctgttggaacttggttgggaaagtccctcccgtacggtggaaaattgctcctaaaaggtgtctttatgtagttattgtttcctgggtctaccgtggagtctccaaacacataaaagcctgaaagctttttgtttgaagcttcaactttggctatgaaacagatgaagcatagaatgaaaatctgcataagagaaagaaacaagtgtgtatcagaagtccccatgccaactgaataaggttcaaaatgagaatcaagttggctgaagatgtttttggattttgaatctcgagccgaattttggacggacgcgtg

SEQ ID NO: 3577 - DNA, 1725 bp, Glycine max
  unsure (1)..(1725): unsure at all n locations
  Clone ID: GLYMA-23APR03-CLUSTER41736_1
agcgaagctctttcctttctgcaagtggggatctcttacggctaataactctatcgtctgcctgctattcttccctcatcttttcatttctcatcattcttcccgttcccatagtttccatttccacaagggcctaaaaatcatggtaaaatattctcacttgctcaaacgaaagaattttacatgtaataatagaaattagtgagaactattgttcacacaactcttcaaacatcgtcacattgttgggcaacatacactccaatatgagacatagctagccatataagaagcaaagatagccaactaatgagtcagcttgaaatataaaatgattaatattgcaaggaccagagctgtcattaaggagctaacaatccattggttcctgctcatccttcttgacatagccgacaaaattttcattgctcttgctaatgttatcatccactccatggatcgtcttatgggcgtggagtagggattcacgttgttgatgcaaatctctgaggataaattcaccaagatcctctgtctccagcattgtttttctgctctcctttattctgtcagaggactgattaaaattatcagaagacatcagaagtataccttattgatgatttgatgcgaagcatagtactgagatgcaagggaaattgcaaatgtcaaagaatctacatcatgcaattgttcccactctctccaaccctaacatacatataagacttcagtcatttaatatgttttataaatgtaccatgcattacaattttggaagcccacatactggctaactttggcttgaagacaattaacaacttttacttccaaaaagcctttaggacaataaaatttaccaggcaatcccagtctcaggtctcccaactagtgtatctgaatcttcttaaatatgtattagtaatctaagccacagttcaaaaataataacattgacacctattaatatctgaggaaggatatataagagagataccgccagtgtatcagcccttcctgactccaacaagtcatctcgagcagtgagattgacgctagctgacgtgactcttttaacttcacttttcaaattgctcaaatcagttttatattcccttaacttggcaagaagagctgccttcacgcttggctgcaaactcctagcctcaaggtccatttttcgaatcaatgtgtcagcatcatctaatccagcttttatatcagaaagtttttgcttcttttgttctgcagcacaaatggtaaccagcaaacattagacagaaaagctacagttttttcccttcttttcctgattttgtgtgtatgtgcgttgggagaggggggagttgataaaaaattgcatccttaacaaatgagcttaagcctctttgatgaaaattacatcaatggttcaatataaataaattatcacaaggaagggctcttcaacacacatttcctagtagccagcctttgacacatgtttaagtttcatacaatatgcttttaattgcttcggcttaaacttgcaaaatggaatttttataagtcaaaacttgggcacaattctttaggtattttcagngctattctccaactaaaattggagttcacctntcgctattcaacnccaaaatgttaagctttattgngaaaagttatctaattttaattgaaaaacaacattaagcatnaanagaactggatataagtattgnncaattt

SEQ ID NO: 3578 - DNA, 1389 bp, Glycine max
  Clone ID: GLYMA-23APR03-CLUSTER418783_1
tcagctacgtaggccccccccccaatgatagattatgtttggaccaactataaccatcatttgtctctatacaacccaaatcatgaaagacactcgagactaagaaagaaggatctgatctatgaggaatacaatgccaaactgaagaccattcagagcatacaatatttttccagaacaatcattatttcttctcatcttcatgagttccaccatagccacggattcccatggtttgtcagattcttggacaataggggagcgcgtgtgtgcggcgttgatgccactcatagcggtggttgaggttttgattttgactgtgacaggttgtttcagctattgcccatgcatcagcattattgatcagaaccataaatgtacctatactgctaaggacttcgcaatccttgctgatgaaaccagatttacagttgaagaagtggaggcattgcatgtgttgtttaaaaggttaagtagctccctgattgatgatgactcgattcacaaggaggagcttcaattggcactgtttcagaccccatatgggaaaaatcttttcctagatcgagtttttgatgttttcgaccaaaaaagaaacggtgtaatcgagtttgacgaatttgtccacgccctcagtgttttccatccatatgcccccatggatgaaaaaattgattttgcatttaagctctatgacttgaggcaaactgggtttatcgagccagaggaagtcaagctaatggttgtagccattttgatagaatttgacatgaatcttcctgatgatcttcttgaagcaattgttcacaagacaattgctgatgcggataaagataatgatggtaaaatcagtagagaagattggaaagcttttgtgagccgaaatccatccctcttgataaacatgacacttccttatttgaaggatatcaccagtgtgctttcgagttttgttttcaaaacggaggcaaaaccttgagatcaatttgttttgttattttggcatcaagatgctttttgtttgaggtgaataattgtgatgccctattgcaaaacagaaatgttttgtgaacaaacaagcagggcttttttaggggaattgagatccaaattagttaggaaagggtccattaatagattagaagttgtaaattattaggaatatatgcaataagaaataacttatttctatattggtaaatctgtattagtaaatttgtaaaagaaaataactgattttgtattagtaagtagttctttagtagaaactgcatgatgccagttatacatagaacataatggctagcagatatgtgtatcatgagtatatatctgaacaatcaatcaatggttaacatccgatcattttgtaaaaaaaaaaaaaaaaaa

SEQ ID NO: 3579 - DNA, 1537 bp, Glycine max
  unsure (1)..(1537): unsure at all n locations
  Clone ID: GLYMA-23APR03-CLUSTER4196_1
aattccgttgacgcgtttttcctccatttccttcttcgctagattacccagatctacgacgagtctctgctatgaattaattctcatatctcaaaatcattcaccgttttcatttcattctaactaatctttccagaaccctcgaatctcttctttcgaacgtgcaaagatttttgacttgaccgaatgctgttgcggttgaaatcggtgtgagaaatagggtttcgacgatgccttcgcttccctttggactccttctacgccatttggtcccttccttggccctattccacggtggatcctcctctcatcgtctcaaacatcttgaaaaaagtgatcggcgttgtagtcttagttaacattacgagcttttctttcttctgtttttttttcccggcgttcgtggttatgttgttttgaaaacaaatacctgtttcggtttcatctatttttggctgacgaatttgaggatcgaggtgtttttgtttcacttggtgtttgcgttgacttcaaggaaagtgcaaattttgcagctggaaacgccgtcgtttaagtgcctttatacaattgatggacacgcgctctcccgttaatgctgtgcatgacaacatcataagtaagctggaagttacttttagtgagtcattacatatacatgatgctcagaattcggaacatgcatctgaaggggatcatattggtaattgtgatgtgggagagcggaacttacgcgaaggggtgggtctgcgcgttaccacactggggtttaagtgcggcggtgcgtgctcgacttttcctggtcctgagacgatgctgccttcgtccgcgtctgacgagggggctcccgccccgtcgccctcgttgcgggctccacgcctgttctactcgtgctcagtatctttgccagcacctcgaaagcttgtatctgccatgaaaggtagccgcgagaaagagcggggatcacaaatgaaattgactgtgaagtgggcccctgatgtatatgatccggtacctacattgttatcacatactgttaaaaacaagaaacagcaaaaacccaggatcaagaagagtgaaaagaaaaatggaaagaagggccagaaggtcagttactctaaaagaggcagcagcaaagataaacagtatcgaaataggtggttttattctcatgatgaagtgtttgaagcttcctctgataatgctgctaaccatgattcctactgtggaactagctactacttggaaacatcactcacaaaggttcactggtctattggagaagcgctgtaacatgcttggttgtgttgtatacagtgactgcataaatagataattttctgttatgttgtaatatcaatagattgatcaaggctgttagaacatccaatgtgccactaaaagcagcctaataatgtacggatacataccccttttttgtcaaataatcttaaaggcttctaggttgcagtgctattaggatctttaaaaaagcttatcgataccgtcgactcgannncgnngcccgtacaccaattcg

SEQ ID NO: 3580 - DNA, 916 bp, Glycine max
  Clone ID: GLYMA-23APR03-CLUSTER4197_5
gcagttcaattccaatatattccattctctctgtgtatttccctacctctcccttcaagatgcagatcttcgtcaagaccctcaccggcaagaccatcacccttgaggtggaaagctctgacaccatcgacaacgtcaaggccaagatccaggacaaggaaggaatccccccggaccagcaacgtctcattttcgccggaaagcaacttgaggacggccgtacccttgctgactacaacattcagaaggagagtactcttcacctcgtcctccgtctccgtggtggcatgcagatcttcgttaagacactcaccggcaagaccataaccctagaggttgaaagctccgacaccatcgataacgtcaaggccaagatccaggacaaggagggtatccccccggaccagcaacgtctcatcttcgccggaaagcagctcgaggacggccgcaccctcgccgactacaacatccagaaggagtcaactctccacttggtgttgcgtcttcgtggtggtatgcagattttcgtgaagactcttacgggtaagactattaccctcgaggtggagagctctgacaccattgacaatgtgaaggccaagattcaggacaaggaaggcatcccaccggaccagcagaggctgatttttgctggcaagcagctcgaggatggaaggaccctcgctgactacaacatccagaaggaatcaacccttcaccttgtcctccgtctccgtggggggttttaagctcgttgtgtaatgttggatgtgttcccaaaacatttgaagaactttgatgtttaatgggtctgtaataatgtcccttgaaaataagttcggtttgtgttgaactcaattgtgtcccattaataatagtactctaatatcccaaaaaaaaaaaaaaaaaaaaaaaa

SEQ ID NO: 3581 - DNA, 1512 bp, Glycine max
  Clone ID: GLYMA-23APR03-CLUSTER419_44
aaatttaatgggttcagattttttttttccagcattgttgatccaaattcggacttgtacattgaaaaagtaattgtttggaaatttcaattttgattatttggaaatttgcagttgaaattgcaaatgtagtgttaggtatttatcaaagtaaagaatcaacttaattataagctctaaacttcatcgtatttgatcacgcagtcatacaaacgtgacccaagaaattctgcaacctcaggatgttttaccatcccaatcttaagggaatcacatttaaattgagcatagagatttgtttctattccacgacccatcccttctaagatgacaagatctacatcattagcaaggtatgcaagttcttgtgacacccttgtaagatcaataacaggtaaatcatttccggagttggcaattagaagatttgaagtactgacacccgtgagacgtccttcttcatcctttaactttggtataatttcaattaggtcagagtaagtcacatcattgatggaaggtaagtcattagcagccaatataacctgactcccacgtcgaaggagctcccttgcaaatggcagaatacccaaaatgacatctgcaccagagttatccacaaatatgattaccttcttccaggacttcttgctccatgctattctgaaagtttcaaggtcatcaataatccagggtcgagggacaagattttgacaagtagtcgaaaaagatactccatcccttgagaaaacctctgcaagctgtgtagcaccaagatcaaatatgttccctgcaaaaattcctctaaccaaattctccagtcgtttcccttcatcttcaatggcatcattaagatgaacaacattctgaaatagggatatggcatttgcattctctacatcctttattttcttgaagatatctctgaatccctgttctctaaggactttgctcacgaagtctgcataagaataaggattatcaagaggcctgccttgacttgcaggatctttcttgaaatcttcaagtattctagcatacctttgagcaaaattttcagctttattttgcagcatcaggaacagaagtatcattctcagcatgcttcctgtaccaaatcagagttgaaggtggggatagtattgaggaggagattaatccaagatagctcggtgggagtgggaatgcttggatcgtctgaagggaacctccaaggaatggtgcatgctgtgtaattcccattcgtcaacaatgggaatggcaccaactgtgatgtactctctattgcagtttctactgatttggagtgaacataagattgtgtgggttgatgaatggtcttagccttggtaagagaagaagcatagagatatgtggagattgatggaggataccgagggaccaaatacaccacagtctgagttggtgctactgatacaattcccattgaagttgttaacgaccttagcatatggtgctagggagcttgggaggtaggggactacacttgtg

SEQ ID NO: 3582 - DNA, 941 bp, Glycine max
  Clone ID: GLYMA-23APR03-CLUSTER4221_14
atctaccattggggtttcactgttcagtgtaactctcaagccatgtctccgggtcccgttattgacgcagccaccgaccccggcgccgaccaacaaattccctccgtcgacgacgcaatcctcaagaagaaagctcacccccaggttccccccatttccattcttttttctactttactttatctcttattcgcttccacgatcttttttttctcaggaagatgacgctcccattgtcgaggacgtcaaggacgatgacaaagaggaaaccgaagacgaggatgaggacgatgacgacgatgacaaggaagatgacgcccaaggtggtgctgagggtgggaagcagagcagaagtgagaagaagagccgaaaagcaatgttgaagttgggactgaaacctgttactggcgttagtagggtcacaatcaagaggacaaagaatattctttttttcatctcaaaacctgatgtcttcaagagtccaaattctgagacctacatcatatttggggaggcaaaaatagaggacttgagctctcagttgcagacacaggctgctcaacagtttaggatgccagatgtgggatctgtactggcaaaacaagatcaagatgctgcagctgcagcggcacagcctgaagaagaggaggaggaggttgatgaaactggtgtcgagccccatgacattgatttggtgatgacacaggcaggagtgtcaagaagcaaggctgtcaaggcccttaagactcacaatggggacattgtcggtgccattatggagctcactacttagtttcggtttatgttccatttgtagtttttgatttttggggtgtacgatccagcaaagttggttgagtacgtttacaagagaaccgggaagcacgcagtgatagtgaagcaagagccagaaaagaaagagaaagtggaggaagcaaaaa

SEQ ID NO: 3583 - DNA, 2159 bp, Glycine max
  Clone ID: GLYMA-23APR03-CLUSTER4223_1
attttatttacttgtataaaaaaatgttatacaaactataaacatgtaattaaataattattcattataacagatctctctcacgtaccataaaagttttgataaacaaaaaaaaaagccatttttgttatacccatggcttaatgttgagctcaaattagaaaggatttttttttttttattaattattgtttgtttcaatacaaaacagggattgtcgcaaataatggcacgggagaagtttctgttgatcagtaccatcgctacaaagaagatatagatctcatggccagcctgaattttgatgcctaccggttctcaatctcgtggtccagaatttttccaaatggaactggccaagtaaattggaaaggtgtagcatactacaataggttgatcaattacttgctagagaaaggtattactccatatgcaaatctctaccattatgatcttcctttagcacttgaggagaggtacaacggattattgagtcgccaagttgtgaaagattttgcagattatgcagaattttgtttcaagacttttggagatagagttggacattatcttttctcttcacaaaaacaaaaacaaagtaagagttcactcaatctcactgtgttgtgagttgtgtgtgagcaccaaccaacaatggtgtctctgactccgttatgtttctttattaccttgttgatcgctggtgcagacgcagcggcggagccccaaacggtgcgttttgacaccggggggttgagcagagacacctttcccaaaggattcttattcggaacggccacgtctgcgtaccaagtggagggtatggcccacaaagacggtcgcggcccaagcatttgggacgtcttcatctaagaattggatgacgtttaacgaacctcgtgtggtggctgctcttggctatgataatggtttctttgcccctggaagatgctcaaaagaatatgggaattgtactgctggcaactcaggcactgagccttacattgttgcccacaatttgatattgtcgcatgcagcagctgttcaaagataccgagcgaagtaccaagaaaagcaaaagggaaggattgggatcctcttggattttgtttggtatgagcctcttacaagatcaaaggctgacaattttgcagctcaaagagccagagactttcatattggatggttcattcatccccttgtttatggagagtatccaaaaaccattcaaaatattgttgggaatagactccccaaattcactagtgaagaagttaaaatcgtgaagggttcgattgattttgttggaatcaaccagtatactacgttcttcatttatgatcctcatcaatcaaaacctaaagtcccaggctatcaaatggactggaatgcaggatttgcttatgcaaagaatggagtgcctattggtcctagagctaattcttattggctttacaatgtaccatggggcatgtacaaatcattgatgtacataaaggaacgttatggaaacccaactgttatcttatccgaaaatggcatggatgatccgggtaatgtgactcttcccaagggtttgcatgacaccacaaggataaactattacaaaggctatttgactcaactaaagaaagcagttgatgatggagcaaatgtggttgggtactttgcatggtcattgctggataactttgaatggaggttgggttacacatcaaggtttggcattgtctatgttgatttcaaaaccctcaagagataccccaagatgtcggcatactggttcaagcaactcattaccaaaaagaagtattaatagctgggctgaacatctattttctaagcttctagttgcttcagagaatcatgttttaatggttttggttgagtttaacgtgcttctgtaactgtaattatgtgacttgcttaatgcaagtcttagaataaaatgatctttcatggcttttagtggttttggttgagttaaaagtagttctgtaactgtaatcatgtgacttgattaatgcaagtcttagaataaaatgatcttttatggcaacaaaaaaaaaaaaaaaaaaaaaaaaaaaaaaaaaaactcgagactagttctctaaaaaaaaaaaaaaaaaaaaaaaaaaaaaaaaaaaaaaaaaaaaaaa

SEQ ID NO: 3584 - DNA, 632 bp, Glycine max
  Clone ID: GLYMA-23APR03-CLUSTER4239_3
cttcttctttatctgaattgtttttggttactgtacagagtaatggggaggttgtttgtggtgaatctggaaggaaagatctatagctgcaaacactgccatacccatcttgcgctttacgatgacatctactccaggacattccattgcagacatgggaaagcttatctcttcaataatgttgtgaatgtttctgttggcgaaatggaggacagaccgatgatgactgggttgcatacggtggctgacattttctgtgtgggctgtggatcaattgtgggttggagatatgagactgctcatgaaaaaagccagaagtacaaggaaggaaaatcggtgcttgaacggtacaaggtgtcaggtcctgatggcaataataataataattattgggtcagccatgaagcacatgttggtggaagtgatgcagatgatgcttagtcatctgccattgacaattcaattgtacattccttaatcccccttcttctgttgttcaatgaatgttgatcttattagggcaatttagcaacattagctttttgcccaaaagacaattgaaatacatttgtttgttaattctgatgtaaaaaaaactattctaatcaatgctgtttatctagttgtaaaaa

SEQ ID NO: 3585 - DNA, 2303 bp, Glycine max
  Clone ID: GLYMA-23APR03-CLUSTER42424_1
tcagctacgtaggcccccccccccggttcttcgcgttaattaaacatcactgatcctcaatcaatcaccatgaacaaatcctcagatgcagcagcgtctccatattgcagaggcaggtccaagaaacccaatctccgaagctccaaatcccaacccccaagccacgttgagttcagctccaagacgccggagaagccgccgcagcgaatccgcaaccgcggcgtagcgctctccgtcgccgacatcagaaaggccgcctgcaagcgcttgcaagatcagaagcaatgcactgaaacgacgtcgtcatcgttgtcgtcgtcgtcgtcgctcagcaaaagtgtcaggaggcagatctcactggggccttcttctcccagtaaacccatggctactgaagatgaatcctctaatcttcccgaaaaatatgaaattttggatgagttcttcaatcgcttggatactttggtttcactgcaccgtctgaaacggtggactccaacctttacttcaatcagttcacggattgaatctttaactgacaggaggtttactcacagtcatctagcccagttgaaatttatcttgcgtaaggctattgttcttaggaagcatctagtgcttgatgaacggacgagttgtatgaagccggatattcacatttctttagacccagatgcggtggaggctgacgctgccaagttgcccccacaaggtggaagagtgtcgctgaagaaggtgtttcgggcacggttaaaagaattttgggaatctcatcctgagggtgatgaaattccagaagggacattgcctgagccattcaatcgccaaaagaaagacagtgttgtggacatgttggaaactcccctaccaacaaaattgccaccctgcatgcgctatagtgacattgtcaataatgcagacttagatgaaaaattgtatgtacctgtcaatgcaacagttgaattccctaatgagcatctggcagcaccttctcacatggctccatcctttagagcagatgatgtacagcaaaatcctctgttagattcattgcagcccctggcttttccagtttcagagtcaagccagaaggaaaatccacccttggtggatactgaatctcacctgaaaacttccccagctaagttttcttcagaagcatctagtagtgaaagttgtctaacaatttgtgcttctctggaatcatccagtcctcaccctgctactccaagcaaaaccattgagtacacagaaaaaaaagatgggtctctcaagagcattgatgccatgtcaacaccaacaagcagaacaaacaagtatacagaaaacaaagatgggtctctcgagagcattgatgccacttcaactccagctaaactggtttctaccccaattaggttgatgagtgccacacctgccttgcggtcacccaaaagacgttatatgagcccagatgaccactctatcagttctttgaacaagttggctcggcatccatctcgctcaaggtcattgaaattcgacactccagtgaagaataaagatgatatttctgacaccctccaagaagaatttatccaatcgattagagaaaaggaaagactggcaatggaggaaagagacccagctatcacacaagcaaaaaaaaaaaaaaaaaatatagctagcctccctaagctctttgacatgatacgtgggttacttagacagcggaattgtatcactaaagcagagcttgtaagcaagataatctcaagccgatgtgatattgctgacagaagttaagttgaagagcagctaaatttgttgcaagaactagcaccagaatggatttctgagaagcaggtctctagtggggatttgctattattcataaataaaatgttgagccctgaaaccgttcgagcatcccttgaagaagcaacatagggagcaaggagacagataaattaattgaaagtaccattggaggtttattaaggctggtgtgttttgtacagtgttttaggctactcgtagatgaactatttattttcttgagttgcttgtagctgtccaatcgtgtctctctctctctctctctctctctctctctctctatatatatatatatatatatatatatatatattctttttggtggattggctgtgcttttttgtaaaatgtgagtaccacaatacagccagatcaaaggaaacactcctttttaattatttacctagggtgtggattggcagtgtttttttgtacaggatataattcatcctaatttaagctgatcaatacgatctatttgaact

SEQ ID NO: 3586 - DNA, 1123 bp, Glycine max
  Clone ID: GLYMA-23APR03-CLUSTER42561_2
aaacattgctcgtatgttattattgtactttcttatttttctcaatcaatacaaattaccattttattagctagtaactgattcctatcagttgaactcaaacgatggttctctggtttagtggttgaaacaaatagaagatacagcttttgaatactttgggaagaatacaagtgtcattacttaagaaaatatgattgcttttattgtcttcgcgagatatatgaagtatgctgtgctctgcaattaacattctaatttgcttgtgacttagaattctaacttgaactgttcaagtttgctgcattccattgtattttacctgtctctgtagaacattttaccttgccctgatatcaggttttgggtatattgtattgagtgggggatttttaactatttttcaaccttggtgcagcttgtgtgtgtttcctcatatgatatcttgaattattttaactaggccttaaagtggttttatgtcattaatttggaaagttatgtggttatattactatttacattgattttgatcaatcacgttcactcttaaacaaccaaagtaatcttagagatttggtaaactacaggaattacttactcttcgtagttatctttaaagtccatgctagtctcacatcctttgtttcatttgtttaaaactccatgttcaaaatgaagtcattatttttgttttatacttattattggattgttcttatctacagtatacaatatgtactggcccaaattgacaactgcattcaatatggagaagatgcagatgtgaaggttaaggattttgaccctgaggatgatgagtagccaatccccttctgcaacactgcttggtataattgaaagttctgcttaacttcgacattatggtgtaccaagctgaagttgttaatatgtagtatctcattagattgttttaatgtgaattgaggaagttgaacatttatacagtttatcctctaaatgggatgaaaaattggctagcttgatcattctcttgccattactgcttcctttctgggaattttatgactttggtcgcaagagtaaaaatctgatggcaaagtagacaatgcaagaatgagaaggatgaatttgtatgatg

SEQ ID NO: 3587 - DNA, 1850 bp, Glycine max
  Clone ID: GLYMA-23APR03-CLUSTER4257_3
atctctttctctctaaaatcacaaattacaaaattccttccattttctctctaaaaccgtcatgacctccattgcgcctcttgtcctccctatctccaacccccaaaccaccgcgggaacctccagtgcaggcggcggtgccatcgaggttccaacgaacaacctggccttcggcgatcatcaccctccgcggttctctcttggatcctcttcggggccccaacaatgccgtcgccaagtgacgcgcctcctctgcgaagaagcgtgtggttattacggataaggctcgcgtcggtgttcaggaacgacgtggaggggttatatgagaagcttctcgctggtgagagcagcatcacccccatcgaccgcttcgacgcctccaagttccgcacgtgctttggcagccaaatccgcggcttctccgccgagggctacatggacgacaagaacgatcgccgcttcaacgactgcctccactactgcattgtcgccggcaaaaaggccctcgaaaatgccgacctcgccccaaacaagcactccaaggattgaagttttgctgctctggtacagcgtttgttgacatggaaagggggagaggatgccaaccatacctattttaacagcaagagcgtcctccatatgaagaacccctggattggccaactcggaaaagagtagctttgggatctgcaatgggtctttcatatttgcatgatcattgtgacccaaagattattcatcgtgatgtgaaggctgccaacatattgctggatgaagagtttgaggctgttgttggggactttggattggccaaacttatggattacaaggacacggtatggggacttttttgatggaaaaactgccagcttgtgtgtgcgtcgtgctgtttattatgatcctgtgacaggaaaggaagatccttccaagaatggcatttgtagcaattttttgtgtaactcaaagccatgaaacaaaattcagatcacaggtaagagctagctctttttactccaccgaagattgacataatttctgatatcttttataacttctcaaaatttgtattccaacaaagtgatgccttggtgaaccttgctcagttgggagaatgtcttgctcagttgtttcttgttattcctgttgccataggtgtgttctatgtacttcactagagggtgggtttgcaaagtaatacttgaatgtgccttgctctaggaacttctttactatttgaaatctgcattgttgactgctatttatttgctggttaatcaattggaattaagtgatgaaatcttcaaactcctggataatggggcccacatttatttctgtggtctgaaagggatgatgcctgggatccaagatacactaaagaaggttgctgagcaaagaggagaaagttgggaagagaagctttcacaacttaagaagaacaaacaatggcatgttgaagtctattgagattctctagtgcaggatttgcagagtagtagtccccttctgtctctgaaaggaaacaaaacaaaaaagaacattttgcgtttggtgcatttagtcaataaaattcattaagcagctgagtaactgtagctgttctgcattagtaaattgcaatgatatattgtgttcttgatggatacagaattgaaaaaccaagtcattagtgtagtgacaatcttggataatggggcaatctttgttaacatattttcttttgctaaattttgaattattattttaataaggattatcatcctctgcaatgcaggaataatgtcaaaaagtctaagatgttgtgcaagtgcttgaacttaaaatgaagaatcatgtgagctcctttaaat

SEQ ID NO: 3588 - DNA, 1105 bp, Glycine max
  Clone ID: GLYMA-23APR03-CLUSTER426_2
actcatcgtttctgttttctcttcttcctacattctctctacaaaagaaaagaaaggaaaagaaaagaaaagaaaaagaagggagtgcaggtaaagagaagcacacacttcacacacaaaccaaaaatcaggttcaaacacagatctgggagaagaagaagaagatggggcaggaccagaaccagagatcgctgatctatgcgttcgtgtctcgcggcacagtgattctcgccgagtacaccgaattcagcggcaactttaacacaatcgcgttccagtgcctccagaagctccctgcctccaacaacaagttcacctacaactgcgacggccacaccttcaactacctcgtcgacaacgaattcacttattgtgttgttgcagatgaatcaattggaagacagttacctatggcttttctggagcgtgtcaaagatgaatttgtgtcaaaatatggtggtggaaaggctgccacagctcctgcaaacagccttaacaaggaatttgggccaaagttgagggaacatatgcagtactgtgttgatcatcctgaagagataagcaagcttgcaaaggtgaaagctcaggtttctgaagttaagggtgtcatgatggagaatattgaaaaggttctggacaggggtgacaagatagaacttctggtggacaagactgagaaccttcataaccaggcacaagatttcaggacttctggaaccagaatccgtcgaaaaatgtggctgcaaaacatgaagataaagctgattgtattgggaatattgatagcacttatcctgataatagtcctatctgtgtgtcgtgggttcaactgtggaaaatagcaccattctccgaggccttttatcatgttatttcaaccttgagattatcggagaaaagatactaatgaatggcatgagtttgtatgtaatatagatatagatatagtaaaggtcgtatgttggtcactttgatctacttataaatgcttttgaaaatataatttgggttgtcaaattgaaatttaatttccattttattcatattcatgaatcatgtaaatgtgtttcttgatcatattctttaatgattccagttacagcat

SEQ ID NO: 3589 - DNA, 817 bp, Glycine max
  Clone ID: GLYMA-23APR03-CLUSTER42953_2
tcagctacgtaggccccccccccgatatgtctcattgctggtccttttcaaacaaaattatcctgtgacttttctcctatgtaatgaataatcaaatggaaaatttcccatctttctcttttctataactccattttagtagtagttctagcctttgctcatcgattgaatttgtttaggtaatttttcacaaggcgtgagccaattatagaggaagctgtgcggtatcttattatgttttcttggttgacatggtcttcttcccctcataaatgtacatatattttttgcacttttcatgttgcaggtggtatgaatggttctatagtctatgaacttgaaagacctgaaaatgctggcctgaaaaaatcagtaaaggttctgcaaaaagcaaagactcagatagatgctatccaaccagtatcttgggcggacatgattgctgtggctggagctgaagcagttgaagtatgtggaggtccacctattcaagtttcactgggcagattagatacactggtgcctgatccagaagggagacttcctgaggaatctctcaatgcttctggtttgaagaaatgtttccagagcaaaggcttttcaacacaagaacttgtggctttgtctggagcccacactattggaagtaaaggttttggaagcccaatttcttttgacaattcatattataaggttcttttggagaagccgtggacgtcttcaggtggtatgccgagtatgattgggcttccttcagatcacgctcttgttgaggatgatgaatgcttaagatggattaaaaaatacgcagacagtg

SEQ ID NO: 3590 - DNA, 1698 bp, Glycine max
  Clone ID: GLYMA-23APR03-CLUSTER432926_1
tcagctacgtaggccccccccccaagtactttactttatccttttccacttccttgatctggtgtgtactactactacccttacccttctcatctattaccactctctacaatctttcttctttgagactcattccatagagataaaaaagtaaaattcatgatttagccacagtgtttccttaggagaaaaatatcatcaatgcttgttgtcttttgatgttgtagttagagaataccaggaaaaggaatttcagcgtgacacattgttagtgtgataatcaaggtttgaaaatacggtctactaagaccgtaatttcggtggccacaacatcaagattattggaatcaggtctcaattgtggccacatatgtcacatttgtctgcaatttcacacaatatcaaggatcacgacgaaactgcaaccgtgactgcgaccgcaatttaaaatcttggttacaatcttggctctttttgtctcatgggctctgcttttggtctgattctgatgatattttcctgggtgttgtttacatttccgggatccgatgctcaggatggtgtcaagtcagctcatgttcttgacctaatcataagagatcacacattcaaggcattggacaagaacttcaagacagcaataccacaatcagtggacttgccttcaaatctttcaggcattggagttgatgctgtgaggttcagatgtggcagtttgagaaggtatggtgcacacttgaaggagtttcatcttggtactggtgtaactgtgcatccatgtattgagagggtcatgctgattagacaaaacatggggtataattggtcttctatatattatgctaactatgatctctctgggtaccaacttgtgtctccaatcgtgggactcctagcttacaatgctgatgaagatgcaaactcaagcaacccttttcagcttgggattgtggctggagaaaagcctatgacaattgacttcaccaatgccacaaggatgaaccaagaaggtgggatcaagcccttgtgtgctagtttcgaaggtgacggaagaatgacactagcaaaagcaccaaacccttcaagaccacttgtttgtgttgctaagaggcatggccattttggcttggttgtggagtactcaccgccggatcagttcaggaataagcccttgagccggtggaaagtggcggtcgggagcaccattggcgccgctttgggtgcttttcttttaggccttcttcttgtggcaatgcttgttagggtgaagaagagatcaagaatggtggagatggagaggagggcctatgaagaagaagcccttcaggtttcaatggttggacatgtgagggctcctactgcacttggcacccgaaccacacctataattgagcatgagtatatgcctcatcatcatcctcgttgaatatagtttctttctgttgctgatcaatcaattttgtaacattgtaagatgaaattcaaatcaatctgtgttgctgatcaacccaattttgtaacatcaagatgactttcaatcaaatttgtcataggccaaaaaaactatgaaatgtttcatagtcttgcttatcaatcaattttgtaacattgtaagatgacatcagaaccaaattgtgttgctgatcaatcaactttgtaacaataagatgacttccaatcaaaaaaaaaaaaaaaaaa

SEQ ID NO: 3591 - DNA, 1238 bp, Glycine max
  Clone ID: GLYMA-23APR03-CLUSTER433421_1
attcattcctaaccaccattccgagcttgaggctcggactcaacaatccgagaaatataaatagaggcgcttcagtgaaactcgcttcttctctgcgactccttcgttccttccttccttccttagtttcattcttcgtctcattatccatggcgtcaggggacacagattccttcagcgataaggtagaagagaagttccacgaccacaactccgattccgattcctattccgattccgatgacgaccacaacaacaggccgccgcccaagaccaccgtttccaacaacgtttaccgcctcttcggtcgcgatcagcccgtccacaaggtcctcggcggcggaaaacctgctgatattttgctatggaggaacaggagaagcactggagtcgtacttggtgcaggcactgccttctggattttctttgagttgatgcaataccacctcataacttttatttgccatttattgattgtgtctctcgcggcacttttcttgtggtccaatgcatctgtctttatccacaagtcttcactgcacatccctcatgtagcacttcctgaggaatgcgttcatcaggttgcttctgctttaacaattgagattaaccgagccttcgttattgtgcgggaaattggaactgggagagatttaaagaagttccttagcgttattgctgtattatgggttatctcggttattgggagttggttcaacttcatgaccttgttttacctattttttgtgtcactgttcacgttgccactgctgtatgagaaatatgaagaccaagttgatgcattaggagagaaggcaatgattgaaatcaaaaagcagtatgcagtgtttgatgctaaggttttgagccagataccaatagcaggttttaaaaaggattagaatacatcatctctcaggttattgtttacttacggtggatatctgttttgttcagatgtcaagtttctacacaagtcttaccgaaacccctctcccacttttagttttttttccctcttttggtgaatcttttggttaattgagtgaaatatagtttgagaaataaaagtccacctagtcctgccttaattttttaggattatcttggattatttataagagtagccttaaattaaatgccaaagcaccatcattttgttgtatacattgactcgatgaacgtgtaccccatgtcatctaaggaagtgcttcccgagttcaaaaaaaaaaaaaaaa

SEQ ID NO: 3592 - DNA, 1820 bp, Glycine max
  Clone ID: GLYMA-23APR03-CLUSTER434_4
aaacactgaaaacacgcactttctcctttcttagttgctacttctgcatctccccttcccttctttcattcttgtcacaaaactacaaagtcactgagtttagtgtttcgccaaaaccaatggatgatgatattgtaggactcggttttcgtccaacagaacaagagcttgtcgacttttacctcaaacacatgttgctcggcgatgatccccgtgtccacgtcatccctgtcattgatctttgcgatgtggaaccttggaatgtaccagtgatattagcatcgtcatcagctatacgatttggtgacccagattggtttttcttcagccctgttgatttcaagtacttgaaaagcaaaaggtttaacaggacaaccaagtgtggattctggaaagccactgggaaagaccgtgacattaggacaggggacactgataacactgtcattgggactaagaagactcttgtttactatcaaggccgtgtttcctgtggtgtcaagtccaactgggttattcacgaatatcatgctgttacctttcatgaaaaccagaggacttttgttttatgttgcttgatgaagaaacctgggaaaacaactgaaggcggaactgatcccctgatctgtgatgaaggggagcccagcagaagcatggtttctgactatgaaaatcagccaacagcagaaggaattgcatctgaaggtacttttacaggaatagaggcaatctttcaggcaaccccttgggcagagaattgcttctccccaatacaacagtctccgactcttattgagcaggaaggagcatcctttccaaactatgcatttaacaatgcctattttagaaatgaagacaacattatgcagactccatttgaaactacaaaggaagatgaattcctaaatttaatcttagccgatgaaagtatagtgatcaatgaagaaaataagcatgattttgtcaatagctctacccaatcagagtcattgaaaagggtatactgtgaaagcagtgatacagatgctgaagtcatctctaaactggatgacaatattgtggatatttcaacagcatgtaatgattatcctaattcagatgaatactattcatcaaaaaggtttaaatcatcacatgatgctgtccatggtggaatatgttttctaccttctaaccttgaagcaaaccaagagaaaaacgagagtatgtttcaagatagtttctggggagcagagacatcatcttgtgactcgacactagataaacctttggagatcaattatattgatatttctagttctcctttcactccatggagatgagaaaattaatatcattgaagaccagtcaatttcgtatgatgggaactaagatctaagttacctccattagattggtagtagctattttggagtatgtcataaaatatgactagttctacaatagcaaatttattagaaaacaattctgtattagaaattgcataatggtagttatgcataaaaaataactatgggcagttatgtattaagatttaggagcttatatcctaacagtaaatctattagaaagtattaaaaactgcatgatagcagttatgcatagaaaacagccactagtagttatgtattaagagcatatatgtgatggtattagtagattgtgtaattaggaagtatgtgtagttgtttgcagtttatggacagagaatactctatgtaggagacttttgtctctaggacaacaagtgtattttgtatcaatgtattttgtgtgattttagtatttcaataatatatttcattagtttttggagggtg

SEQ ID NO: 3593 - DNA, 1768 bp, Glycine max
  Clone ID: GLYMA-23APR03-CLUSTER434_5
aaaacactgaaaacacgcactttctcctttcttagttgctacttctgcatctccccttcccttctttcattctttgtcacaaaactacaaagacactgagtttagtgtttcgccaaaaccaatggatgatgatattgtaggactcggttttcgtccaacagaagaagaacttgtggacttttacctcaaacacatgttgctcggcaatgatccccgtgcccacgtcatccctgtcattgatctttgcgatgtggaaccttgggatgtaccagtgatgttagcaaaatcatcatcaactatacgatttggtgacccagattggtttttcttcagccctgttgatttcaagtattcaagaagtaaaaggtttaacaggacaaccaagtgtggcttctggaaacccactggagtagaccgtgaagttaggacctttgagaccaacactctaattgggactaagaaaactcttgttttctataaaggccgtgtttcccgcggtgtcaagtccatctgggttattcacgaatatcacgctgttacctttcatgagagccagaggacttttgttttatgtcgcttgatgaagaaacctgggaaaacaactgaaggcggaactgatgcactcatctgtgatgaaggggagcccagtagacacatgatttctgtctatggaaatcaggaaaaagcagaaggaattccatctggaagtacttgtattggaatggaaacaatccttcaggcaacccctcaggcagagaaatacttctctccaatacaccagagtcaaactggtattgaggaagaagcatctttttcaagctatccatttaacaatgcctattttagaaatgaaaacaaccctatgcagacttcatttgaaactacagaggaaatgcagacttcatttgaaattactgaggaagttgaattcctaaactcaattttagttgatgagagttttgttatcgataaagaaagtatgcatgtttttgttaatagctccacccaatcagagtcattgagtgatacagatgcagaagttgtctctaaactggatggcaatactgtggatatttcaacagtgtgccatgaatatcctaattcagatgaataccattcatcaaaaaggcttaaatcatcccatgatgttgtccatggtggcatatgttttccatcttctaatcctgaagcaaaacaagaaacaaaggaaagcatgtttcaagatgacttatggggattggaaacatcctcttgtgagtcaactgcagacaaacctttgaagattagttgcattgaaatttctagttctccttccacttcatggagatgggaaaattaatatcaacagactggacaacttcatatgatgggaactaagatcctagttagctccattaatggatcggtggtagttaattattataagtaaatgttataaaaaacgactgatgctctaatagcaagtctattagaaaactgttctatgctagaaactgcatgatgacaattatgcatagaaaatactacatttattagcagttatgtattacgatttaggagtacatgtgataggaggctggcccaagcataccactcacatgcctcttaggttgaaaaactatatttaatttggacttaagttgttatttccctaaaatgccccagctatatcggacatttctttgtagtccactttatgctaggtcttagtttgtatttaaaagggtactgttgctttgaatcattatgaatggaaaatatgatgttc

SEQ ID NO: 3594 - DNA, 1402 bp, Glycine max
  Clone ID: GLYMA-23APR03-CLUSTER43545_1
tcagctacgtaggccccccccccccaatgtaccaggaaacagaacatggccaacacatcactctcaacaatccttgtgattctcttctggggtttaactcttgcaactgggagaaaattatcaccacttagcactaccgctacattgtcatcaccccccagtgatggtatttgctcatcaatggtgatgacacaaggctacacttgtggagaacacttggtgacatcacaagatggttatattcttaacttggcaagaattagaatgggagaatcaagggggccaccggttcttctacagcatggacttttcatggatggcataacatggttattgttaccttcaaaccagtctcttgcattccttttggcggataatgggtttgatgtttgggttgctaacactcgtggaaccaaatttagccggcaacatacatctttaccttctaatagctcggattattggaattggtcatgggatgaattagttgcacatgatcttccagccacattcaagtatgtgcatgatctaactggaaaaaaattgcactatgttggtcactcacagggaactttgattgcattggctgctctttcccaagatcagttactgaacatgttgagatcagctgccttacttagcccaattgcttatgctggtcagatgacttcacccctagctaaaaatgctgctgaaaactttattgcagagtcactgtacaatttgggaatctttgaatttaatatgagagggggctctgttattaagtttctaaaggacttgtgcaataacacaggcattgactgcaccaacttgttgacctctttcacaggccaaaactgctgcctgaacccttcgattgtaaatgtttttttggatcatgagcctcagtcaacagcaacaaagaacatgatccatctatctcagatgatcagagaaggaaccacttcaatgtttgattacgaaaaccgagatgagaacatgaaacactatggacaacccactcctccagcatatgacatgaaaagacttccaaatgaccttcctctcttcctgagttatggaggggctgatgctctttctgatgttaaggatgtgcaacgtctgttagaaatcctcaaagatcacgatgcagataagcttgtagtgcagtacagaaatgattatgcacatgcagattatgttatgggtgaaaatgctcaccgagatgtatatgaacctcttatatctttctttaggcttcagtgatatctagtgaagaatactccttatagaatattgccattacctgtctctaaatcatagaattgaatagcacggaaatgtcagtatgtaatttcacagaagatgatattattaaaggaaattcctatatcttacttttatcaaaaaaaaaaaaaaa

SEQ ID NO: 3595 - DNA, 1192 bp, Glycine max
  Clone ID: GLYMA-23APR03-CLUSTER4363_2
aattaacaagacacacttattttccattcccccaagttggtgcagtagaagtaaccagtccccagtcgtgacccagaccagagtaagtttccaacaccaacacagcaccaacccagggttagggtttctgcaattccccaatctccatcttcccaaaattagggtttcttcgcgccatgacggacggctactggaaccgacaacagacgcttctgtctcaatccggcatgctcaaacgaccgcattccgactacggtaatgagatgcataataattttgctcgtgatgatgaccgtaccggtcaccgaatgctaaaggacacaaaaacaattggatctgcttatgaccgctaccttcagagtgggcaactttcttcatttacttctggggaagccagtacagttgggggtcttgggttggctaggggtggtggtggattatcagaccattcactagctgatccttctgtcatggggcgtcatgggggtggtggtccagatctagcaccaaatggacggggtgttaactatggtggtcagctacctgtagatgcagtttccagacctggacctgagacagtacctctacctccagatgcttcaagtactctatatgttgaaggtctcccttctgatagcaccagaagggaagtagctcatatttttcgcccttttgttgggtatagagaagttagacttgtgagcaaagaatccaaacatcgtggtggagatcctcattacctttgttttgtggactttgcaaatccagcttgtgcagcaactgctatgagtgccttgcaaggttataaagttgatgaactcaatcctgaatctagtcacttgcggcttcagttttctcggtatcctggtccaagaagtggacctgcttttcgtggtaaaagatgatctggttcacaaaagccatctaggttttatgctcatcagaatgtcagtggttctttacaccatcgttttgggggtgatacaccacatgcaattttatttaccctcactggacacaatccttattagagcccttggaacaggccgagatcaaagtacaatttcaatttgcataaaactaacagatgaggatttttagaacatgtattcagttactctgatgtatcattatttgctaaattacattatcctggtgtctgatttatggtagcgtttcctttgagcttctc

SEQ ID NO: 3596 - DNA, 1291 bp, Glycine max
  Clone ID: GLYMA-23APR03-CLUSTER4363_4
attattttgcattcccctaagttggtgcagtagaagtaaccagtccctagtagaccctagtcgtgtcccagacgggccagagtcagtttccaacaccaacacagcagcaaccctcaaacgccacctagggtgagggtttctgcaattccccaatctctatcttccaaaaattagggttttttcaagccatggcggacggctactggaaccggcaacaggcgtttctgcctcactccggcatgctcaaacggccgcgttccgactacggtaatgagatgcataatcatattgctcgtgatgatgaccgtactggtcaccgaatgctaaaggacacacaaacaattggatctgcttatgaccgctaccttcagagtgggcaactttcttcatttacttctggggaagtcagtacagttggtggtcttgggttggctaggggtggtggtggtggattatcaggccattcactagctgatcctgctgtcatggggcgtcatgggggtagtggttcagatctagcaccaaatggacggggtgttaattatggtggtcagctaccagtagatgcggtttccagacctggacctgagacaggatctctacctccagatgcttcaagtactttatatgttgaaggtctcccttctgatagcaccagaagggaagtagctcatattttccgcccttttgttggatatagagaagttagacttgtgagcaaagaatcgaaacatcgtggtggagatcctcattacctttgttttgtggactttgcaaatccagcttgtgcagcaaccgctatgagtgccttgcaaggttataaagttgatgaactcaatcccgagtccagtcacttgcggcttcagttttctcggtatcctggtccaagaagtggacctgcttttcgcagtaaaagatgatctggttcacataagccatctaggttttatgctcatcagaatgtctgtggttcttcgttttgggggcgatactccacatgcaattttattcacccctctggacacaatccttattagagcccttgaaatgcataaattattaacaggccgagatcaaagtacaatttcaattagcaaaaaaggatttttagttcatgtattcaattactctgccgtaccattatttgctaaactttagtatattcacctggtgtctgatttatgttagcatttactttgtgctgcccaaagaactatcatttttctattactattttttgattatccaatattatcatactaccacacttgggtatgtatatgggatatct

SEQ ID NO: 3597 - DNA, 1564 bp, Glycine max
  Clone ID: GLYMA-23APR03-CLUSTER44098_1
ccgtgtcagctacgtaggccccccccccagcagctcccattccaacagattctagaagcacttagttgctcaacgataatcttaattgaagaagccaattcgtttattcttcttctgctttggaacatggctgataatattgttacctccagcaattcttctacggcctcgctgaaccctactcggataatctgtcacgtatgtcagaagcagttttcccagtacacgtgtcctcgatgcaattcgcgatactgttccctccaatgttacaaatcccatagtctccgttgcactgaatccttcatgaaagaaaatgtagttcagcaacttcaccaaatgcagcctgatgaacaaactaaaaataagatgttggacatactgaaaagatttcattcacaagaggaaatggatgaggattgacaggaaatcagctttgatgatttatcacttgaagaaaagaaacggtttcacagagcaattgcttatggggaactgagcaagatgatcaaaccatgggatccatggtggtcaaagccttctgccagaaacatctgtctcagtaaggaaggaactcagcacctttggatccatggatcaggaattgctagatgatgatattggaagtgatgaattcagcaaagttcctcttgggcctgaaactccacttcctcctctaagtaggcttagttccaaggagccatcaccccttttaacagttcacctagttgacattctgtatagctactgcttcactcttcgtctctacaatggagattggaagtcagatgccttagggtcagtcatggttgtattgagcgtgtccttggtgttgggtcaaggtgcacagccggagacagtactagaagcactttctcattgcttggagcaggtatgctgtccagtttacagacacatgggaggattgcaatttggtttgggtgtcattgatgatgtgatcagtctgcttggtttgggaactcctgcattggtgtgtgccctttgtgatatgcatcggttgattcaagaaggggaaaaggaggccaaatcagaaagaccgagaaagttgcggacagatgggactagaagtgctattaagctggcagaaaggaggatatatttcatcacgtgttgggttcatgagcagccagaggaagcatggttttctttagcggccattgtaagagcagaaaagacatcagccatggaatttcaacagagcaataaatctgaagatttgaacaataaggcagaggccaaaggcaaaagtttaattcaggagatttaatgatttacgtagactgctgccccttactgttgaccatatttattttagtcttatagaatatatgtagactgaaaatggttgttctcaaagctgttgtaaatgtacttttacatatagaaatccttattgacgagatattcaatctgggtagtattttttagtgattattagactaggaggggtattggagtcgaaaaaaaggaaagaaagttaagtttcaaactaggtgaattgataatctatttacatttaacgaaatatcagaacgtaattattcgc

SEQ ID NO: 3598 - DNA, 1185 bp, Glycine max
  Clone ID: GLYMA-23APR03-CLUSTER44152_1
attattgactcagtgtttcgaccaatgaatggatcacgcggcagttttcataacattgcctgagacggacaaatccataatttagccattggttctttaattccaaagagaaccagtaaggtgtttctgttcactgtattcctctggttgaaagtcagacaaactagctgatgttgtccctgaggctttggttctcttctttagccactcacaacaccctttcatgttcttcgcgaagatccttgtttttggttcctcatcaaatactcaacaacaacaccctaataagcaacacctccaaaattcttagttgctgctatgagaaacccattaagcaaaatgggattttttcagttgccagtgacctccaatcttcttctttttcttcttccttccccaaagattctcccttttcaggattggaggatgctttggtgagttatctctttgggaagaagagggcaactgacattgctcacatggtgtggaaacatgttgttcagaaaggagacactgtcattgatgccacttgtggcaatggttttgacaccttagcaatgcttaatttggttgctgatgattctcataatggttgtgtatatgcattggacatttcaaaaagatgctttagataacacttcacttttgctggaagaatcacttaatcccaatgagaaacaacttgtcaagctcttcaatatctgccatagtaaaatggagaatgctgttccaaggaatgcctcatttaggcttgttgcattcaacttaggttatcttccaggcggtgacaaagagataataacaagatcaaaaacaacattactagcattggaagctgcaaagagaattctaatgccaggtgggcttatcagcatagtggtttatgttgggcaccctggaggaagggaagagttggaagttgttgaatcttttgctggtagattgtgtgttgagaattggatctgctgcaagctccagatgttaaaccggccatgtgctccaataccaattttcttattcaaaagataatgtaaattaataccttctctgatttcttggttacaattcattaacgttcctagtccttataaaacaataaattctattttgccagatttatttaaccaaagtgattgtctttaccaaaggcttcatttgaattgtccctgaaaaaaaaaaaaaaaa

SEQ ID NO: 3599 - DNA, 1714 bp, Glycine max
  Clone ID: GLYMA-23APR03-CLUSTER4447_1
tacctaggtagagatctacagtcatggtgatggagcttcaaagccagaacaaccctttctctattcacttgattaccttctttttgtttctcttgttcctgttattcaaattagttaagaaatcgagttccaacaacaccagcaaattacctccaggaccaaagacactacctctcatagggaacctacaccagcttgttggttcaaagagtcatcactgctttaaaaaattggcagacaagtatggtcctctaatgcacctaaaactgggagaggtatccaacatcatagtcacttcaaaagaattggcacaagagattatgagaactcaggatctcaactttgcagatagaccaaaccttgtatccacaaaaatagtttcctacaacgccaccagcatttccttcgccccacatggagactattggaggcaactgcgaaagttgtgcacagtggagctattaacatcaaagagagtgcaatcttttcggtccataagagaagacgaggtgtctgagcttgttcagaaaatacgtgcaggtgcaagtgaagaagggtccgttttcaatctctctcagcacatttaccctatgacttatgcgattgcggcacgagcttcttttggtaagaagagtaaataccaagaaatgttcatatcgttgattaaggaacagttgagtctcataggagggttctctcttgctgatctctacccttctattggactactccaaatcatggccaaggccaaagttgaaaaagtccacagagaggttgatagggtgttgcaagacatcatcgaccaacacaagaacaggaaaagcaccgaccgtgaagcagtggaagatctggttgatgtccttctcaagtttcggtcggaaaatgaattgcaatatcccctgactgatgacaaccttaaagccgtcatccaggacatgtttattggtggtggtgaaacatcatcttccactgtggaatggtcaatgtcagaaatggtaaggaacccttgggcgatggaaaaagcacaagctgaggtaagaaaggtgtttgatagcaaaggatatgtgaatgaggcagagttgcaccaattgacatacttaaagtgcatcatcagaagctatgaggttacatccacctgtgccattgttaattcctagagtaaatagagagaggtgcaaaatcaatggatatgagataccagctaagaccagggtctttatcaatgcttgggcaattggaagggatcccaagtattggactgaagctgaaagtttcaaacctgagaggtttcttaatagctctattgattttaagggcacaaactatgaatttatcccatttggtgctggaaggagaatctgcccaggcatttcatttgctacacctaacattgagctgccacttgctcatttgctttaccattttgattggaagcttcccaacaatatgaagaatgaagaacttgacatgactgagtcatatggggctacagcaagaagagcaaaagacctatgcttgattcccattaccgttcgaccttaaaattaaatgtcataaactatttaaattttatcttttactattctcagcatcttgtatggtaatttgggcaaacaagaatatatatctccaatgactttatgcacttcattttcatgttctctttaaataaaatttattttcgttgtttgaaatctgaaaaaaaaaaaaaaaa

SEQ ID NO: 3600 - DNA, 1764 bp, Glycine max
  Clone ID: GLYMA-23APR03-CLUSTER444_20
ggggggggggggggggggggggtggggagatggaggaagggagggggagagggggggcgaagggggaggggggggcagtcgggagagggagagacgggaaaggggaataagagggggcaggcgggggagagaacgaggagggcgggggggggggcggcgggtgagagggggggaggagaggaagaggggggggagggggagggggggggggggggggggggggggggggagggggcgcgcgggggggtgtgtcggggtcgggggttgtgattgaatatcctaatccgcggggggggggggtgacggggggggagggagggtgtggagggggggggagggggagggaggaggggggggggcgtggggagaatttcacacacaaatatcacctcaccatgtaaaagttttcttttcctaacaaaaacgtctctctctctccatcatccatctttcttccctctcaaacacttgccccatcttatgtcttttgcttatgactttttattaatgtaatcatcaacatggccatttcccacttcaacattaaagaattataatatctgaatctctccatttcctttttacaatggaatcatagactatggaaagcatctagctgcattgccaatttgccaattccatcattatattttaaagacaattgtctttgtaaagaagaacccccctcctcttgtctcctaagcataaaacctgcaatgagatggctttcttcccagcaaatttcatgctccaaacccctcaccatgatgatcaccatcatcatcaacctccaccttctctcacctcaattctaccaacgtgtgcacctcaagaatatcatgggggagtgaccattctaggaaagagatccatgtcattttcatcagggattgagcatggagaagaggccaataatgctgaggaagatttgtctgatgatggatcacaagcaggggagaagaagagaaggctcaacatggagcaagtgaagacacttgagaagagctttgagttggggaacaagcttgagccagagagaaaaatgcagcttgcaagagcacttggcttgcaaccaagacaaattgctatatggttccagaatagaagggccaggtggaagaccaagcagttggagaaagactatgatgttctcaaaagacagtatgaagctgtcaagtcagataatgatgcacttcaagctcagaaccaaaaacttcaggctgagatattggcactgaaaagtagagagccaacagaatccataaaccttaacaaagaaacagaaggatcctgcagcaatagaagtgagaacagctcagacatcaagttggatatctcaaggacaccagctattgacagtcctcattctacacatcagcaacagcgcaagcagacccttctttcctccttcttctgttaggcctgcaggagttgctcagcttttccaaacttcttcaagaccagaacttgcatcatgccaaaagattgaccaaatggtcaaagaagaaagcctaagcaacatgttttgtggcatggatgatcaatctgggttttggccttggttggagcagcagcatttcaattgaatcaaatcaaagggagagagagagagagagagttaattaattttaaaaatttggatgtagtagtttttccctgtgaaatcaagagggtgtccatcaatttatcacmcaatactttattatgatgatgagttcttaaattaaaaacccatgttttgataagaaaaaaaaaaaaaaaaaa

SEQ ID NO: 3601 - DNA, 991 bp, Glycine max
  Clone ID: GLYMA-23APR03-CLUSTER44571_1
aacggacagaagagagcaacaatgaacaaccctagttctccctctccctgcgcggccttcgcggacttctacgagcaatggttcgaggagcttcagtccctgatgcagcaactcaggggtgagggcagaaaagaggaggtgatggagaaggtgatgtggcaccaccagaactactacgtggccaagtcggcggccgcggagaaggacccactcaacgtgttcctatctccctgggccaccacgctggagcgctccctccactggatcacagggtggcgccccaccaccgcgtttcacctcatctacaccgagtcctcgctcatgtttgagtcccacatcatcgatattctccagggactccgcaccggcgacctcggcgatttgtcaccctctcagttccgccgcgtcagcgacatccaatgcgacactgtgaaggaggagaatgcaataacggaggagctatcagagtggcaggacagtgtgagcgagatgatgggcccaggtgcgaacatcaacgacaagatcggacggctggtatgcatcataaagaaagcagatgatctacggctgagaaccttgcggagtgtggtggggctactgtcgccgcagcaggctattgagttcttgattgcatcggcggagttgctagttgggatacgcggttggggattgaatcatgaccgtccacgtggcagatgaaagtggaattgagtttaggccacaatttctctattttgattgaaattcattgtggccttaaaatgattgtgtattatttattactagttactagaactagaacagtccttgctgaacaaatatttctttttgctgattaaaaacaacagtccttcgctattaggctgcagcctaatccaaaaaattaaaaaaaataaattttaaagtttttttctttgtttggccgccccatgcattattaaaaaccaataataattattgactgtttgagttttttaaaaaaaaaaaaaaa

SEQ ID NO: 3602 - DNA, 1177 bp, Glycine max
  unsure (1)..(1177): unsure at all n locations
  Clone ID: GLYMA-23APR03-CLUSTER4504_3
taaaaatggaaaaaagggcaatggagatggtggtcaaaagaacaaagtgtggaaagcaaaagggtgggggagataataatcatcataacaatggtaacaagaaaaagaactccaaagacaaaaacggtggtggaggcttcctagttcggttcctaggcttaggaaaaaaaagaaggcaggaggaggtggaggttcagccgacacagcaacaaacaagaataaaaacaacaaaggaaagaaagatggaggaggaggaggaggaggaggaggtaaattcgacaaaattgactttgacttccaagattttgatatccctcctaccaaaggtaaaaatggcaagggtgggaataatggtaaaaacaataatgacaagggtcatggtagcaataatggcaatgtgggccaccacatgggccccatgggtcagatgggcccaatggttcagagaggtccaatgaatcagatgggcccaatggaccatatgaggaatatgaacatcaatatgccggcggtgcaaggattaccggcagccacggccgcagcagcgatgaacggtggttactaccaagggatgcngatgcagatgcaacaacctaacccttacaacatgcagcagcagcaacaacaacagcaactaatgcccatgatgatgaaccaacaccaacagcaacaacagcaagcaaacatgaacatgtacccaccacacatgatgatggaaggccacaccaccaccaacaccaacatccatctatgaactactttccacccccaccaatgccctcacaccccatggcggatcctatcacacacgttttcagtgatgagaacactgagagctgcagtatcatgtaaattattattattagtggtgactagtagtttgttttaattaggtttttccatttgtttgtagtcttattttattttgggggttcattaaattttgtcctagtgctagaaaaatgtgcaacattttaggactatttagggatatcatgtgatgtttgttttactttggtccggtctcacatggccctttaattttctcaaatttaaatggagtcatgcgtcctgtaaaattcaatgctctagattctgttggctttactattggccaaatatgttcttttcacacatgttggtcacaatattcaatacttaagttcaatttcgaaaa

SEQ ID NO: 3603 - DNA, 1317 bp, Glycine max
  Clone ID: GLYMA-23APR03-CLUSTER45098_1
aattcggcaccaggaagaattcgcggccgcaggaattttttttttttttttttgtattttaatcttaataatttattataaaacctaataatcaatgtttatttttgactaaaaaatttctctcactagatgcatcctctatctctcttcttacacaaatattaatacataaactagattcttatatcttctccacaaacttggttaacaaaacagcaacttaacatacaaataaattataatattagatgccaaacattgcaagtaagcccatcgaatgtgattttcgttttaagaaatgtgggacaatgatgaaacagaagtgtatggcagatcgatcattccttgcaaaaaaatcctttcagtgactgccagcatgtgaggaaaaatcacataaaggatcgcatccgaggcctggttatagactgtgccccatcaacatatatggttgttccagtcatgtagcgtgatccatcactgattaggtagatgactgtagaagccagatcattcttaacatcaagccatctctcaagtggtgctgcatccttcacaaatttttctgccctttcctttcccacggataatgggaattcatcatgcaggtgcaggccacgagaaattgcattaactctgacctggtacttccctatctccaaagccgaagccctaactaactgctgcactccagccaaggcagaggcatatgcagcagcacctggataaagccccctttcagcaccaactatggaggttaaaaagacgatggagcccccggtgttgaactcccgcatctttcgcccaacagcttttaatagaaaccacgcagccataaaattaatcttcactattttcttgaactcactctcagctaactcaagatgatcttgcatttttccttcgtaagcgtagcagttgacaaacgcatccaatttccccaaaatctggcacgctttatccacggaatgatggaaagtcgattcgctttgatcctccatgtccaatccaacgacctgcacggtgcctctgtctgcgagggagagggaatccatgattttgttcgcgatgctccgcagggaattctgatctcccagcaaaaccaacctgcacccttgcttcaccaaatggaaggcaatgccttgagaaatgtcgtcgccgttggaggtaagcaacactctcttccctgacttctccattcttcttcttcgtcttcttcgtcaaccactttccacgttcttccctctattccaacacctttttattctaatgggatcaggagtagactccaacgaccttttttcatttcattatgtattt

SEQ ID NO: 3604 - DNA, 537 bp, Glycine max
  Clone ID: GLYMA-23APR03-CLUSTER4517_4
aaaaaccaaaaagtgttcaagctcgaaaaatcgtagaagactacaccaaggtgagtgacgaaaactgatggctgccactgaggaaaaaattctctctaggattgaccgtttggataatgtgttgcggcatttggaggaaattagagggtgcaatccatctccgaagagctcgtgtgcatctactccaacaagtggaagtgacggacacgtgtcgtccactgatttctccccaaagagtttagagaagcactgccgtccgattgaaaacattatgatggagaccgaagccaaaggaacgatgatagagaggctcaatcaggtggaggatcgaatgctaaagctggaagaagagttggtagcaaagaagaaagaggaaggtgagaaaatgaatagcccaaagaaaggttttaaacagcttgtgaagcaaagtatgaaacctaggggaaaacatagtaataaagaagcatgaatgaattatgaccattgtagctgctcccatcccaactgtgccaacgttttaattttaatgtacattta

SEQ ID NO: 3605 - DNA, 690 bp, Glycine max
  unsure (1)..(690): unsure at all n locations
  Clone ID: GLYMA-23APR03-CLUSTER452_9
ggataaaatatgcccatannngattaaaaaaaaaacatagagagactccatgctcaaaacaatgtaaatatatctttagatatttgacatttaacctgttaactagttgattcatgtctgaaacagaaattgtaaacatttatttctctctttcatattttttattagaaggattaaagcatactaaaccaattaagcatgttattatgagttaaaaaagtaattgaaacggaaccgaaattgatcgtatttcactgcgtggaaggagcgaaattgagaagctgcttggaacgaagccacggcttcaccaccacaacggattcgaatattctggaatctccaccgtcgccaccctgcgtggccgatatcttcatgtagtacttgatcccagacaccacttgttgttgcgcctccaccacttccacgaacgtgacttgctcctcctccttctgcgcctgcctcagcatccggttatgctcctccaccgagaaccgccctagatcctgcaccttcttgttcgccttcacgtcagggatcttcgaccttcccccgaccaatcccccgtacgacgccgtacacgcgatgcacgccgagatcgtcaggatcgccagtatcaccgccggtgaccttatcaacgccgccatcgatcgctcaattatgccgaacctgttagaattaatttagaacgat

SEQ ID NO: 3606 - DNA, 1399 bp, Glycine max
  Clone ID: GLYMA-23APR03-CLUSTER4551_2
ttttaatttattaaacagcctagaatgtcatgataacttctcaaatgtcttattttgattgtttttctatcaatatataatagacttttaagtctttgtgatcttttctgtaaatagcctgtaggagtgtaccctaaaccaaaaatgaatatatgaaaaacaagaagactatgtgatacatttatgtgggtatttgtggttcacttggttgaaaatctcttcattttgaaaatttagagaagctaatggagtacgcatctacaacttagcttatgcacaagttaaaaataagcttttagataagctaatagagaaagcttctacaaattagttatgcataagataattttaacttttcgagaagtttatttcttatttcttcttatttttctcttagaagtgctttatagagaagattatctaaacagacccctagtattgtctgcaactttgaaagtgaagctcatgatgctgtattccacaatcctttgagcttattttttctcttagatgtacatgacttgtttgccttgcaagcctttatgtacatggtgtgtcttttacatcttaaaagtaaaaaaaaaaaaatggctacatgattgtatccacactagtacttttgtaatgtgttgaattcctcaaatattgtaggacaaacgagtaataaaacctgatgatctgatggttgtatattaacttatacaatcaaatggtgaattagatcaagtaattctgcctattcctgttgcataattgcagtatttctgtttgctaatagcatgttatgtatttgcaacaggatttgtttgatatatttgatttttgacttttatttgccatcatatgtaattaggttgtggagagcggaggcaagaacatagaagttgctgtgatgactaaggagcatggtctgcatcaactggaggaagctgaaattgatgccatcgttgctgagattgaagcagagaaagcagctgctgaggctgctaagaaagcccctcctaaggagacataattttctgttttgtgttacgcggggcattgttcttgctacgtgttggctgtactcactgaagctaaaattgatgccattgtgtctaaagattgaaacagagaaaacggctgccgaggctgcaaagaataccctttctaaggagacatgattttattttacttctgtttagctcgtgaattgttcttgctagatgttggcctaacttaaaacaactgctttattgtttttgggtactgtcatatagtgtttggtcaaattaattgcatgtcattattattcaagttcttgttgagtaggatgatacacaacatcttcatagacaggagctggttctttatattggccaatacgactatatttaagaaatatatttccatagtttag

SEQ ID NO: 3607 - DNA, 1528 bp, Glycine max
  unsure (1)..(1528): unsure at all n locations
  Clone ID: GLYMA-23APR03-CLUSTER4571_2
aaaaaattttcaactttcaagtttcaattcaagcagctttggaaaacccaaccagccaacagatgttggtttgattgtgtggacttaggagtgaatagtttgatatatgcgcatggaaggaagagaaggcttcagttctggggttacagtgataggggcagaagctccatcagcctatcatatggcaccaaggagtgaagctccaagtcaggttcctcctcctgttcctgaagcaacagctggagctattggtgtctcacctgtgagtgtgggattggatggaacagcagctaagaagaaaaggggtagaccaaggaaatacgggccagatgggttgaactctatggcattgtcacccatgccaatctcatcttcagctccatttgctaataacttctcatccgggaagcgggggaaatcgcgggggatggagtacaagctgctgaagaaagtcggagtggatctttttggtgactctgttggtacaaactttatgccccatatcattacagtcaatactggtgaggacattacaatgaaggttatatctttttcccaacaaggaccccgtgcaatatgcatcctatctgctagtggtgtaatttcaaatgttacacttcgccagcctgattcttctgggggaaccttaacctatgagggccgttttgagatactttcattgtctggatcattcatgcctactgacaaccaaggatcaagaagcaggtcgggtgggatgagcgtttcattgtcaagtccagatggtcgtgttgtaggtggtggagttgctggtctccttgtagctgccggtcctgtgcaggtggtggtgggaagctttttgccaaacaaccagcaagatcagaaaccaaagaagccaaagtctgactatgcaccagctaatgtcactccttccattacggtgtcttctgcaccaccccctactaatggtgaaaaggaggatgtcattggtggacacctactacacaacaactcaggcacaacccttaactcaaaccttactcctccctcggccttttgacgcgaaaactgggttaacatgcactccttgacagactcgatgaagtcggctactgacattaacatatctcttcctgatagttgatgatcaacctgcagtctccctgtcaacattcatgattgaactctttgtttaatggttccagtgttgttctatatggcgtagtttccactctttttcaaacctattatgatctttttttgcctatgactgtagggcgaagtagctgactagtggtgtaagttgcagctaggtttctataattttctttgcctaccagagcatctgattcctcggctgattaggtagatgctgcaatgtgcagtgttattatgagtaggctaatttggatgtaatcacaactgaatttgttggatcttttgtctcaacctagccatttattattatgtcacgagtatagacttgttattttctctatggaaaaaaaagaaaaaacactcaaaaaagtcccccatataaatanaaagg

SEQ ID NO: 3608 - DNA, 2742 bp, Glycine max
  Clone ID: GLYMA-23APR03-CLUSTER45741_1
ttgactctgctacttaacagcatcccccgattattctgcttgatacagataacaagatgaaaaaatcaggtgaaaattctgagggcgatcattcgcataccaaaattgtcaatcaggaaagaagttcagctggttctccaaggaagttttcggtaacaaagtttgcacctgattattgaagaactgaaccttccgcctctaacggagcaatgatatcagagaataatggttcgatgaatgttcctgatcagaattttacagaaatgcagggaaattctgtgccacctgcctgcccaaatgtgtgtgcatcaggttctgatctgatggagcctcagtgttattgaagatgtcaattttgttgagaaatcttttgagggtggtgaccgatgcaatcctgctgaagactcaccttgctggaagggagcttctgctgctcgcttttctcattttgaaccttctgcagctctgtctcaagaatatgtacacaaaaaagaaagtagctttggttctgtcattaacgagcctcagaattatctgcttgatacagaaaacaatatgaaaaaatcatgtagaaattcaaatggctttcaaatgcatactggaattgtctatcaggacagaagttcagcaggttctccaaggagattttcagtaacaaagtttgcacctgaatattgcaagtcaggtagtgctctgaatgatggtccttttcaatctaagcctagctgtgattttggacttcaacaatatgtggatattaccaaaatgaaggaaaatactgtgccaccagccaagccaactgactgtgagtctggatcttctcagatggggcttcaacttgtagatttaaaggaatttattactcaaaaacagcaagctttattatgcacaggtgatgtaaattctggatgcaatgtgaataattgctcggaatatgattcatctcacactgctgaacatgtcctgcctttaccttcttcagtattagatgcaactacacctgaaaattcagctgggaaagcgtcaactgaaaaattggatgtccaaatgctgcttgacagaatgcaaaatttatcagaattgcttctttctcattgcttaaatgatgcctgtgaattgaaagagcaagattgcaatgtccttaaaaatgtgatcagtaatcttaatacatgtgctttaaagaatgaacaaattgcccctgttcaagaatgtcttttcaatcagccagaaacttctaagcatgctggcgaatcacgcaagtttcgccagaatttatgtttgaagaggccacaattaaccaagataggaccagagagctctaagattgagtttgagaatccacttgttgcagaggcaaacttttgtttcaggtctgggaaaccacataggaagctttctgattccatttccccaagggttgatacagaaatgacaaaggctgataacatgactaaggatctaaagaggattcttagtgagaatttccatggtgatgatgatgaaggagcagagcctcagactgtattatataagaacctgtggcttgaggccgaagctacactttgttctgtatattacagggctcgctataatcaaatgaagattgaaatggataaacattcttacaaggaaaaagtgatggagaagcaatctaaatctgaggtcattccgactttgagccagagtcagagttctgcaactaaagtgcattatccaaaccctgattcttctgcggaccttaaatttcctgtcttggatgttaccaatctagaggaactatctcgcttgaatatttccactgatatgaacaagtctaatgcaataacacctgaaggaagaggtcaaaacctggatagcttcatcgataattatcttgttccctgctcagtcaataagactgaaagaaatgatgagtcttctgttatgatggccagataccaagttctcaaagcccggattgatcagtcatccactgttactaccaatctggaggaaccattagacgtagcagacagctcatcacctagagggagggataatcaaaaccaagttaatctatgccaagattcccctattcctgaaaaaaacagtgctgaatatgaaacatctgttctggctaggtttcatattcttaaatcccgggatgaaggttcaagttctatttcttcagaagggaaacagttacatggagatgaatctgctgctgtcgaaggaatggatggcataacagttgcaacaaatgtatctgagggtaaaagtttggatgtccatgcaaatcctgttgtggtgcatctcaattcctacactgccgtggacaagtcaatcccaaaggagtttcatctggattcggaggacaatcaagaaactcagcctagcggaacctgtgagtttcagcctcctacttactactccgatggcttcgcgtcagactgggaacatgtggagaaaagcttgtagaacgattttgaaaccttttaagagtttggttatatggttcaataaatgtttatgttttgagcatatgactctgaataaatgcttatgggttagatttattatctttatcagacatgcatattgcagaatttggtctttttcagtctttatcctgtttgtatataacaatgtcagactttatttttatctaatgtgtttgctcacttgcacatgtggataaataagtgcaagtgatagaaaaaataagttgttaaattgccaaagaacagaccatttagttttcca

SEQ ID NO: 3609 - DNA, 1580 bp, Glycine max
  Clone ID: GLYMA-23APR03-CLUSTER45961_1
aaaaggaaggaatcaaggaccacctaaaagataatttggcacaaactacatatggcatgcacgacgggagaacgaaatttcaaccggtttggtgggtgtctgggaaagaactcaacaatgggcaaaaacttaaggcttttggatgatcttcatgttcacattcttgcttctcgtgaatctagttcgggaagggataccattcgcatggaataccttactcttcttaaagaaatgacagagcccctgccaaccctgcctaaggtggtttgaagtacacgtgttctttagttttaaacataccaaatgttttaagctgaaatgctgaacttgattgaatctcattgccctttttgaaatgatcaggctgaagcagttcagcaagttgtggaattgatgaatacatactctatcagtcaagaagattttgatactatagtaaagttatcaaaattcagggttccttgactaaaatgtgaaaaagatgataacaaaattgaatgctgacttagtggaggtaagtttttgatcgttaatgaatcgggatcatccgaacccaatagacgtaatacggctcagctacgtaggcccccccccccccccatacaaagagcaaagctcatctcgggttgttcgagttgcagatctaatcactcttccaggggtaaaaaaggtccctaagaagcgtattgctgctattctggaaccagctggtgaagaagtggaaaaaggtgaaggtgacaccttagacgagagcgaagaagagaacagctctgataatgaagagttggagggcaccaagggtgagaagctgcaatcagaacttcaaagctataattcaaaggccacgcaaattcagttggaactgaagggaacgggaaattcaagttccaagaagacatcgggtggtagaggtaaaggtgcttctgcatctgggaagaaggttgctcaagctccaaagactactgcaaaaagaaaatggtgaagaaatattaaacaatgtgcctttctccggaaccactatttggaggaattgtatagaaccccgctctttacgtaattgtgccttcacaaattttagggttgactttagtaaattttccaaggaggacatggatgattacttatggtggccctctgttttttgaatttagatgatgtgtctacgttaggaattagaactttgcatgctatgttttgaagaattcctggattgagttgttactcctttattccctgatattctgcaaggatatgatgctgcctggatgagtaatgttgcatactcaaaaggggggaaattgaatgaattgattgtaaataagtgaaagatgttacaattttttcttttttgaggcaatgggaaaaaacctaaggcttttggatgatcttcatgttcacattcttgcttctcgtgaatctagttcgggaagggataccattcgcatggaataccttactcttcttcttaaagaaatgacagagcccctgcgaaccctgcctaaggctgaagcagttcagcaagttgtggaattgatgaatacatactctatcagtcaagaagattttgatactatagtagg

SEQ ID NO: 3610 - DNA, 1075 bp, Glycine max
  unsure (1)..(1075): unsure at all n locations
  Clone ID: GLYMA-23APR03-CLUSTER45_8
ncccccccccgccccccccccccnccccccccccccnccccccccccnccnccccccccccccccccccccncccccccccccccccccccccccccccccccccccccnncccccccccccccccccccnccccncccccccnnnccccccccccccccccccnnccccccccccccccccccccccncnnncnnnnnnnnnnnnnnccccccccccccccatccatttctcgcaacaacgcttaatctctctcattccccatttcctcacctccttcaaccgctgctaaattctagggttccgaaatggacgctggcggaaagatcaagaagggcgccggaggtagaaagggcggcggcccaaagaagaagccggtttcaaggtccgtcaaagccggtctccaattccccgtcggaagaattggccgttatttgaagaaaggaaggtacgctcagcgtgtcggtaccggtgctcccgtatacttggctgcagttctcgaatacctagctgccgaggtgcttgagttggctgggagtgccgcacgtgacaacaagaagaacaggattattccaagacatgtgctattggctgtgaggaacgatgaggagttgggtcaccattgcacatggtcattaaccctgttttgttgcctaagaagacggagagggctgccaaggagcctaagtctccatccaaggctactaaatctcctaagaaggcttagattatcctttttttttttttttaatgtagtgttgtatatcggtgcttaggtgcttttggtgtaacaggaaatttgttgtgtttcttaaacattgtaattcttgtcccattgtgttgcttgtaggagtgagtttgctttattaatgaaaagtggaaaccgttttccccttgttttcaatcaacattctctctacctcctttttgtttttattatgagatgttgattcagttgcattgaagtgaagtaatttgtttagaagcggtgaataaactgaactttaagtagtttcgtgctgagttcctatgggcttggtgtagactgtaactttatttgaattaaacaatgtccg

SEQ ID NO: 3611 - DNA, 782 bp, Glycine max
  Clone ID: GLYMA-23APR03-CLUSTER4617_13
aaaaataatgcttctcaatgcatattcgtttctttccctatttatcacgtcgtgtttcacgttcttacggttaagaaagaaaacatatgggataataatcatatgtgggttttgcttgtgattgatttttttaaaaaaattatcattcatcttcacttaggaattcggagacttcaagtgctatgagaggaggccaaagcaacgggagtgttaggggaattgcctcaccggacaggggtgcgcacgataagagggggacccaaaacaaccaccttaatgacaataataacaagtctgtggtctcatcagacaccgcgcacgatagcaagaagggcggtggtgggtcgccgtccggcagtggtgacgcggctccgccggtgtggccgccaaagttcgtgattgccttgacaaacaaggagaaggaagaagatttctgctcttgaagggttcaaagcttccccagagacccaagaagagagccaaattcatacaacgaaccctcaatctcgttagtccaggtacatggctgtgcgatcttactctggccccatatgaagtaagggagaagaagatatccaaaaagagaccaagagggttgaaagcaatgggcaacatggactccgactctgaatagaaagaagcgaggcaatgagtaaagttggttttttttttcttcttcttctttagtctaagggtgtgagaaatgttgagatattgtaaagcatggcaacgcataccagcgttccaagaaatcgaaatcaaatataaattggtttctctct

SEQ ID NO: 3612 - DNA, 1662 bp, Glycine max
  Clone ID: GLYMA-23APR03-CLUSTER46272_1
ggttcgggagactccggatcattgtcttccgaccagacgcaggatcctggtccttctgccaagagaaacttatgttccaaccagaaaatttgcagtgcgagccctggcagcacacacatctttgtgtctcaaaaatggaacctattgacaaccaactcacctctttcttacaacacccccacctctaacaacaacaacccccgcaccagccacaacatccgccagcgccgcccccccccgcagcccacgggttgccgaccaacggtctcttgccgaacgcggatgggtcccacatgctgtaccctcactcgggcgcgtccgccgtgtcgtcgcagcttgaaccggcgaagcggaaagcgggggcggccgaggaagtacggaacgccggagcaaagctctggccgcgaaaaaagccgcaacgccgtctgtctcactcgttctctgcacacgaggcgccccactctcagatcccctccttccaagaaatcccttcccttaactaaatcccatgcatggcctggattcaatccgcatgtcatttctgttgctgctggtgattctgttgccgctggtgaggatgttggccagaaaattatgttatttatgcaacaaagtaggcgtgagatgtgtattctgtctgcatctggttccatctctaatgcctctcttcgccagccagcaacctcaggaggcagcattacctatgagggtcggtttgagattatttcacttactggttcttatgtccgtaatgaacttggaactcgaactggtggtctcagtgtatgcttatctaatactgacgggcaaatcataggtggtggagttggtgggccacttaaagcagctggtccagttcaggtcatcgttggaacattctttattgacaacaagaaagataatggtgctggtttaaaaggtgatgcctctgccagcaagttgccatctccagttagtgaaccggtatcaagtttaggtttccgccaatcagttgactcttccagtggtaatccaatccgcggaaatgatgagcatcaagctatggatggaagtcatttcatgattcaacagcttggtttgcatggaacacctccccgatccacagactggggtcgtccggattcaagaaataccggttttgagttgacaggaaggacaggtcatggggcgcaccagtctcctgagaatggaggctatgaccaaattcccgattgaaaaaccaagatggctttttggatttgatagcagtgataaatgtgtgatagatgtatgatatctctacataccagcagtctttgtcacgcgatgccgtttatagtatgcatcattcattaaggatcgtggcttctgaaaattaatactcgtggatgtccttgaaaatattgttctgtctcgtttactgatgttgtatttataaatcactaaatcggggttgcttacttcatttttgcgggcctgttagtttataccgggataaatataatagatatatgcttcctagattagctaatctattgtggactatattttccttccattttcaaggtgcagtcttaatattgttcaaaattctatcaagcatatattattatggttcttaatttataagcttattcggaaaaaaagaaaaaaaaaactcgagactagttctctccctcgtgc

SEQ ID NO: 3613 - DNA, 1207 bp, Glycine max
  unsure (1)..(1207): unsure at all n locations
  Clone ID: GLYMA-23APR03-CLUSTER4631_2
acaaatccatttctttggttctttgcttttgcttagtgggcttccagctgtattcatggacttggcggagaagcttttctttgcagcatttctcattctttccgtggccattgatggaatgcaggcagacactatggtcactggcactgtcttctgtgaccaatgcaaagacggacagagatccctttttgattatcctgttaatggtgcaaaagtaattctgtcctgtgctgacagtaatgggcaaattacaatgtcaagagaagaaacaacaaactggtttggaagctatacaatgaggttcaatggcgcacccgacttgagtggttgttctgcccatgtctcaggcagtggtgaagggtcaacaacgggttgtggtgaaggggctggtccttcacaaaatcctaaactcatgtttagaatgtttgacatggaaatntatacagtggatnctctccttgctcagcccgcacaacccatgcagtactgctcaacatcttccaacccagtcccagcaccagacacaccacccaactctccaccacatttcaagctacctccagtgcctccactaccatcactgccaccacttccatcactaccacccctgccaccagtgatttttgcagaagcttcagcatgtccatcagaattttcaggaagtggacactgccagaatacaaatgctactggagaggtgtgaaccgggacacaaaagttgcagtggcttttggaatggttgcggcgagaagatacggaacagacattacactgtggcatgggttgcaagggagaggagacccttacaggactcttctcagagaagggatcacagcacttcttaactcctataacagctttcaattctcttatcatccacttggcgtcgtccaacacatgaatttggctttgatgggcacaactaggagtgttctacatactgctctgcgcttcaagagggccaattctggtgctggaaatgtcacctgcaaattcaccacttgcaaataatttatttatatatagcatgtttagaaaggattgttttggggaataatccaattaaaaatgcacaatagaaaattgaatattcttgtactgtactggtgtaagttttgtctttatctttattctatatatggaggtttaccgttgtatggttttttaccttagatttatcatactagtagtatcttngctgttctct

SEQ ID NO: 3614 - DNA, 827 bp, Glycine max
  Clone ID: GLYMA-23APR03-CLUSTER46369_2
acccgaccaaccattttacatttacagtaacagtagtgaaatttcggaaaaaatggccgatggctttcaagatggcgacgactggaatgtgggttacagatgagtgcaagaactcgttcatggatatgaaatggaagaaggagcacagatacattgttttcaagatcgacgaaggatcaaggctcgtcaccgttgataaactcggtggccccaccgagggctatgatgatctcaccgcctccttgcccaccgatgattgccgatacgcggtttttgacttcgacttcgtcaccgttgataactgccgcaagagcaagatcttcttcattgcatggtctccaacagcatcaaggattagagctaagattctatacgcaacttcgaaggatgggctgagaagagcgctggatggaatcagctatgaactccaggccaccgatccaacggagatgggattcgatgtaattagagacatagccaaatagacaggcagagaatcaaattaaatacgagtgctaattaagttttaatccttttatctcttcagttcagatgtggttacacgtacgttgagttttaattcatgagcagctcccatgacatgtgctctccttttcttatcgttttgtatcatagctttatcatcatcatccactactttggctggcatcttcaatgtgatatatagtataagtgggccatgaaatcttaaatcataataatatattatatctaatgtggttaccccatgtatgccaatagctggctaaaaccaaaaaaaataaaactgttagtaaaaggatacgtagattagatcaactttttat

SEQ ID NO: 3615 - DNA, 1752 bp, Glycine max
  Clone ID: GLYMA-23APR03-CLUSTER46395_1
ggccctcgaggccaagaattcaagccaattcagtattgtttctattgtgaaagtctttcttttttcttctgtttaaaatttatagttttaattctacaagcatatcacagttaggatccattaggtcatcattttttttcttgattattagagagaacgagattacttcaaccatcacagctcaatagtagtgtggtgagggtcacctttttctgtatactctccagtgtaagagtcatgtcatggcttagacgcggccctcctaggggttcaaggaatagcaaaaccccaaatatgcaatcgctcgccagctccgaagtacagctctttatcttcttaccatgttaatgaaatcttttatttacaaacaaaaaggggaattgtctatcttcgtgcttcatatgatacaagtgatgcatagagtgaccgttagtgagggcattaatagtaatttatatgggtatttcaccatccccaacagtcatctttgatttggttactgtttttgctttgatgttctgaagtcactaaattttagtggttgtcacttgtcagtatttcttcatagtcattacctgcaatctgtaggcatcaacaaaggcttgaaattattgccacacattttatgcttttgataaacttctcacacagagatgtttgctgataaggtatatgtctctgtttatatgcatttggaattatgtaaactctcgctaaatagtttttttaatgagtggtgtcagtgtcactggcatatgttagcctatttgcatgtgcatttaatgtttttagtgtatcttattaataactttgtgatgtgactttattctaaacaatactctcttcatccctattcataagacattgttggttgctttatgcttattaagaaaattggttaaatttaggtattagcattaaattgtctgtaataataatattctgggttttggttatattccaggaaatgtctcaactgagatatgtactgtgtcctcgccatttgaaggaaagtcaattctggaaaatttactttaagcttgctaggagccatgttcttgaatatgagcttcgtgacatacaacgggagaaactgaaacagatggcagtggaagatgagaaatcttcagataacaatccgtatgaagttgaaatggcagaagcaaatcatgaaaactttattgagcctctaccgccctcatagaataaaaacactaacattggttggtggcatgaatggaacagataaatggtgtggaatccttggaaacttctcatggcggttcttggttatagaggcaagctatttcttcattttaaaagtttgagatgcccgacaatcaaatcacgaatccaaaaacttcacaaatgtatcactgatgctgttgctgagtaattagtttggtttctgatatatgtccctcctcatcattcttatcatagtcaatcagaaaacaatggataaatgtacaaaatctgtttcgaatgatggagttggctataacgattttggatttaacattaatgtttaccaattacccttatcactgatgctgttgctgagtaattagtttggtttctgatatatgtccctcctcatcattcttatcatagtcaatcagaaaacaatggataaatgtacaaaatctgtttcgaatgatggagttggctataacgattttggatttaacattaatgtttaccaattaccataaatgttgataacttcctttttagaacgtttttttgaac

SEQ ID NO: 3616 - DNA, 593 bp, Glycine max
  unsure (1)..(593): unsure at all n locations
  Clone ID: GLYMA-23APR03-CLUSTER468_8
ggtacacacacacagattcccctctttcgaatttcgatactttgatcagatccacaacacttcttcatccatgacgcttggttcttcaggatccagtgtcgtggttccaaggaacttcagattgctggaggagcttgagaagggagaaaaaggaataggagatggcacagttagttatggaatggatgatggtgatgacatttacatgcgctcttggactggaaccattattggtccctataatactgtacatgaaggaagaatttatcaattgaagctgttttgtgataaagactaccctgaaaagcccccgagcgtccggtttcattcacggatcaatatgacttgtgttaatcatgaaactggagtggttgaatcaaagaaatttggtcttcttgcaaattggcaacagaggtttccatggaagatatactgacccagctgaagaaggaaatggcggcttcacataaccgcaagcttgccaacctctgaaggtctcactattagtgacaagatcacctgatattggatcatattgcattgagttgcaatattantatgaatctctggatccttctaaattcagacatctg

SEQ ID NO: 3617 - DNA, 3244 bp, Glycine max
  Clone ID: GLYMA-23APR03-CLUSTER4709_2
tacattatgtatgcatttggcgtaagtatatgagagagtgagtactactactgcgaagcaaaaccagagagacatgagaagctgtgtgtgttacacgcttttattgtttgttttcttcatatggctacacgtggcaacgtgttcttcgttcagtgacatggatgcgctgctgaagctgaaggagtccatgaagggagacagagccaaagacgacgcgctccatgactggaagttttccacgtcgctttctgcacactgtttcttttcaggtgtatcttgcgaccaagaacttcgagttgttgctatcaacgtctcctttgttcctctcttcggccacgttccgccggagatcggagaattggacaaacttgaaaacctcaccatctcgcagaacaacctcaccggcgaacttcccaaggagctcgccgccctcacttccctcaagcacctcaacatctctcacaacgtcttctccggctattttcccggcaaaataattcttccgatgaccgaactcgaggtcctcgacgtctacgacaacaacttcaccggatcgcttccggaagagttcgtgaaactggagaaattgaaatacctgaagctcgacggaaactatttctccggaagcataccggagagttactcggagtttaagagcttggagtttttaagcttaagcaccaatagcttatcggggaatattccgaagagtttgtctaagttgaagacgctgaggattctcaagctcggatacaacaacgcttacgaaggcggaattccaccggagttcggcaccatggaatctctgaaataccttgacctctcaagctgcaacctcagcggcgagattccaccgagtctagcaaatatgagaaacctcgacacgttgttcttgcaaatgaataacctcaccggaaccattccgtctgagctctccgacatggtgagcctcatgtcactggatctctccttcaacggcctcaccggggagataccgacgcgcttctctcagctgaaaaacctcactctgatgaacttcttccacaacaatctccgaggctcagttccctccttcgtcggcgagcttcctaatctggaaacgctgcagctctgggagaacaatttctcctctgagctcccgcagaacctggggcaaaacgggaagttcaagttcttcgacgtcacgaagaatcacttcagcgggttgatccctcgggatttgtgcaagagtgggaggttacaaacgttcttgatcacagataacttcttccatggtccaatccctaacgagattgctaactgcaagtctctaaccaagatccgagcctccaataactaccttaacggcgcagttccgtcagggattttcaagctaccttccgtcacgataatcgagttggccaataaccgttttaacggagaactgcctcccgaaatttccggcgattcactcgggattctcactctttccaacaacttattcactgggaaaattcccccagcgttgaagaacttaagggcactgcagactctgtcacttgacacgaacgaattccttggagaaatcccgggggaggtttttgacctaccaatgctgactgtggtcaacataagcggcaacaatctcaccggaccaatcccaacgacgtttactcgctgcgtttcactcgccgccgttgatcttagccggaacatgcttgacggggagattcccaaggggatgaaaaacctaacggatttaagcattttcaatgtgtcgataaaccaaatctcagggtcagtcccagacgagattcgcttcatgttgagtctcaccacgctggatctctcctacaacaatttcatcggcaaggtccctaccggtggtcagtttttggtcttcagcgacaaatcctttgcagggaacccgaatctctgtagttcccactcttgccctaattcctcgttgaagaagagacgcggcccttggagtttgaaatcgacgagggtgatcgtcatggtgattgcactggccactgcggcgattctcgtggcggggacggagtacatgaggaggaggaggaagctgaagcttgcgatgacgtggaagctgacggggttccagcggctgaacttgaaagccgaggaggtggtggagtgtctaaaagaagagaacataataggaaaaggaggagcagggatcgtgtaccgcgggtccatgagaaacggaagcgacgtggcaataaagcggttggttggagcggggagtggaaggaacgattacgggttcaaagcggagatagagacggtggggaagataaggcacaggaacataatgaggcttttgggttacgtgtcgaacaaggagacgaacttgcttctgtatgagtacatgccgaatgggagcttaggggagtggctgcatggtgccaagggaggtcatttaaagtgggaaatgaggtacaagattgcggtggaagctgcaaagggactatgctatttgcaccatgattgttcccctcttatcattcacagggatgtcaagtctaataatatattgctcgatgctcactttgaggctcatgttgctgattttggccttgccaagttcttgtacgaccttggctcctctcagtccatgtcctccattgctggctcctacggctacattgctccagagtatgcttacactttgaaagtggacgagaaaagtgatgtgtacagctttggcgtggtgctgttggaactgataatagggaggaagccagttggtgagtttggagacggggtggacatcgttggatgggtcaacaaaacgagattggagctctctcagccgtcggatgcagcagtagtgttggcagtggtggacccaaggcttagtgggtatccattgataagtgtcatttacatgttcaacatagctatgatgtgtgttaaagaagtggggcccactaggcctaccatgagggaagtagttcatatgctctcaaatcctcctcactttaccactcacactcacaacctaattaatctctagatagttaagctctaagctatttgctcatctgttgtttgtcagaagtgaagcaacaaaatcaaatgtgaagtacagaatcaaatgtaaaataggtttgaattcattttgcgttggtgtcaactgtcaagtaattggaaggattttcccgattgtgtgtatgctcaagaatttttgtagaaaagaactattgtttataaaatatttgtgactggtactgtttcttct

SEQ ID NO: 3618 - DNA, 1590 bp, Glycine max
  Clone ID: GLYMA-23APR03-CLUSTER47253_1
tcagctacgtaggcccccccccccccggcatcaggcagagactatagtacaacaaccacaacatctatctgcctctgtgtctctacataacatatctcttttgtctcacttcacaaattgtactacattttctgtctccaatggccacatcggtgaagaacaacttcctgaaccctgcactggtttcaaatctccaacaagcactgctcagaagaaaggacagtgtgcaggagcagcagcaccacaacagggccaatgaacccaccaaagcttcttcaaaacccgtggtgctagtcaccaatggtgatggcatagactctcttggcctcacattactagttgaggcacttctttgtgatgcccttcttgatgttcatgtctgtgctccagaaacggatagatcggtttgtggtcactcggttaccacaggggagacactagctgtgtgttcagtacaagttggtggtgccaatgcttatcaagtgtctggaactccagcagattgtgtctctttggctttatctggggcattgttttcttggtcaaaacctgttttggtaattagtggactaaacaaaggaacaacttgtggttatgacacgttgtactccggagctgttgctggagctagagaggcactgatttgtggtgttccctctctttgtatatcattgaactgggaaaagaatgtgagctgtgaaagtgatttgaaggatgcagttacagtatgtttaccattaattcacgcagcaataagagatatacagaaagggattttccccaagaattgcttcctcaacatagggatcccaagctgtcctctgacaaataagggtgtcaaagtgacaaggcaaagtccgcaaagatcttctttaagttggcaagctgtgtcaacaaataagaatccttcagcaggccattacatgtctaaccagcaaagtcttggaatcatgttagcacaactaggaagagatgcctctgctgctgcagcagcgcgccgtctaaactcaaaccgcaagaatgtggaggttgaatcagttggtgttgctggaaaattcagttctcaacaaaccataaagaaatacttccgaatggagttaacagaaaaagagcagcaggacatagaggaggatttagactccagagaacttgaagagggatttgttacagttacccctttgtctttgtatgcaaatgttcacatggaaattcaatcatcagtgtccagctggctagctattgcactcagtggtgatcaatgaaactagctgctaattctgtgtggtattaattgtagagtaatctgcattgtaattgtggcaatctgaaagtgagagtcaatgctttacaagttttatgttgtgagatcttgagagtagtatgtatcattgggtagctactatcccattagatttaatctatatattgttattcagttatttactgatgacatgacatgaatggatatgcacatgttgccaatgagaagattaagtggctcaaaaaatgtgttccacctcttgctgatgaaaagctagagtatcaatttgggggaatgaagttgggatagtcctttgtgttaggaatttt

SEQ ID NO: 3619 - DNA, 945 bp, Glycine max
  Clone ID: GLYMA-23APR03-CLUSTER4734_13
cttccccagaaacactctttctcttaagctctcgtagttaaatctgcgagccattagttgaagaaaaaaaaaaaaacaraacaaaacaaaacaaaaacactagggtttaagatgggttccaaaactcgctcttcccttgctcttttcctaacagtcaacattctcttctttgcccttgtctctgcctgcgggacatgccctagcccaacgccaaggcataagcacaagcctgttaagccaagcccttcaggtggctcaggtggttcaggaggttcaggaggttcaggaggttctggtggctcaggtggttcaggaggttctggtggctcaggtggttcaggaggttctggtggttctggaggttccggtgcgtcttgccctcgtgatgcactcaaactaggagtgtgtgccaatgtgctaaacgggttgttgaacgtgactttgggtcaaccaccagttaccccatcctgttcccttctcaatggtctcgttgatcttgaagctgcagtgtgcctttgcactgccctaaaagcaaacattttgggcatcaacctcaaccttccaatctcactcagcttacttctcaatgtttgctcaaggaacgccccacgtgatttccaatgtgcctaaatcatggcctatgctatgcacaagttgcttcaatacgtgtttgctagctagttctggctttctgttgtctcttttattttataaatttcattgctcatgagtcatgatgcgattcttgtacgtgcatggatggttaacttctcgttattctgtcgctttaattggtgtttgtttttatttaacaaagtgtcaaattaaataaattcccgatgctttcttatgcaaaagcaaaaggaatcaaagatgatactagtgttatttatttgacagataaatgattaatgttgcgaacaatttttaaaaaaaaaaaaaaaa

SEQ ID NO: 3620 - DNA, 2509 bp, Glycine max
  unsure (1)..(2509): unsure at all n locations
  Clone ID: GLYMA-23APR03-CLUSTER4735_19
gacacaaaatacaacaacaaaaataagagtaaaatttgaagactcacaaatgtaccgtgtgtacaaaagtattcattaatacaggtgacaggaaattattaccccccatcaagacaaagttaatctaaatctacaattcatatattaattcttaaaccagatctgtagactattttacaatttgagctcccttcaaaagaatcagagttgcatttcattatgaacctgtactttaaatgggtgngtgctagcaagggattttagatagcaacgagacaacgataattagttccagcacgcactanatacaaattcaactaaggtcgagccacataaggcagaggaattcagcatatccatagggcttttgctttaagtttcattgaacctttgcaaggcttcggctagatacaccgtgtaataatttgacaaacccaagaaagcttaacttcccatccgtgtggcgtatccaatcatgaagaacaacatgaacaggaatagagggaccaagtccaagttctgaaacaagctcttcaatgacaatagccctgtttccgtctttatcaaaaagttcatatgcacagcgggcatgttgttcccaacgatcaagagcttcaagttgatgcacactcaatgcagctgcacaaaattcttcaaaatccatccttctatattgtaacgagttcagcgatgaaaggaagtcaaggatgcgagactctttcatggcatctgttgcatatttcatcaaggccttgttaacattctctaaagatatgctaccatttttgcttggttctagcagtgcaaattgccctctcagataatagagttcatcagcagtcaatgtttttgacaaggccctcaaggcagccttgcgtaaggatgaagatctcatatatgtcttcatgagcttaaatattaaaatatccagtggaacttttacattattgcaatttcgtatccaaggatgacttagagcctgagcagcagatattcgcttccgtggatccttattcaatatgcgtttgacaaaatctttagcttctaaagataaagatggccacggtgtttcatcaaagcttggatcagctttcaaaactgccctaaaaataccagactctgttcgagcccaaaatggacgactgccacataatagaatatatgctatcacacctatactccacacatcagcctctgtgctataagatctatggagaacttcaggggccacataatatgcacttccaacaatatcattaagcctttcatctggtctgacaaaatctgataacccaaagtctatagctttcaactcagaactttcatcctttttagcatacaaaaaattctccggcttaagatctcggtgtaccacaccctgtagatgacaaaatgcaacaacatttagtatctgtaccatgacagcctttgcatcatcttctgagtatttccctcctcttgataatatcatatctaagagctcccccccttcacataactccataacaatgtagacattatcttggtcttcaaatgcatcatagaactgtatcagattgctgtgtccattcaaagctcgcagtattttcacctcccttctcacatcttcaatagcaattgctgttgtcatctttgcttttggtatgaccttaacagctacttgttgacccttgagctcacccttcttgaacttagcagaacacgtatacccaaaatgccctcgagccactttttcaccaacctccaacctactagtgaactccttggagaacccaaatctcttatccaaatccgccgcaccctcctccccctcctccggtatcgccgccgtagccgacgccttcttgccctgccgccgagccagcaccgcccttatgtgcttcgccggcgacggaggtgggaacggccgccggaaaaacctcctcggcgtggagctcgcgctccggctccctcccgccggtgccggagacttcttcaggaagcgagccgggctcgggctgtagaacgggtagaacggcgaccgttttccggtgatggcgtcatctttccggcgaggggtgtcggcggcggcggggctgagtggggttttcgggatttgcgaagggtcggcttcggcttcggcttcgcgaagcgcgtaagggctcggcttctgcggcttcgaagtgcaaacccccattgctgaacgatcacagaatcttcgctactcaatcattggtcacaacattgcgggaaaaaaatttctgggtcttgttgttttgtgctaaagattcaaactttgaaaagctttttaaagagggtagaagcttggggggaagtggatttgtgggtgagtggaagaagaagaaaaaaagggtaatttcaagggacacgtggcaagcacgtgagtattggggtttgggtgttcattgaattgggaagtgaagaaaggaacaggaagggttctgaaattgaattaaggaggaagatgatgataatgagaaacagtgaagcttagttaggaagatggcaa

SEQ ID NO: 3621 - DNA, 1112 bp, Glycine max
  Clone ID: GLYMA-23APR03-CLUSTER475861_1
acaattaattacatttgacaagtgaccttatcctagccctgtttcttgagatgccaagcacagacttaggtctctactcactaacctagtagtacattattttactactagcatactgttctaagtttgaagtttccacaaaatccaaaggaattaatgcgattcactcttctatcccgtgcgcctgttccttttctttctgccgccttccttaaattcaaacccgttgcaccttccacagcgactttcactagggtttcttgcatggccgcttcaccttcttccgcggcggttcgcgacggcgctccttctgcttcctctgccattgatttcctctcaatctgccaccgcctcaaggcaacaaagagaacaggttgggtacgaaaagatgttaagaatcctgaatctatagccgatcatatgtatcgaatgagtttgatggctctgattgcgtcagatgtccctggtgtagaccgaaacaagtgcattaaaatggctattgttcatgacattgcagaagcaattgttggggacataactccattggatggagtttcgaaagcagaaaagaatcaacgagaacaggaagcactagatcatatgtgtaaagtactcggaggaggatctacagcaaaggaaatagctgagttgtggatggagtatgaagcaaattcttctccagaagctaaatttgtcaaggaccttgacaaggtggagatgatactccaagctttggaatatgaagatgagcaggggaaggatctagatgaatttttccagtcaactgctgggaagttccaaactgaaactggcaaagcctgggcatcagagatagtatcgagaaggaagaatactaaataaatctcccagtatggatctccttgtcaatgggatagggatagggataggtggggtttatttggtttgttggtgtgggttttctgttcttttggtcactggcatgaatgggagtaataggtggtagaggtataataacagctgctagatgtacggaccaacaaaaaacagagaaattgaagctgtgcatgaagcagcgtatagtgaattttactaggagatttgaacataatcaaatttgttcgactatgtct

SEQ ID NO: 3622 - DNA, 1703 bp, Glycine max
  unsure (1)..(1703): unsure at all n locations
  Clone ID: GLYMA-23APR03-CLUSTER4773_2
agtgagtgagagggtagcaattgagtgatcagtcatggcgaaagccgtagtcggagaagaaacgcgactcaaattggcggaggatcgtctcagccaatccgcagttccatccgaggtgggtcttttaatcggaaagttcagctccgctttgggccgggccttcctcttcgatctcattcccaccccacacaacgactccggcgagcccgcctgctccctcaccgagcccgacaagaagaagggccccaaatctaaatccaaatccgagctcgctgattcctcttcccttttcatcgacaaggactgggtcgccgaacatgtccgccaggtttctagaatgctcgtcggcggcatcaaggtcgttggcctatacgtttgggttagcgacgccgcgttcaagaattcaaccataatgctttgccaggtgtgtcaacaattgcttactactcacttcctcatattcaacttcgtgattaactatgtttgtgttgtgttgtgttgcagaccgtgaagggtgttgctgacgcagcgccgggtttggacggtaactgggatgagagactgcttcttcacatttcttatagcccgaggaggtggaattgtagaaactgctcactgtcttcgaatattacatcaagtagtttgcggccttgtgattttaagatggggaaggtcttaacttcccttcaaacgttcaagtgcatgcacaactttaacctgaggttgcccatattacgcgacagtgcctcaaagttccagacgttgagtgatgttcttcgtcatgcaatatctattcatgccaaagagcttgcaggtgcaaaggccttgattgatggtaaattggttgttgagagtgagtcatattcatcagatggtgtgcatgaagttgaattgcttctttcatttctgaacgatagttctattgaagccaaggagatgttgttggtattctttcatttagtggcttgatatgttcgtttgcatatctaaattcaaaagagccaatttcccaagccatcactgatataaagggagatataattacnagtctgcaaagtagattggatataatctgngatgaggtagatgctgactctggtaaccaatcatgatgttggaagccaagtaagcgatgaattatcagctgaaacgcctgttccccaactagtgttgcacttattgagaaaaggatgcagtcttccatttcctagaagagtctttgcaccatggttagcagtggtgtatgtgtgtgattatttgcagccttttgaaactgttgaggttttaaaagatcattgcatggagttattgtccatgaaagctccaactgatgtctctaaaattttggagccagagaaagaagagttatctttcaaaactaaatctttctgggatgtggcagtgccctcctattcagaaattcacctcatggaagacaagagcaaacgtgatggcggaagcgagagttcaagtagtaaaactgtgaagccaggtcacattaatgttgtcgctgccggtctcattcttctattgtctgtgttagttggttttctgctattcgccctcaagggttgagggttttgtactgggaatttctcacctccagggacacacattcgcttagtttacaacattttatacttcaaaatgatacaagggcagatatgaaaaaaataataaaattagcaacatgcaagcccccc

SEQ ID NO: 3623 - DNA, 909 bp, Glycine max
  Clone ID: GLYMA-23APR03-CLUSTER47809_2
gtttagtttctctatcattttttctgattcttctcagcctcacaccgcacttctctctctccacgcctcaccgcacccgattatttctcttcctccgaatgaatccgccggagattcccttcggcggagccccgctgccgaagaaagagcttcaactccagggtccgcggccgccgcctctcaaagtcagcaaagaatctcacaagatcaagaagccgccgccgcacccggcgcaccaccaccacaactacccccacgcgccgccggaccagaacctacaacaacagcgggaaccagtgataatctactccgtctccccgaaagtcatccacgtcacccccggcgacttcatggacgtggtccagcgcctcaccggagcttccatcggcgaagaaccgccgtcgggacgcggcgacgtgtctccggcggcgaggctggcctcgattgagaagacgagtccttcggagagagaaagagaaagggttttgcacaacatagacgacaacatcgcgtggatgttgggggagggagtggaagtaggtcaatttccggggatactgacgccggagccgggaaccttgccgccgattccggcggaggtattttcgccggtgagagaggcgcaaacggcggcgtcgtattggaacgacttttcaccgtcgtattggtcggcgagcagcttcttggcgagtccgtcggggtttctttccgtcaccgtggcgtccccgcagccgtcgccgaacctgttcagcctcttcgacttgtaatatgtttttttttttttcactttgtttaattattgagaattttcattttcacattattattattagtggcgattctatcttgagccactgtttttgtacaatctgtagaaaaaagatcacaaagacttttccgtttgctggc

SEQ ID NO: 3624 - DNA, 986 bp, Glycine max
  Clone ID: GLYMA-23APR03-CLUSTER48229_3
tttgttgattggagaaaagcttctccaaaagtgagaatgcatttccctttctgttttaataaatatctgaggctgagaagtctgacttccttttttattctctttatacatttcagttatctgtggtaacaacataaagaatatatattaacaataataataatttaagtcatattccgcataacagtgtcctatctgttttctgcataaccttaaaagttttcccagtattatatatgcttcagttgattatatctgtgttaaactctaggcgcttttaattgaaaggtatctcattttttgttgttgtggcattcaaaaacttctttgcacttccctcctctccttttccctccaacctaacacactgataatttctcctagattgtttgcactaatctgattcttttcttgagtcttgagtactaagcaattgaatggtcctcggaatgggatgagatgaaaggggggctacaaactggtgggggaaggaagatgaagaagtcttcaacaccttacattcctcaaaactcaaccccatgtgcaactttatttgtagctaatctggggccgtcttgtaatgaacaagagctaatccaagtgttttctagataccccggattcttgaaactgaagatgcagagcacgtatggagctccagttgcatttgttgatttccaggatgttggtagctcaactgacgctctaaatagtctgcaaggcacaattcttcactcctcacaatctggcgagggaatgcgtttggaatatgctaaatcgcgaatgggcatgcggaggaagcccaatagataataaaaaaaaaaaccaacgagaatatgaattgttatttgcggctacaatagaatggaagctaccaatggtgtgtattttatccactgtaatttatatgaaagctaccttttgcagcttttaaagattggtgaatatatgttatattttatccaatggtgtaatttatttcgtgt

SEQ ID NO: 3625 - DNA, 886 bp, Glycine max
  Clone ID: GLYMA-23APR03-CLUSTER4824_2
atggagaaccacgaaaaaggatgagcgttgatatatgaaagtaaaagatgagaagagaggttggtcggagaacataatctttgtcgattccagaaatgtgtagcactagcattagcatagcttcctcacaccaaagctttctcaccaacgcccttattccaccaaagttcaggaccaccaggattagtattgtttcttgcagttccccacaacaatctccaaggaagaagaataatgagaacaagttggcaaagttagcaatggttgcagttgctgttggggtgctaacacttgggtcagttcatgatgcatcagctgccaagactggtggtagaattggtggccaggccttcaagtcagcagctccacgctccgcaccaagaatcaacaattccaggaccaacatctatatcaatcctcgagtggcacctccgcttgttggtggctatggctatggttatggtggctggggatggtctccattttcattctttgcaccaggtcccagtgtagctgtaggcgttggaggtggatttgacactattcttctgtttatgtttcttggtgttgctgctgcagttgtgaggagattctttgggtcaagaaatgaagatgatgactactagcagcataaaaggctttttaaagagagtgttattttgatgtatagaagaatggaagagtgaccaattaattactttgatgtattttgagatattatacttgaaaaccaaagcaatcatgtgctttctaatgcactgatttacaatttacatgcttgttatacaggatgtaatgaaacaatagacatacattgtacttgttcagggaagttcccaatatttacactaatttaaaaaccatcaagaaaagcatatggttttag

SEQ ID NO: 3626 - DNA, 1187 bp, Glycine max
  Clone ID: GLYMA-23APR03-CLUSTER482609_1
tttgctccttcgcgtggcttttaagacttcttcgttccctattaaatcctctcattaaattaccatagccccacaaaaaacgtatcctagttaaattcattcctacaaacaccaccgtccgttcttgttcttccttttccttcttctctccctctttccataaggctatgagtctaacaaaatcctaactctataacctaatcatttcatacctttcaattcaacacctttcttaaggtatagccattaaaacaaaattgtataataattctcattaaccatgagtagtggtaacgggggtggtggtagtagtagtggtactggtagcccttgtggagcttgcaagttcttaaggagaaagtgtgtttcgggttgtatctttgctccgtactttgattcggagcaaggtacaagccattttgctgcggtgcacaagggttttggggccagcaatgtctccaagctccttcttagcattccagtgcataggaggcttgatacggtcatcacccattttggtatgaagcacaatcaaggatcagagatcctgtttatggctgtgtttcccacatctttgcccttcagcaacaggtggtgagcttacaagcagaactctcttacctacatggccaccttgctcaaatggagttacctcaaccaccaccacctcttccactgccacaaacgatggcggcaccaccgcccggtttctcgattgcagacctaccgtccgccaccgtggcggcagcggcggccaccacctatgatttgtcttcactttttgatccactgggccaaacttcatgggccatgcaacagagagccatagacccacgtcaatacaacatggctgctgctccatcaaccgccactactggtgctgacattcaagcagtggcaagtgacattcctcataggcacgggtctcctccatctcctcctgcgtcaagctccaatgcttcaccatctctatcgctttctaaatgatcaaacatcttttttgctttataaattaatgaacttttatatattatttttcctttggtaattggaatttaatattaatattagaaactatagacgactagcaagggatcttaaattttcaaacatatttcaatatatgagcaagtatatttattataataatcttgattatatatatgattgttctttcattcctttca

SEQ ID NO: 3627 - DNA, 1919 bp, Glycine max
  Clone ID: GLYMA-23APR03-CLUSTER4839_3
ggtgagatgagattgcagattctcttggactctgcatggttcagcttatcttgctttgtagtattatgccttcattttatagttcatgcagaaggtcatgctagaagaatcagaatgactcaatgcatcaggaaattattcctattcacttatggtgtaatgagtgttgattcagttgtgaagattgctcaatatgtgcctcactttttcagtttaatttttaatgatatccattttgtttttagattatctttttacccatcagtgaggactctgcacacagattactattgcctctatatgtcaatcactaagctggatgaattatttgcaccaataaagctgctgcaccactgctttcaattgagaaattagtggtgtccatgcctcatacctattgtttgggctagttggtttatgacaatgtattagaatctctatgatcaagtggtctagagtttgatccttgctacccacattataaaataaaaaggttgaatttcaatacttgataggtgggcttggaacgcccttgcttcaaacctaaatgactcctgcataaggcggagtattagagatgtaatataattcatttatgtgtctttacctaacaacttaagctttttgggtagttgcttcatgatcattttgccaatcgtagggtgggattgttcaccttggcttcttgattaattaatggtatttcacatcagaaaatttatcagatcatatcatgtatgatttttagcggtctaaaaaccatgctaaactcttaagtttgctgatgaaatgccttgaggagaacacaaaacggctgaaaatttgtcatattatgtcatgtatgatttttaatgatcaacaagctatgatgaaccctaaaatatgctggtcaagtgcctggactggcaccacagcatgactgttcgttgcaatggcattaaagaggcatccataatttgctgcttaagcattgatcttaacaggtgacatggttatgtaggaaataaattatgaccctagcctcaaattcagtgaagtattgtatctcagtaccgagctctgtgtttcatgctgcaaagagttggggaaaaagaaaaacctctgctggcccttgactatataattttagcttttagtgcacagtttgaggctgttgtggtctttgtttctaaccatgccatgctaatattttcccatcacttaggtttatccaaacatgagggcagcattagttgatattctccagactcgtggcttccgaggcttgtatgctggactgtcaccaaccctagttgagattataccttatgcaggtctacaatttggcacctatgatacatttaaacgttggaccatggcgtggaatcagcgccaatattcaaatcctactgcagaaagcctctctagctttcagcttttcctgtgtgggttggctgcaggaacatgtgccaagctcgtctgtcatccacttgatgtggtcaaaaaaagatttcagattgaaggtcttcaaagacatccaagatatggagctcgggttgaacatcgtgcctacaaaaatatgttagatgccatgaaaagaatattacagatggagggttgggctggtctatataaggggatactcccatcaactgttaaagctgcaccagctggtgctgtaacatttgttgcgtatgaattgacagtagattggctggaatctattttgacttgattttttactaaggagaagaaggggatttttatgatttttaatctcattcttttttagtcaacttaatccccccccggataggaagcacgaggtatatgataatttaactacagcaatagtggataagattctagttctcttttaagatggataagaagtcaaaatgaaagctaagatctagcagggtaacatctattttcctttt

SEQ ID NO: 3628 - DNA, 1947 bp, Glycine max
  Clone ID: GLYMA-23APR03-CLUSTER4855_6
ggcccccccccccccccattctccaacatttcttcattttgtcgcgctccttcttctcttctccgtcgacgacgtttgtttgctcctcctcctcctcgaagccacagatctgctgcggagctaccgtatcctgtatttataycttcttcttctggtaagcttcttcgtctggagaatttggaatttgatacactggatcggatatgccggtggctgcttccgctatatacttcttgaacctccgcggagacgttctcatcaatcgcctytaccgggacgatgtcgggggaaatatggtcgatgcttttcggacacatataatgcaaacaaaagaacttggtacttgtcctgtgaagcagattggtggctgctctttcttttacatgaggatcagcaatgtttacatcgtgattgttgtcagcagcaatgctaatgtagcttgtgcttttaagtttgttgttgaggtttattgtattccatcgttcctcaactctgatacgaaggctttactgcttgtgcactgctttctgtcttccaattcttgatatttgactatagttaacacttaaatttggctgtataaaatgatcatgattgataacatgtcatctttgcaggctgttgcactattcaaatcatattttggtggtgcctttgacgaggatgcaattcgcaataattttgtactcatttatgaactcctagatgaaatcatggactttggttatcctcaaaatctttcaccggaaatcttaaagctttatatcactcaggaaggagtgcgttccccattttcttccaagccctcagatagacctattccaaatgcaactttacaagttaccggtgctgttggttggcggagagaaggccttgtatacaaaaagaatgaggtcttcttggatattgttgagagtgtgaatcttcttatgtcttcaaaaggtgttgttttacgctgtgatgttacggggaaggttcktrtgaagtgctttctttctggaatgcctgatttgaagttgggtttgaatgacaagattggccttgagaaagagtcacaacttaaatctcgtcctactaaaagtggtaaaactattgagcttgatgatgtcactttccatcaatgtgtaaatttgacaaggttcaactcagagaagacagttagttttgtgccacctgatggtgaatttgaactaatgaaatatcgtatcactgagggtgttaatcttcccttcaaagtattgccaaccataaaggaacttggtcgaacacggatggaagtaaatgttaaggtaaagagtgtctttggtgcgaaratgtttgcactaggggttgttgttaaaattcctgtgccaaaacatactgccaaaacgagtttcacagtaacatctggccgagcaaagtataatgcgtctattgattgtttggtttggaaaataagaaaatttcctgggcaaactgagccaaccttgagtgcagaaattgaacttatttccacaatgacagaaaagaaatcttcgactagaccaccaattcagatggagtttcaggttcccatgttcacggcatctggtttacgagtccgttttcttaaggtgtgggaaaagagtggatacaacactgttgagtgggttcgttatattacaaaagcgggatcatacgaggtaaggtgctaggcaacacatgtggaagcgtcaggattaattggtggagattgaaacagtcccaaataattaaaggctctgttccgtgtagttgtccagttatagctgagtttttttgttaaggttgaggggtccctcttcatatagtgtgctgtcaaaatgattgtggacgtggaaatcagttgagtatatatatttttttttaccttcaaggccagcttgttaatggaatattttttttatatagtgtacacattgtattttactttaatgataatttttattg

SEQ ID NO: 3629 - DNA, 1478 bp, Glycine max
  Clone ID: GLYMA-23APR03-CLUSTER4864_2
agttgcagggcaatgtgattgaggcagatagtgaaatcctaagattgtttagttggaagatggaggcagtggaatcaatagcggttccggaaccggacgaagacgatccttcatcgacgcttctggatctctcgagttaccagctccacgaccttgactcggtcgagttgccacccagcctcaccgagttggacctcaccgcgaatcgcttgtccacgctggacccgcgcatagggaacctctcccatctcaagaagctctccctccgccaaaacctcatcaccgacgccgccgttctccctctctcttcctggaacgccatttcctctctcgaggagcttgtgctgcgcgataatcaattgaagaacattcctgatgtcaccgtatttaagaaacttctggttttcgatgttgcgttcaacgagattagttcgctacatggcttgtccagggtctccgataccctcaaggaactctacgtgtccaacaacgaagttgcgaagattgaggagatcgagcacttccatcagctccagattcttgaactcggctccaataaattacgggtgatggagaatttacagagcctcgagaatttgcaggagctgtggcttgggcagaatcgaattaaagttgtgaatctgtgtggtctcaaatgcattaaaaagattagtttccaaagcaatcgtctcacttcaatgacgggatttgagggttgtgtagctctagaagaactgtacttgagccataatggtattgcaaaaatggaagggttgtcatcgttggtcaatcttcgggttttagatgtatcatcaaataagataacttcagtggatgacattgtgaacctgacaaaattggaagatttgtggcttaatgataaccaaatagcatcacttgaaggaattgctgaggcagtctctggttcaaaagagaagcttaccaccatctacctaaaaaataacccatgtgctaagacgcccaactatactggaatcctacgggaaatcttccccaacattcaacaaatagattctgatatattttcttagaagtttcttggcttcagcctttttgaaaacagttgcttcgaagctttgtcttttcaaatctattttctgtcatgcatgcagattctggtttgtaagaatgaagatttggctccatccacctaatgaagagaatatgcttatcaaccattggacgatactgtggcctgaccattggttacctgtcaaatgaatatgcttgttttatgtttctttgttttgcagaccacatttcgttgtgtgtgtttttggcatccaatttttgagtatcactgtaacactttctttctactgtgtcaattatatttctagctaccgactgtggcgtacagaggctgtgggtgtagtagattaatgatcatccagattcattgaaatttgttttagtgatttcttatccataataacaagttaatatttattgtcggc

SEQ ID NO: 3630 - DNA, 1798 bp, Glycine max
  Clone ID: GLYMA-23APR03-CLUSTER4880_2
gagtcctctcatttaggacagaaggaaagtaacaaatagttacagacagtttgttagaggggatctgtcagttaaatagtgggaatgaggatggaaggattcattctgagtattaggaaatttgtatgaaaggggaaactctttgcagaagggaatcccttgcaagacaattctttctgctattttcatgcggttcaaggatttttttttttctcgtttcactttcctgcttcaaaatactttaaattagtatttaatatttagttttgtcaatagattgtgtggcaagagatgtgttcttaccatgagtcagagtgtgcaagtttacaactctatctgatattactaatcacaaaattatcagtatgcaaattaaaacatgaaattattaaatattatcatgcatgcacttatgtctttcatatgccattattatctgttattgagatgctccattgtcatatcctcggtataggaaaagttatcaaagatagtagagtaaaatgtcccaattaagggtctttattattttgttttatcaacttcctgtggtactactccgagatgcaagcttggtctatggtggaaataaatctattccttgaataaagcttaagaaatacttgaaaggcaaaagaatgggtggcatttatggtgtgggttatgtggatgtggatggtcagttgtttagttttgtttttgttaaaatcaagaaatttgtaacatatatgtagagtagaaattcatgatttcatggaatggaattccttttatgcaagggaccagagtttggcattcccttcattttaggtgcttacgaaagagagagtaacaataagtgtgtgaagtaaacaaaaaacagaaaaactatccttcccttgaaaataatttttgccattgctgttggatcactgaatttacctgaaactcaatgtgctgatcaaacagttcagatctgcttacgttgatggcctggcagaagatatgctctctttaagagcttatagatgtagtctgctaacagattcagtgattaactatttcaataactcattttttgaccaattaaatgcaaagttgctcttttggctcattctacaagtttcaatagttttgttgtgtttctttgtttctttctttttttgataaatgattctactcaagacactttgatgaaatgacaggtaagaattgttgcttcaacgagtcacgtgtggagttttatcttgagcaagaacctcacccatcatcctccaaaaacttgaaacaccttttccagatgatccgcaaaggtacctactccaagtatgattatggaaagctaaaaaatctgatagagtacggcaagttcaatccaccaaagttcgaccttagtcgcatacccaaatcattgcctctgtggatggcctatggtggaaatgatgctttggcagatataactgatttccagcacacactcaaggaattgccatccacaccggaagtggtttatcttgaaaactatggtcatgttgacttcattttaagcttgcaagcaaaacaagatctttatgaccctatgattagttttttcaagtcatccggaaaatttagtagtgtgtaaatttccttcattccggtatgatggatgcaatacaatggtctacgtgtttatatattcttttttcaagtcatccggaaaatttagtagtatgtaatgtttgcttccttccggtatgatggatgtaattactgtaatggtctacgggtccatctattactgcacccctcgcaaagttgaaatattaatattcaaaaa

SEQ ID NO: 3631 - DNA, 2289 bp, Glycine max
  unsure (1)..(2289): unsure at all n locations
  Clone ID: GLYMA-23APR03-CLUSTER490593_1
gcgcgccccctggctcgctcagccacgtactgtctctccccctctgtctcttgcattaactgaagagcttctccttagttactttctttcttttctccgaatttcgatcctctgctctgctccagctttcaactttcaactttcaactttcacagctctcggattcgatcggatcatcttcgcttgcttcggaactcagtttctctcggtttctttttttattctttttttgtcttctctgctgttgcacaagggctcaaatatcaaggaattgtgtgcattacagggctcaaattacagattatcttgatgtgatactgctaagaagttgaaaatctatagaaaagatggtgaaacatcgctttagagagtctattaaatctttgtttggaagtcacattgactctaataaagaagagcagctccaggaagctaaagcagaaattgaagacaaagtgaaaaggatattgaaacttattaaagaggacaaccttgaagaggatggtaccccagtagaacattctaagaaggaaccgcttgttgaactgattgaagatttccacaatcaataccaatcactgtatgcacaatatgatcatctaacgggcgagttaaggaaaaagattaagggcaagcgagaaaagggtagttcttcatccagctcagactctgattcagattcagactattcttcaaaggacagagacaacaaaaacggacaactggaaaatgaatttcaaaagacaattcatgacttaaggcaagaacttgaagtggtgcatatagaagtggctgagttaaatcgtaagttgacaatcacacatgaagagaaggaggatcttaattcaaaatatcttgcagcattgagcaagatacaagaagcagacaaaattaacatggacttgaaaactgatgctgaagcattaggcactcaaagattaaaacttttggttgagaatgctgaactaaataaacaactggacactgctggtaaaatagaagttgaactgagtcaaaaattggaagacttaacagcagaaaaagatagtttgaccatggagaaggaaacagctctccaacagattgaggaggaaaagaagattactgatggcttgagaacccttgttgatcaactgaaagatgagaatttagcacttggcaaagagttagaggcagttacaggtgaattttccattctgaaacagcagttggaacatgcagaacagcaaatgacagatataaggcacaatctgaaagttgctgaggaagaaaatgaatctttaaaagtgaaactttcacaggcttcaaatgaggttcacctggctcacaatagaatacaagattttgtagctgaatcaagtcagttaaaggagaaacttgatgagagtggaagggaaatttctgccctcactcagatgcatgaagggtatcagaaagaatcctcaaatcaaatcagggaactggaggcacaagccacaaccctggagcaggaattagaatcactgcaaaaccagaagagagatatggaagagcaaattaagagcagcacaactgaagcgggggaactaggagagctcaattcaggactacaaaaccaaatatcagaacttgaaataaagtccagagaaagagaagaggagctatctgctatgatgaagaaactcaaagataatgagaatgagtcatcttctaaaatgtcagatttaacatctcagatagataagctgctggccgatataggcacattacatgctcagaaaaatgaactggaagagcagatcatttctaaaagtgatgaagcttcgactcaagtcaaaagcattacaaatgagttgaatgcattgcggcaagaagtggagtccctccaacaccagaaattggacttggaatttcagttagtggaaaaagtccaagaaaattctgagtatgtgattcaaatgcaaactctgaaagaggaaattgacagaaaaatcctggaacaagagagacttctggaagacaaggaaaatttagccatgaagctaaggaccctggaattagagatgaacactataaagaataaaaacagtgaagctgaagagcaaataagggctaaaagccatgaaatcagtcacatgagtaagggaatgctggagctacacgaaaaaatagcaaaaaaaaaaaaaaaaaagaattcctgctgtttaaactcactcaagtcgttaagaggagtttattaatgcgcagcaggctgctttcagctgtccccctttaagagggggtaaattccggacttgggggaaaccgggn

SEQ ID NO: 3632 - DNA, 1872 bp, Glycine max
  Clone ID: GLYMA-23APR03-CLUSTER490960_1
tcagctacgtaggccccccccccttcaatctcttaaccttgtgaattgatatcatcaagtgtaggacaagtctattcttcaaaattcgtttattttttggttaattatttgagaaagattttctactcaaatcacttagacataagacaatcatgatatcacttaggcaataataaggtttgcgttgagtcataaaatgaaggagtttagaccatatgtctttttgttgtcactcctatgattatatatgacaacttctttgcacgaagtatatcacgagtaaacaaaattaagagaaaaccagccaatgaatgtctattagtttcaaaggcaaatctctatgcaaacctaaaagttaaattgaggttagaaacatttaatatgataaaatgttttttctccctgaaaaataagtaaaacttcagtttttgttcttctaacattacacaattaggtaacataaaacaaaaatgacgttacagatgatgacaagtcaattcattagccacgtccacagttaatctaatgtcattaccttaaaagatgcaaatgggtatatttctaaaattgagataccaataagttcaattttaaactagagataaaaaaatagatttgaccaaaatttgagtaactaaaaactattatatatcatggaatatggaatttcgttggattaaaagaaagtgagacttagaatattttgctagaaatactccaaaaattaacgaccttcagattcacgagttacagattctttttctctctccacatatttcaaagattaatagtaaaatctacatgaatctaactattgccatcctttgattggaaaaaaaaaattattccatccgcaaactgcaagaatgttttaagagatttgaaaaggctggtctttaggtccaagagggctatatagaaatgccagctaagataaaagcataaatgttaactatgaaacaaaaaatatggtcaaaggttggaccaaagtgcttttacatttttcttcttaaaaagacctagggaaacgttgttacatacttaaaattagaataaagttgaacatgttcataaacataggccaacaagtattattaacgaagttcaacttagagtccgtttgtctagcaggttatatatacacgagaaacaagcgtaatgtttgatacaccatcaattaaatctattttttcccctttcactaaacatttgattgtgggattttattaaattgcgggcagaatattcttatgcaaacaacccattaggaattaagagcgtaagatgtactagaagaccaaaatcaacacaacaagaataatgaagtcgactgaaattaagtttttttattttttttgcataattcctatagttttatatctccttttcccttttgaacaatatttggtacacagtaccccagaagagaaaccaagatgaaaaacttcaaagggaaattaattaatacatcaaaggagccaaaaaaaaaagaagagaaagtaatcgtaaacatatatgtggagatttgtggtgactacataaggtgaacaaaggattcaattgatgtgtatgtgaatgcctattgctacaaccaagatggtaagtatgcagaagaaaatgatggcatgaaccaaaattgcgatcccactagtgctcatgtttccaaactcaaccaccctataccttgcgggaaattggaacaacaaacccggagataagaggatgaacaaagccacagcaataataactggtccccaatcagcacccatttctcttcaattcttcactcttcactcctcactcctcacttctcactctgtgttgtattgcttcttctgcctctgtgcggacgcgtgggcggacgcgtgggtc

SEQ ID NO: 3633 - DNA, 1508 bp, Glycine max
  Clone ID: GLYMA-23APR03-CLUSTER49170_2
gttttctttctccttttcacgggctttctcttcttttcctctggcttcatcatcatctctctatctgcaccccttttgagaacttcaacttgttacttaattactctactctcccctttctagcttctgtgttcttcttcttcggttctctcttcatggggtgctgcttaagtgccaggatcaaagctgagagccctccacgcaatggtttgagttcaaaggatggtaactaggaagaagatggcttaagcagcaaggcctcaactccctctgttcctccaactccgcggacggagggagagatcttgaagtcctcaaacatgaagagcttcaacttcagtgagctaaaaactgctacaagaaactttcgtccagatagtgtggtgggtgaaggcgggtttggttgtgtttttaaggggtggattgatgaacagacacttgcaccagttagaccagggactggcatggtcattgctgtgaagaggcttaaccaagaaggtcttcagggacacagtgaatggttgacagaaatcaattacctggggcagctgcgtcatcctaatcttgtgaaactgattggttactgcttagaggacgaccaccggcttttggtgtatgagtttttgaccaagggaagtttggataatcatttatttaggagagcttcttactttcaaccactttcttggaacatccgtatgaaggttgctcttgatgctgctaagggtcttgcatatcttcatagcgatgaagcaaaagtgatatatcgagacttcaaagcttcaaatatcttacttgattcgaattacaatgcaaaactttctgattttggcttggcaaaggatggaccagctggtgataagagccatgtctctacaagggtaatgggcacatatggctatgctgctcctgaatatatggccacaggtcacttgacaaagaagagtgatgtatacagcttcggggttgttctgctggaaattatgtctggcaaacgagcacttgacagcaacaggccaagtggggagcacaatttaattgaatgggccaaaccttacctcagcagcaagcgcaggatcttccaagtcatggatgctcgcatagaaggccaatacatgttgcgcgaagcaatgaaagtagccactcttgccattcaatgcctatctgtggaaccaagatttagaccaaagatggatgaagtggtgagagcattggaggaacttcaggattctgatgacagagtcggaggggtgggaagctctcgtgatcaaactactagaaggagtggccctagacaacatagaggtagacaacatgaaacaacaaggaagtgaaaagtgaatgttgatttcatgttgtgaacatgattttgctccagttgctattttgtatgtatgtatgcatatcatgatgaacttaagcattgcttgcttaagatgtctgattgctgtacagttgttgttgattgagcaataatattgaaatcttcatttctttcttccttcaaa

SEQ ID NO: 3634 - DNA, 1517 bp, Glycine max
  unsure (1)..(1517): unsure at all n locations
  Clone ID: GLYMA-23APR03-CLUSTER49257_1
cactcccttcccccctccagaaaacctaatagtaatagtagcaagtttctttcttttttgctctctctctctccatggacttccatctgaagcaatggagaaaccagcacgagtcagaggaacaacattctacaaagatgccaaaacttctccctgaatcccatcaacaacaacagccatcagcctctgcactccctttgtttgtacctgaacccaacagcagcaaagtcagcaccctgtcagattcaacattagcttctgctacaatgacttctaccaccactaacagattatttcccaggatggggagctacttcagcttgtctcagtggcaggagcttgagttgcaggctttgatattcaggtacatgttggctggtgctgctgttcctcctgaactccttcaaccaatcaagaaaagccttcttcattctccacactattacctccatcaccctctccaacattaccaaccttctgctttgttgcaatcagggtattggggtagaggagcgatggatccggagccagggcggtgccggagaaccgacggcaagaagtggcgctgttcgagggacgtggtggctgggcaaaagtactgtgagcgccacatgcaccgtggaagaaaccgttcaagaaagcctgtggaactacccacaccaactagtgctattaacaattgtggtgtaactggagttggatccctaggaccaggtgcttcatcatcttccatttgttcaccacccttagcttctgcttcattcaaatctccttttgatcttcatcttgatgaacgttcctctgggaccaagaatgaagacgaagatcatgtgggtggggatggcagatcaggtggaggtggtggccatatgctgaggcatttcttcgatgattggccacgatcactccaagactctgacaacgttgaaaacaatgctgctgctggccgtagcctctctatttcaatgcccggtgcttcctcggatgtgtcattgaaattgtccacgggctatggagaggactcgggcccaggaaatgagaatgtaagcctcgagccagagcagctgcagttgaattgggccggaggatgggcctcgtctaatcaagtggcttcgatgggaggtccacttgctgaggcactcagatcatctacttcaacctcatctcccactagtgttttgcatcgtcacttgcctcgtggatctgagaccagctttattagcacctgaatttagttatagtgggtgccccgattatttttctgtttcttgtttcgaggtttaagttccacttttggagcattcttggaccacggttatgttcttttcaaactgtgtagactacttttgtttctaagtgggcgatgaaaggatatggtcggtccctggttggattaattcgaagtaatactaaattgtcaattaacaatcacattttctttatgaaagtactttagttcctcaaaaaaaaaaaaaaaancnctaaattaaaaannnnnnnnnnnnnnnnnnnnnnnn

SEQ ID NO: 3635 - DNA, 1402 bp, Glycine max
  Clone ID: GLYMA-23APR03-CLUSTER4952_1
acagctacgtaggccccccccccccccccgagtataagagggggaggtggcatcattcataatcgcaacaggtgtcgtgaaatggcatatgcaagtagtacatctttgggagtgcgacttactgagggagaggggaatttgcccaagcttgtgctcacttccctaatattggtggtggcagagtagaatagcagatggcgatggtttccatggcattctgtgtcagcactgcgacttttccgaatctaaacaggtgtcgtggagtggcatatgcaagtttgagcaacaaagcaagtactacatctttgggagtgcgagttacagagggagaggggaatttgccgaagcttgttctcacttccccggccggtagtgaggctgagatatacctgtttggaggttgcattacttcttggaaagttcccagtggtaaggacctcctctttgttcgccctgacgctgttttcaatgggaacaaacccataagtggaggtgttccgcattgttttccacagtttggtcctggtccaattcagcagcacgggtttgcacggaatatggattggactgttgtcgattctgaaaacacagaaggaaatcctgttgtaactctggagctgaaggatgctccttatagtcgtgctatgtgggatttcagcttccatgctttattcaaggtcacactaaatgctaaaagtcttgcgactgagctaacagttaaaaatacagacaataaagcattctcatttagtaccgccttgcacacttattttcgagcttctgcaagtaatgcatcagtaaaggggttgaaaggttgcaaaactctgaacaaagatccagatcctaaaaatccagtgtagggtaaggaagaaagggatgttgtcactttccctggatttgtagattgtgtttatcttgatgcttccagtgagttgcaacttgacaatggtttgggtgatctaatatctatcaagaacacaaattggtcagatgctgtgttgtggaatccttaccttcaaatggaagcatgttacaaagattttgtttgcgttgaaaatgctaagattggaagtgtccagctagagccagaacaaacttggacagctgtgcagcaccttagcatagcttgaactgtaaatgtgtttctacatcagcaattatttttgtcatatttgataccccaacaaatatgtatcttctgtattaataattttctatgccactactgtcgagggaaggatagtgtacaagagttaaacctcattacattcgtaacattatcgtaacaacaataaggaataataattttcttttatattctctattctaaaagataaaatttttctcaaaaaaatttctcccaacaggcagtgaaaaaccattattccatcttcccactttc

SEQ ID NO: 3636 - DNA, 759 bp, Glycine max
  unsure (1)..(759): unsure at all n locations
  Clone ID: GLYMA-23APR03-CLUSTER49708_2
aaatcaaaattattattgcatttcaatatttttggtttacgatgattgcnnagtgtgcatatgtgtgtttttggtgtctgactcaattgcctgatgatcatccagccagtggtgtaaattgttttagccactggattcttggagagcatggacactcagaaaagtcaacctgagaagcagtcttcatccactgcaactgccccatctgttacttcatgtcgaaagaagaagaatgaagaagctgctttcttggacgatttgaaggaccacattgatgagtttattaatgcttctatggatgaacacaaaacttgttttaagaaaacaattcagaagatgtttggtatgtccaaggctgttgcagaaggtcagtccaatgcttccaaagaagttgaaagttctctgcctcttcagacaactgtacaagactagatttcttgcttttgaaccactaggttttaaccgaggcgtgtggttataccacccagatatttagttatattaggctatttgaaactaaattttgtttgtgaaaactacattcatgggttgttttttgtttttaccagtagggtttctaggcttaagcattgttgaattatgggacctgatccaatttttaaagtgagtcccacccatcagctcctgtacccttttccattccactgatgtaggatgttgacgcatcccaatgtaggatgttgacattgccccaaaacttggaaaacatattttcgaaaataaaaaaaattccaaccc

SEQ ID NO: 3637 - DNA, 632 bp, Glycine max
  unsure (1)..(632): unsure at all n locations
  Clone ID: GLYMA-23APR03-CLUSTER4978_6
aattttcactaggtcccgttgtgtgtgcacggaatcaaatttctcatcgacgatggcgaataccctacaacgcgccctacgcgccaccatggcccggcggttctccaccgacgcattggccgaaattaaacgaggcgagatcggaatggtttctggaattcctcaagagcaccttcgtaggagggttgtaatttactctcctgctagaactgcatctcaacagggatctgggaaggtgggaaaatccactgatgggctggacatccactggggacccctactctcatgttggtgattctgccttgactttngatagngaagaagcagcaaaagcatttgcagagaaacatggttgggagtattcggtgaagaagccccacacaccattgctgaaggttaaatcatatgcggacaacttcaaatggaagggaccccccaaatctggtgaagagtgatttgttggtttgtattcatgaaaatgtattccgtcttccggagtttcaacgtgcagcagtttttctctgcatattttcttggaaaaagaaagtttaatgtgaattactgattgaaaataaaagggactgatctgccattggtttaaaaaaaaaaaaaaaaaaaaaaaaaaatcgcga

SEQ ID NO: 3638 - DNA, 1747 bp, Glycine max
  Clone ID: GLYMA-23APR03-CLUSTER49987_1
cggctcgagcggctcgagtacggctgcgagatgccaacactagggtattgctgcgcggcgatcttccttgtttgtgaattctattctattctattctatcagcactttcaagtttcaagacagcaagcatatcatacaaaccttgtcccttgtcattatactttcactgaaatccaagtcagagtcaattctcagtgtctcacttcccaaaattcttcacccttttggccttttttcccattcagaaaatatgattcagttcaatacaaccaagatgaaaaagtggatgttttcacactgatcttctccttaaaccccgccaagttagtttttctttttcttttcccttgcctaatggaagttatgtcaaacaccatcatcaagcaaagcaacaacatagcaatttcacaaggcaccatccattttcaaaaactttctttctggttcgcccctcgaactcgtccaccgggttaattttccttctgatctttctcttgtagctccactccactaaaagggttttcaaaggttttaaaaaacctctaccatagcaatttcaactacaaaagtcaaggattttagactaatcgcaattcgtgattgtaactgtggttgcatcggctgtatttgttggtaatttttttacaacatcaagtatcaaaataaaactgcaaccacgactgcaatttaaaacctttaggactatggtttactccttctatgacaaaacctcttcttcttctggctccgatatttcggggttgttcaatcctactttgcataaccttggagcttgcaatgacttgtcatcatcaccacattctttggtatttgagagtgataagggagagctggtgaagtgccttgcagctgcaaaggtagggaagagtgagatttgtgaggccaaagctttggctgctttgaagaaccacagtgaagcagagaggaggaggagggagagaataaacggtcatcttgcaacactacgtggccttgtgccatccactgaaaagatggataaagccactttactggctgaagtgattagccaagtgaaggagttgaagaaaaatgcagcggaagtaagcaagggttttctgattccaaaggatgctgatgaagtgaaagttgaaccatataatgatcatgaaggaggagaaggatccatgtcttacagtgcaactatctgctgtgatttcagacctgaaatactatctgacctaagacagacccttgattcccttccactgcatctagtcaaggcagaaatttcaactttggcaggtaggatgaagaatgtgtttgtcttcacttgttgcaaagaaaacattaataatattgattttgaaaaatgccaagctcttgcaagtactgttcaccaggcactatgttctgtgatggaaaaggcttctgcctcactggatttctcaccaagaacatcacatgcaagcaagaggagaagactatgctttattgaaacatccaattccacatgcaaccatgggtcttgtttgtgctgatgtcaagaatttgatgtgttatgttatctgtttctgctgcaagtgttagagtgtggtattaacatttcttattttttgaggaatgctaacaacacaactgatagtatattgtttaatatgttttctattattgggtgaatctcactgaacaataaatgagattcgttaaatagcatatgtgacatcatataatgagagccacgcttatccaataataaaaaaaaaaa

SEQ ID NO: 3639 - DNA, 853 bp, Glycine max
  Clone ID: GLYMA-23APR03-CLUSTER50001_1
ccgggcaccgcgcgccgcatctggcccccgctcgggccttgggttccgggcccccctgggggtggcccgaccaaaaaccttttttttttttttttggagcaacaagaaacaccttgcatctctatataaatcgaaagaaaacaaagaacattaagaatgcaaagagaaaacaagacttagctggaatcagaacccttcattgaatgagttcatccccaatcaagtctataactacaaacatcaagcaagttttgcttgagtcaacttcttttcaagatacttgagagatgtaggattgatttgagtgaacacatagttcccagcaaagagatcaccaaaatgaccctgcccctcgttgaaccttctcttcaccttagcacaaacaagcatcactttttttatcatccacactcttctccaactaggcactttcaccctaaaccttctcctcaatggcacccctctaggcctgcaccacttccttgacctaaggatcaccctttgatctctttcgtcatcagaacatggctcatgccttagaatttggtaaggaagcttgatggcactagcagaaaccatctctatggaagacatggtggtgagagtgaaaaatcaattgaagacaaattgaagtaatttgtaattgtgaggatttcctgaattagttttgaggtggtgttggtaactacaatttttaggagctgttgatttgttattacatgaggaagctattttccatttggagggtctagggaagggtcccccgggattcctggaccccgggggacactaattttaaaagggccccccccgggggggaacccccctttttttcacttaaaagaggaaattg

SEQ ID NO: 3640 - DNA, 554 bp, Glycine max
  Clone ID: GLYMA-23APR03-CLUSTER500172_1
ccccccccattgcatagtatagttaatagtatgactcttcctccatccttatcggagccaccctcactttccgattcattctcaccgttaaacccaaccctagccatggatagtctccaagccacttacaaagacgaagaagaagatgacgaagacgacccacagccgcaaccaccaccaaccaccgacgccgattcactggaagcccctcccgccaccaccagcaccccatccgacaccccaaccgaacccccgaacgacgcccgatcggagcccgacccctctgacgacctctccgaagatgaggccgcctccgacggctccaagaagtccccgaaatccggccgcgaagaaggcgacggctccgacgaggacccgccgccgaagaagcagaagcagctctcctctctcacggcggatacaaaggaggaggatggaaccaacaatgcggcggcgaccgctacgccggcaacgaacggctcggcaccgaagaaatcgaagaagaagagcaacaacgtgtgggcgacgaagtccacgcgggaaggggaagaaag

SEQ ID NO: 3641 - DNA, 1542 bp, Glycine max
  unsure (1)..(1542): unsure at all n locations
  Clone ID: GLYMA-23APR03-CLUSTER501046_1
tttttttttttttttgggcattaacttgtttctgtccccccctatctagaaggggtcttggtcttagccattttttttttttttttagcaatttctatatacttttatctccaaataaatataggtctaagccatgactacattatatactagtctacaaattccctttgctctctactattacacattgacattctgcgcacgggagataccaggatgtttaatttgtatctaaacttacatggtccaactccatacttccgctttttacctcctaagaataagcaaatgttgtttcttcagtaataagaaattttccttattactcaggttccaattccatcaatctcttcacatttttaaccatgattgccctcgagactaatcattaggctgagaactatgatttttaagagatgatgattaatttgctcatttcccaccactgatgtggttaatattcaattcctgtcctgcacccctagcaattttgatctaccattgcaaggagcgagccctacggagtatacatggtggcttttgcttctgcgcaatagggagtactttttccattagctgcttgtacctcttctttttcctctcagccttttccttcaagagcttgtcattttcctcctctagtttcaccgccaaagactccaattccacttggtaagcctgtttgcgttccctagacctagcagcagattctctgtttttgatcatcctcctctgcctctgttgcgcggccttatccaactgctccaaaacgggacgcgatcttttaccccttccgcattcgatgacctcgacgccgtttccgaaccctatgacggagccttcggaggggtcgtgaaacggcgtcgtgggaaggtggtcgaaggagaagagggtgccgctgccgagcctctcggtgaggggcattggcatcttgacgtcgtcgttgtggtagtcggggtcgtggtcatgggcatggtcatggtcatggtcagcgtcgtccacggcgtcggccttggcgaggaagtcctcgagagtcatcatctcgttgtcgtcgtcgtcgtcgtcgtcgagggcctcctccttgcactcgcggcggtcgccggtcacgatctcctgccacacgtcatcgacggttttaggggctgcggcggcggggatggggatgaagttggtggtggtgaattgcggggcgggagaaggggaagtttctgattttcgtgaattggaagacgccatcatcttccctagggttttgggatttggaagactttagactttagagagtggaagctgcagagtggagacccccaatgccttgtcgccggctgtttttccttttttcttttcttttagaatttttattggatttaattcaaatatattctgttttccattcgtcgaggccgctccgccgagcctcctccccccgagcgccccgccggccccgggctccccccttccccccgggccgcccccccccgccccggcgcacccctccgccctcccgcncgccgcgacgcccccacgcttctcggctcccct

SEQ ID NO: 3642 - DNA, 1261 bp, Glycine max
  unsure (1)..(1261): unsure at all n locations
  Clone ID: GLYMA-23APR03-CLUSTER501145_1
aatggcgacgggccccgcccgctggtccccccgttagttttttttttttttttagctacaattttcattcataaatcctttattataataatccctattttttgtaaccttacatttccttccttaacctaagccgacataagcaagttcagaattcaactggccctaataaaaaatgaaacaatatattctgattagttgtaagatgctttcttccttaaccagcaacagggtcaggtaggcttgaagagcaatagatctgctattgattctggtccatacattttaatcagctcttcctcgatggcatcgttttcattgcagatctccaggcactcctcagaaagactcttgagcctctgtgtgagcacggagttttcatccttaagcatttccatttgtttatgtagctcttcacattctttctctttccgcatccttgatctcctcgccgattccctgtttgactgtctttttctttctcttcttatttcatccttttccaaatttacaagttgagcattagcgtcagatgcatctaggcctgtctccaaatcctgattcagtttggttgaacttgcattttcaagcatcaaattacagtgctgcttcttagttgaaggaaaatccccagctactgtgggtttactggagagcatccttggatcatgcaaagcatcggattgaagtagtgtgttgtttacctgatttacccacatgtagagaggcatgtgagaaccagctgcctgttgatttaaaaagggagttggagtagacccagaagtgttatatgcctgcatagaaggagtccaatgtgatggcaaaggtctgtcgggaatttccttatcttcaggcaccatgtatttgaaaggtgcatcaaacatattagacttttgtgtccccatcaagcttgagaaacttgtgaactcagcagtagctttctaaatgaataactgagtggcgcgaaaaacacaaactagtgtgtagtgtgtggtgagtgtacccccccttctgtcgtcttctcgcagccgtaatcatgcgattgctgtatctaggcgcatccactctctctagactgtccgacccgcgtttggcagctccagtctgctcccttagctactgtaacgcagncatgacgaatcatggcaacctgcctcccgtgtgatttctatccgtcagcatccgccggataacgcgaaccataaaggtaaatctgccagctaagaatactaatgcaatattgggtgccttcggccctttc

SEQ ID NO: 3643 - DNA, 1667 bp, Glycine max
  Clone ID: GLYMA-23APR03-CLUSTER50250_1
tcggcgtccccccccccgtgcccattgtatgagagtaagtgagaactgagaacttctaagaaacgccgccaatggcgcgacactcacccttcctcgctctcagccccctctcactctctcgaaatagagatttagcttgtgtctgtcacagaaaaagaatcatgtctgtgtgtgcggggagtggggattgggttgaagagagtgtggaaggtgatgatgacctaaggagcagaatcttcaggcttaggctccccaagcgaagcgccaccaacgttcttcagaaatgggtcctccaagggaatcctattacgctctctcagcttcgggatatatccaaagagcttcgaagatctcaacgttacaaacacgctttggagagcgctactttgagggtctacctcttgctacaaagactactgaaacatacacagcactcctccattcttacgcaggagcaaaattgactgaaaaggctgaggaactttatcaaaggataaaggattcaaacctttcctttgatgctcttacttacaatgaaatgatgactctttacatgtcagtggggcagtttgaaaaggtccctatagttgttgaagaactgaaacaacaaaaggtttcccctgatatctttacttacaatctatggataagttcctgtgccgctattcttaatatcgatgaagttaggaggattcttgatgaaatgagtcacggtgctggttctaatgaaagttggatcagatatttgaacctggccaatatatatattagtgtagctcatcttgataatgcaagttccaacacacttgttgagactgagaaaaggatcacccaaaggcaatggataacttatgacttcttaatcattctttatggtgggttgggaagtaaggataaacttgatcagatatggaattccttgggaatgaccaaacagaaaatgattagcaggaattacatgtgcatcatttcttcctatctgatgcttggtcttacgaaagaagtgggtgaagttattgatcaatggaagcaatcaacgaccacggattttgatatgcttgcctgtaaaaagattttggttgcttttagggacattggcttagctgaaatagccaacaacttgaatgtgattctcattgagaagaacctcagtcttggaagtgattaactaggagttctctgagcatgaatgtaatatagaatatatatagatttgagatcaattttgcaacttcggaagggaaaatatatttcatttgaaatttgttaatccatcccgaatgaataaatatgctgtgtgaatggaagtcttgcaatgctcttgtggatgtacaagatttcattgcttctaactttttcggcgaaaggatgtcaagcaatgatggggtggaggttcaggttgtcatcattgcttctagctttttcatttttatggtgcccttggctagcagcatctttgatgttgtgagaacctttaatttcgcctttttctgattttgtagttatattgctgctggtatttttatatttcttcctaaaaatttggatgtgttttgcattttcattcttctagaactagttgttaaattgaatattttccaacttttactgttatctttttgccggaacttttattcctcaattattatttttatttagatttaatg

SEQ ID NO: 3644 - DNA, 692 bp, Glycine max
  Clone ID: GLYMA-23APR03-CLUSTER50306_1
aatcgttccttggtttctcctccatgaaatcaaaatgaaaccactctcactctaatttctctctttctctctctatataccaatctcatccaaatgccttccacccttcaaagtttcaagctccttgccactcgctgcgctaccaccaccgccacccaaagccccaccgcgagccccgtcgtcctccgccgccgccgccgcaagacccttcgcatgttcctccacgacccgccggaaaccgccgacaaagacattagagtccgctcaaagctcaaggatttgctcctctcctcgccgccaccgccgccgatgatcaagaaacgccaagagcgggaggggctgctccccggtggcggcggcggcggcttcgggttccgattacgaagcggttccggtttccggcgcggcggcgccgcctcactcaggcttagactgctgagaagagcttggcgacctgtgctccaatccatccctgagtagtcagtcactcactgttattatttactgttgtgaaattattattagttcttatgaacttattacggttttgtttattaataattcttagggtgaaattaatatattatcacatttattttaatttctacttttgtgtaattatttttaattaatgttgccatagctacactgtcggttgtcgttgtaataatactgtgaaaattgagtgaaaa

SEQ ID NO: 3645 - DNA, 1730 bp, Glycine max
  Clone ID: GLYMA-23APR03-CLUSTER5049_10
gccgacctctgccgccagatcgtgacggtggtccacgattgccacaccatgggagtgatgcacagggatctcaagccagagaacttcctgttcctcagcaaggacgagaactcgccgcttaaggccacggacttcggtctctccgtgttcttcaagcccggcgacgtgtttaaggatcttgtcgggagtgcgtactatgttgctcctgaggtgctgcgtagaagctatggacccgaagctgatatttggagtgctggggttatattgttcattttgctctccggtgtccctcccttctggtcaaaaaaggaacaaggtatctttgatgctattcttcgtggccatattgatttcacatcagatccttggccttccatatcgagtagtgccaaagatctggtcaagaagatgttacgagctgaccccaaacaaaggctctcagcagttgaagtccttgatcatccttggatgagagaagatggagcatctgataagcctctagatgttgctgttttatccagaatgaaacaattcagggcaatgaacaagctaaagaaagttgctctgaaggttattgctgaaaacctttctgaagaagaaatcattggcttgaaggaaatgtttaaatccatggacacagataacagtggaacaatcacttttgaagagttgaaagctggtctgccaaaactgggtactaaggtttctgagtctgaagtaaggcagttgatggaagcggctgatgtagacggaaatgggaccattgattacattgaatttataacagctaccatgcacatgaatagaatggaaagagaggaccacctatataaagcttttgaatattttgacaaggatagaagcgggtacatcacaatggaagagttggaatctacccttaaaaaatataatatgggtgatgagaaaacaataaaggaaatcattgtggaagtcgatacagacaatgatggaagaattaattatgatgagtttgtagccatgatgaggaaaggcaaaccagatttagtaaccaacagacgtcgcaaatgattacgttgatcataaattgcctgtctaactgggttcgtagacagacaggaggaggctcaggctctacacgtttttgtgatacggaatacgttgcattcaattcgacactctttactcacatgttgtttttgagagctgttctataacaaagtatttctgcttctttgcctgctagtttgcgggtctcgtgggacaaccgccgcagagctccatgatgaggttaacggagtggcggtcctcgtaagcgcccttgagctccacgatgttgcggtggccggtgaggtggtgcatgatctgcacctctcgccggacatcctccaagtcgtcgcggtggacgagtttgggcgtggcgatggatttgcacgcgaattgttgtttggtgtgtttgtgggtcacaaggtatgtcacgccgaattggccgcggcccagttcgcggccgaaggtgtaggtggagcggacgtcctccatgggccggcccaagacccggccaacggagggcttcgaattgggaggaaggacggtgatgccgttggagttggagcgtggttggggatggtgatcggaatgtggctgagtttgggaagaggcttcgctgttacagttccccatcgaaacggtgtcgttactgcgctgctgcttcttggtgtttactcgatcaggactgaaacgtgaaaccatat

SEQ ID NO: 3646 - DNA, 566 bp, Glycine max
  Clone ID: GLYMA-23APR03-CLUSTER50564_5
attagggtttttggggttatttaacaattgccaggctgcttctattaggcggcaaacatagagtttctaagctacactacacagtcggggaagcaatggattcgttctcaaatcaatcgagagggtcgtcgagccaattatctgctcaggatctcaaaaaccagttgaagaaccaacttgccattgagtatgctcaacaatttcttgagacagtgggaagaaagtgttttgagaagtgtgttacaaaaccaggttcaagcctcggtgggagtgaaagcagttgcatctctaggtgcgtagatcgatatattgaagccacaggcataattagcaaagcgttatttagttcacaatgaaatggacaaccccagtaaatcttgtttttgctcaacattgtgagtactaatttatagacattggagattatgtgttctccgggttttttcttccccattttctatttcccattacaatagacaattatgcaattatttttcattatacaactagtgtatgtcccgtgattcacgtttatttccaactctctgtttccttaaatgaattta
